United States Patent Application Publication US 2026/0191916 A1 - sequence listing, part 90

SEQ ID NO: 596 - DNA, 4685720 bp, Bacteroides finegoldii (residues 3,123,815-4,685,720 of 4,685,720)
  source 1..4685720: mol_type = genomic DNA
tcctatttgccatactacaaaaccgatatagatgaagcgataaaagagtatgtgaacaataaatcggaagattttgacgctattagcatatctgcgaaaatgtataatcctgtgattaatttctcaaaggatgaattgagagtgttggatattggaaatagttatacacaggattctatgagatacctcgcagatattgtcgaaaatttaaagcttgatacttcaaaaattgctgtttatagaggtatgcgctcatctgcatcatttaagacttggtgggattgctactataatagagatgaacatgattatactttccataaggtttttggggagttatcggtagatattagtggaacacacggaaatagtaatggcgaattattccgtaatgttctcacaaacaacaagtgggatgttattattattcatcagtcaagctcttacgctccctactttgacgcttgggagaataattcagagtcggggcatttgagtgattttatacgactgattcgaaaacatcagccacaagccgcaattggtactttgcttgttcatagctatcagagcacctattcaggtaatactgaaaaatcaactattaagaggtggaagaaaattgcaaattctgtggcgaggctaaagatggaatatggcatagatttcattataccgtatggcacggccattgaaaatctacgtgcatcatctttgaataatgagatggagctgaccgaggatggcgtacattgtgcagaaggtctaccaatgtattgcgcctcttgttgttactatcaagcactgtttgcacctcgttatggaattagtatatttggtaatacattgaggctgacttcctccgcccctcatgctattaatgtaactgatagtaatgcgccaattgcacaaaaggctgcgatatcatcttgctgcaatatgtgggagtgtattaatccagaaacaattgaactctaactatattaatgaaatacattgtattgtccacagcaataaaacaactctaattaaaaaaacaatgaaatacgcagtagtaacaattgaatggctagcccagcacggtctgttggctatccccacaatgagaaagagtaaagacggaagtaaggtaatcctccacgaagagtatttgtccccttacaaggatgaagagtttccgagatactattttgacagcccggaactgaacgcccttctgtcaagtgatgaatggtcatggacggaagaggaacaaccagaagggagtgcggaattcatccaggtggcggcagcgcagaaccttttgaatgtgaccagagccggaattcaaactatgtacctgacagacaacgaagcgttgaaagtgaagtccatgtatccgtattggaacgagtttatcagcaaatcactaacaaccggaatgaaagtgcaatataatgatggactgtaccgggtaaggcagaatattgctaccgtcttggagaatcaaccgccaagcatcaacaccgcagctctctatgaggaaatcaacgagaccgttgccggaacaaaggatgatccgatcccatacaataacaatatggcattggaagagggcaaatactattcgcaggacggagttatctataagtgcacccgttctactggacaggcggtttacaactcactaaaagaccttgtaggtatttacgttgaagtagcatgagaacccttccttatatactgatttgcctgttacttggcgtactcgtgtggatgaaatgcagtccgcacgatccgtcaacggtttacgttaaaggagatactgtacatatccgggacacagtaagagacacaatccctaagctggtaaaagaaactctgaaacgtaccgatacggtatatctacctattctgatagatacaacgactgacagaaccgtagaaggcgattcgattccggtactgataccgataacaagcaaggagtataagaccgatgattaccgggcggtagtcagtggatataatcctactcttgattctatggaaatatacagagataataaaattattacttttccacctttacagaagaagaaacgatggggattgggcttacaggcaggatacagttatccgggcggttggtatgttggagccggaatcagttgtaacttgttcatgtggtgagaaaaaggtgctatcttcccagacggcaccttaagtaatatgaaaagtttaggtacatttttttacaaaagtttattctaccattttcttatgacatataggctatgtaaattcaaaatgtgttatcctattttggcttcattcattatgaaactgttttgctacaatctttataaatgataaagcaaagcgcgtgccatattctgcttttgtttatatttagctatatatcaatggtatgaacacgaatgaacatattgcgtatctgtggaaaatatgtggaattgttaacatgattgtggaatatatcgtcaaaaacggtaactatcttcgcagaccgttaccggtatgaaaagcttaagttttacttacataacaatttccaatggaaaaaggttcataaagaaaggtgtacaaaacaacacattatttaaaatgccggatttgacagatgtggtgatatcaatgggaaatagtatatctttgtacccgtagaagtttacttgtcttttggcaagttcgccctgactttagtcggggcttttttatacctttgccgaaaactaaatattatggcagaagaacagaaatacgaccacgactcgataaatgagttgctaacttggactaaagaaacgctcaacaataagagatacccgcaggaaggcttccagcttgacaaatgcgcaagaatctcggattgtgggaagtaccttgattcgatgatattggtgataaacaagaactgggagaaccctacgttttacccgacgattgaccagttaaggttgtttagggagaagatagagaaggcagccgaataagctgccttctttttaacatcgttcctatcctattttgaaaagtttttcagcttgtctttccaccataacatcgggcatctttgcatatatttgggttgttgctatatgtttgtgtcctagcatcctagaaacagactctatcgagacatcgttcaaaatagccacagtcgtagcgaatgtgtgtcttgcctggtggaaaaagacaagcaaagagagcaacggaaacgaaaagaaagcataacgcaatttgttggtaattaaccatttctccatattcttccacatgagaaaaaagcaagaaagtggggattattgaagatgttcagttaccaaaccgttagccggactgttaccgaaaggaatcaaggtaacgcgaagcggatcagataatttgaaacgacgatatattacactgattgtcatagttttgcatgcaggagaacgcttataaaacaggtaaatttgccactaaaattatgagcgtatgaaagtagaaaaattcaaggttttgctctacctcaaaaagagcggactggacaagtcgggcaaagccccgataatgggacgtatcaccgtgaaccggacaatggcgcaattcagctgcaaactatcatgtactcccgaattatggaatccccgagaaagccgtctgaacggcaagagcaaggaagcggtggaagtaaatgccaaaatagacaagctgctacttgacatcaatgccgcgttcgattctcttcttgaacgcaagagcgattttgacgccgtttccgtcaaggatgcctttcagggcagcatgaacacccaaatgaccctgctgaagcaattccgtaaaatcaatgaggacctgttggaaagggttggcattgaccgcgcgtatggcacttacgacaagtaccgctatacgctcatgatattggaagagttcgtaaacaagaaactgggtgtctccgacatcgctttcggacaattgacagagcggttcatttgggatttccaggaatttgtgcttgacgagaagaaacaggcggtggacactctgcggcattatcttgccctgttgaagaaagtatgccggacagcttacaaggagggacattctgaaaaataccatttctgtaacttcaagctgccaaaacagaaagtgagtaccccgaaagccttgacccatgaagagttcgtcaaagtccgtgatctggaaattcccccgcaacgtgcgtccatcgtggtgacgagggacctattccttttcgcctgtttcacagggacatcctatgccgatacggtttccatcacccgggacaacctgtcaagggatgatatgggggcattgtggctgaaataccggagaaagaaaaacgagcttcgcgcccgtgtgaagctgctgccggaagccatagccctgatagagaaatacagggacgacaagagggagactctttttccgaaacagctctattccaccttacgggggaacatgaaaatcctgcgtgtcctggccggaatagaatcggacattgtctatcatgccgggcggcactcgtttgcaagcctgattacacttggtgacggtgttccgattgaaaccatcagcaagatgctgggacatagcaacatccagactacccagatctatgcccgtgtcaccccccgcaaactgtttgaggacatgaaccggttcatagaagcgaccggggacctgcaacttgttttataaccgttaaaaagaattttatgagatcgacattttcaatattgttctatatcaacagaggaaaggtaaaagccgacggtacgaccgccataatgtaccgcattaccattgacgggaaaaactccgtcataactaccggattgtattgtaaaccggaggactggagtagcaagaaaggtatggtaaaggaagacaggacaaacaggcggctgtcccaatacaggcaggatatccaaaagaagtacggggaattgctgaaaagaaacggggttgtcagtgccgaattactgaaaaatgcaatcaccggcgtgaatgagctgcccgttctgctattacggagcggagaggttgaaagggaaaaattgaagatccgcgccaaggaaatcaattcaaattccagctaccgggaatccaaatccacacaactgtttcttgaaaaattcgtcaaatcaaggggcatggaagacatcgccatgaatgaaataacggaagagttcggggaatcgtacaaaatctttttgaagaaggtctgcaattgcagcgacaatcgtgtaaacaaatgcctgtgctggctgaaccgtttgctgtacctggcagtggacagggaaatcatcagggccaatcccattgaggatgtggaatacgaaaagaaatcaccgcccaagttccgtttcttgacgcgcaatgatttgaagaagatacttgcgaccccgatggccgatcccaaaatggagcttgtgcgcagaatgttcattttctcgtgcttcaccggacttgcctacgttgacatctaccggctttatccgcatcatataggcatttcatcggacggcaggaaatatatccgggagaaaaggggcaaaaccaatgtggaagcgtttgtgccgctacaccctattgcagaaagaatacttgcgctttacaataccacggactacggtaagcccgtattccctttgccaaaacgtgacggtatctggcatgagattcatgggatgggtgtcggcttgggattgaaggaaaacctttcataccatacagccaggcactcgtttggaaccctcctgctgtcatcgggtatatccatcgagagtatttccaagatgatggggcattcaaatattagcagcacacaggtttatgcgaaagtcaccgatgacaaaatctccgaggatatggataagctgatggcaaaaagaagtgggaacggcacatgttcacaataggactaccgtttcgcggtcgcccgcttcctcgccgcccatggaagttagtacagacttcattgaaagtgaaaaagtcggacggcaggccgtttcgggcagaatcttcctccttcggagcgtattctgcccgaaaactttttccctttcacgtctgtacaatggacgccgacggcagcggaaacaagcgaccgacggaaaagtcggaacaaaagagaaacagcatacagtcagtagattgctaccggtccatatgctgtcctgaaattctacaggagggatattttttgaaagttgaatgaagcgggcaggcggcaaactgcgctctctccagaaaaatcaatctgtttttttcgaccacttgccaatatccgcctttgtccggtccgatgtgctttgtcactttgtcgggattcagtccggctatctgctttcctacagcgttgttcggcaaaagctgttgcgcttggtgtgttgtctttagaaagcatagtgatgattttctccctactttttatttcttcttctcttttgtcgatttctccttacttcttgagtttttcatatagtttctctccattgttgtaaatgacatccaaaagttcgtttgcaagtttgatgtctgcaatttttataatactatcttcttctgttggatagccaagaatattggcgctgtcgtaccaaatagtagatttgtctatgacacatgagcataacgataattttggtacgatttttatgaataatccttggcttttgagaaaatctcaaaactatcaatacttctaaaaatagtccaaacaagccgatggatttatttttttgttgcgtatttcgtaattttattacgaaaatatggattataatttattatatgggattttatttatacctttgtgctatataacagataaatataacaattatgatagcagagttcagcattgagaattttttctccattaaatcggctcagaaaatcagttttgagccatcagtagatacttttatgtctgatgaatattcgtatgaagttaaagaaggggtaagattgctgaaagtgggcatcatctatggtgccaatgcttctggaaaaacaaacatattgaatgccatcgaattcttcaagatattggttttgagaatgcctaaagaccgtaatgagaaaacaggggtggttcctttcatgctggacgatatttcgagaaatgaaacgacaaagttgtctatggcgttctatatcaatcaatcgaagtatatccttagttttgagttggatgccaagcatatctattccgagacattgattgtttatgattcaattcgccctaccaagctgtataaccgaagttatgatgattcaacggattccacgaccatcgactttggcgtaaatctaaaaatgacaaagaaaagccaagatgtgatttccggaaatactatcaataattgcagtgtgcttgctgcatttggcaaaagcaatgtggaacgcactaagctgaatgatgtgtacgactattttgccaaacaagtaaaggatgtgttggctcccggtatgctgctttcgggatatgtcaaatcaagattggataaagacgaaacaggagatttgaagaaattcattttaaacttcctgaaagcgtccgatttcaacatagaagatgttgtattgcacgaagaggaagaactgattactcctgaattggaacaattaattcagaatgcccctattgataaagatgcaaaggcagaaatgctaagaaagggcaaaattacaaatacggaactgaccttcaagcataaagtaggcgataaagtctatgatttgtcggaagaatacgaatccaatggcaccatgaggttcctgggaatggcggtgatactgaattttctgttaaagaccaatcgatttgtgtctattgatgaagtggaaacaagcattcactatgagctgttagcttatttcataaaagtattcttggcgaacagtaacagaacatcccaaatgctcctaacaacgcacgacatcaatcttctcaacgaggatttcattcgccgtgatacgatatggttcactgataaagacgaacttggcgaaacaaaaatagtgcgtctttcttctcttggactgcacaagaatctatctccgtataatgcctacaagcaaggaaaattggtaaagttgccgttcttgggtagccagtatattaacctaaacgactaatgatatggggcggatagtaacaaagagtatcgccattattggcgagggagaaacagaatggttctatttcgattctctgaggattgcgtgtcgctatcccttcaaggtcgctcctgattttccacagcacagtgacatcaatcatattctgaaactgatagagtcctatttgaacaagcaatatgattatatcgtatgcttgtttgatatggacaggctatataaatattcttctgaaatgcaactgtatcagcgagcaaagaaggagtatggcaagaagaagtatgtaggaaaggtgatgttcgtagaaacgaatccttgcacggaattttggtttctactgcatttcttgcctaatgtggtttgtcggcgatatgatagttacgaacaactgcttcccgaattgcagaaatatatgcctggctatgaaaagacaaaacgatatttcatacgcaccaacctctataaatacttgacagagaatggagacttggaacgggcaatgtcaaattcagaaaagttgtgcaaactctgcaaggaatcaccggaggatttgaaggcgtactcggaggtacataaggtgatgaggttgctcaacgaaatatagttttagacaaaaagtaagtaacatatgaaaatacaatcagttcatatcagaaattatcggaaattgaagaattgtcatatagactttggcgagaagaaaacagttttagttggtgctaacaacagtggtaaaacctcggctatcagtgctattgtttggttccttaagaacacagagagattcactctaaaggagttcaccgtaactaattgggccttaattaatacaataggcgaaaaatggttggaaaaggattctgtagatgacgcattattgagttcccatcaatgggataacatcgtaccatcaatggatgtctggataaatgtagaaaatggggaacagtatcgagtgaatcacttgataccatcacttagcacttgggatggtaaaaaagtaggggttcgagggcaatatgtccctaaagatgttacaaaactctacactgcttacaaagaagcaaagacaaaagcgagatctttagaagctactgaggaatggaaggaggcagactctccagaattatatcccaaaaatttatgcgactttttgggtaaaggctcaaaccttagagagtatttcgatgtgaaatactacatcatagatccagctcttgatcctgatgacgaagacgaagtgcaaacaacgccagacaatgagctgggctataatccacttgacggactaatcaaagtggatactatactggcatcaagagatttttctgatccggaaggacaaacagatagtgagatagatacgttgtcaaaacagttccaacagtactataagagcagtggtcaagaagatgaggagctgacttgtgaagggttgaaactccttggaggtatcgtaacagcgaacaaaacatacgatgaaaaattaagaaagacttttgaggttcctgttggcgaattgaagaacatcaattaccctggcttccagaatccagagataaaaatacgaagtaagattcagattgaggaatccataaaacatgactcagcagttcaattcgctattcaaggtatggaggaattggtacttcctgagaagtacaatgggcttggttatagaaatctcatctctatttatttgaaattgattgacttcagagaaaagtggctgaaggaattaagtgaaggaaagaatattgaacctattcatttagtgtttgtagaagaaccagaagcgcatctacatgcccaagcacaacaggtatttgtaaagaaagcttttgaagccttgtgcaacaacaaactaattgaagaaaatccttggctaagtacacaacttgtgttaagtacgcattcaaatcatgttgtcaacgaacttgacttgaactgtatgcgctacttcaaacgagtgatagatgttggcgaaaagatacctgtttcaaaagttgtgaacttatctagtacattcggaacagacgatgaaacaaagcaatttgtaacgagatatatacgtttaactcactgcgatatattcttttcggatgctgttgttttggttgaaggtcctgcggaaaagatacttgttcccagctttctcgtaaaagccggattagattcttattatatatctgttatagaggtgaacggccgccatgcacatagtttccgtaaactaattgaaaaaattggaattgcagccttgattgtgacggatatagatgcgactgacacaaaagtaggagaagacggaaaagaaatacatccatccgtgattacagccaaaggaaatggttataagacaggtaatccttccattaaaagctggctttcaggaaaagaacaaatagacgatttgttggcactggatgaaaaagaaaaatttgtaaataatgtaagaatagcattccaaacaccagtaaacgtcaagtgggataagaataaagatgaattgacagaagtatgtccctatacatttgaagatgcattgatatttactaatcttgaattattccgacgggaagggttaaagaaaatgggtgctattaccacaatagcgaatctgttgaaacatagtaattctgccaatgaattacaaaataagatatttaaaaaattggaaagcaaaagtggttttcagaaggctgattttgctatttctctgctttataaagacgattttgtcgatttagttgccccagtatatattcaggaagggcttgaatggatgaagtcatatttggattctaatgggaacagaaatggagaataatatagattttcaagtagatgagacactagaaaagtgtattctttcaacaccgcgtaaaagtttctttctttttgctggagctggttcaggaaagacttactctttggttcttcttttgaaaaaaatacgtaatagtattggtaaagaacttctgttgcaaggaaagaatgtagctgttattacttttacgaatgctgcgacagacgaaattatcaatcgtttggattatagttccatttttcagatatcaacgattcatagttttgtctgggatgttatcaaatactatcaaacagatattaagaggctatatttgcaatatattatcgaagacatagaagcgttgaacaagaagatagatgaaacaaaaaacaagacaacaaaaacttatttttccaatgtagaaaagtttaatcatcagaaagaacgattagcaaaagcacagacgatagaaaagttcgtgtataattctaatggcagtaatcctgagtataatgcattgaagcatactgaggttattaaaatatcagctcaaatgattattgagaacaaaatgttacagcgaatcattgcacaacaatatccgatactattgattgatgagagtcaagacacgaagaaagaactaattgatgctttctttgaaattcaaaggaattttgctaatatttttaccttaggtttacttggagatcagaaacagcgaatttatgctgacgggaaagagaacatagaaggtttcattcctgctggttgggagaagccgataaagaagatgaattatcgcagtgctaagcgaataatccagttggcaaacattattggtaaggatattgatcttcatgcggaacaaagtccgcgtgaagacgctaataatggttttgttaggctttttgtcgtgcaacaacgtgatggtctaaataaagatgaaatagaacaaaacgtgatgaggattatgagtgagcaaaccaaagatgaaaaatggacggccataggtgctgaagtaaaagtcctgacattggaacacatgatggccgcacgaagattagggttttctagtttttttgctccattttataaagtttcaaaatatcaaatgaccttccttcaaggttctgtctcagaaatagaatttttcactaaggaagtgcttcctattgcaaactccatgaaagaagatggacggattgctttagaaattttgaaagaatactcgccattattgagcagacagaatacagagaagccatatgaactttatttgaaatgcagagaagaagctataaaggttgctaattttgtaaataagaatagtactatccgtgtcgtagtagatgaaattataaaatctcagctattaactgtaccggatgttgtaagacaagcgtgtatgttaaaaccatcagacatagaagatgatagcgtagaagaagaactacgtgcttgggtggaagtaatggatctgccaatcgacatggtacgccgctatgatgattatgtgaaccaccgttcacaatttgatacacatcaaggggttaaaggtcttgaatttgaacgagtaatagttattatagatgattctgaagcgaaaggattcttgtttagttatgacaaactgtttggtattaaggatttatctgaagcagatttaaaaaataaagataatggcaaggaaacctccattgaacgtactcaaagattattttatgttacatgtaccagagcaaagagctcattagctgttgtgatgtatacaaataatccagagggggtaaaaactgaagctatcagaaaaggatggtttgaagaaaatgaaattgttgtaatgtaatataccgatattacccaatatacattaaggaggctgtgggtagtgtaaacagaactgtattaagctcaattttgttcggtcgttatttgaattagtcaagacttaatctgacagttacgtataaaaagaataaatttgtaacagaaaacagattaagttatgacaacatcagaaaaggtcatcaagaacaaactgggattgcttgaactctcccaacagttaggaaacgtatcacgtgcttgtaagattatgggctacagtcgtgacagtttttatcgtttcaaagagttgtatgaacaaggcggtgaagtcgccttgcaggagatttctcgccgtaagcctgtcataaagaaccgtgtggaagaacacatcgagcaggcagtcgtacagatggcgatagacaatcctgcattggggcaagtccgtgtatccaatgagctacgtaagaaaggtattcttatttcgccgggcggagtgcgttccatttggctacggcacgatatggagaccttccagaaacgcctgaaagcattgtcagccaaagtggaacaagagggcattatccttgatgagaaccaagtggcggcattggaaaaagcaaaagaagaaaagcaggcttatggagagatagaaacttattatcccggttttctacttgcccaagacacttattatgtaggatatatcaaaggtgtgggacacatttatcagcagaccgtcattgatacttactccaaaatcggatttgccaagttgtatgacagaaagaatgcgcttgttgctgccgatatgcttaacgatagggttattccttttttcgagcagcatgacttgaaactgatgcgtatgctaacagatagaggaacagaatactgcggaaacagagaaaatcatgagtatgaattgtatttggctgtggaagacattgatcattctaagattaaggcgaaaagccctcagacaaacggtatatgtgagcgatttaacagaaccgtgcagaatgagttctatgctattgcattcagaaagaaaatctatacctctatcgaacagctgcaagcagaccttgatatgtggatgaactcctacaatacccaaagaacacactctggaaagtactgtttcgggaaaacgcccatgcaaacttttatcgaaggaatcgctgtggcaagaaagtatcaactgcaaaatcaggaaatgataaaaccgaatgagcaggataaaatctcattcggttgtgaggatgatgaaacttgtgtaacttcgcaacaaacatctgacagtttttttgtccgatagtaaaacaaatgtcagaacaagtcttgactattacatcagaaagaattggaggttgttacagcagaatattccaatgtacaacaacagctgattcagcatgagaaaaagattgcaacagccaaatcctcttatgagaagctgttaaaacaacatgagaagtttcaagaaaacttcaaaaagaaatccaccaaaattgagaatcaaataaatgaattgttggattctattaaaaagttggatgccgagaatagtaatcttagatcacaaaggactaagttggaagcagatatagccagcctccaaaaacaacttgccggaattatcgtttgtcctaaatgtcaacatgaattcacattggctaatgatatagatataaacgaggttaaactaagattgcaagaccgaaatggagagacacaagacattctccaaaatattgaggctaatgaaaaacgcatttcagatattacaacaaaaggacgcgaagctcgtaaagaacaggatgaattgaatcgtagtaaaatagaatggtcgaataagattaccgagacttgtacggcattggatgaattatcacgtaatacgtcttatttaaccaataaaatgcaaaccctccagcatcaaatgaatacccttcagaaatccattgatgatgcgcgtactaatttatttgatgattcttatgcaatattagatgaagctattagaaagcaagaatacgaagcaaagcaggcagagttgaatattaacaatgctaatggagctattcagtcatacgaagaatctattcgtgacatcgaaaactcttccgaaactgacatgatagaatctctcaaaaacaacaagaaaaaatatgagaaagaattggtattagccatttctgaaaaagaaactattgaacggaaattaaattcatataaagagcaagaagcaacctttattgaatttaaaacccatctggctaatactaaaattgatgctcttagtcacataactaacgagtttctggaagccattggtagtgacattcgtattgcattttccggttttacagtcttaaaaagcggaaaaatcagagataagatttccatttctcttattcgcgatggtgtagattgtggctcttttgataaattttcagaaggtgaaaaagcaagagttaatctagctaatattttggcaatgcacaaacttaccaatgtaaattgcgatgacgataaaggactagatctcctgatacttgatgaaatattagaagccactgacgaacaagggctttccaacatttttgatgccctcaatcaattacagattacatctttggtagtcagtcatggaaatatagctgaaggctacccatacaagactgtagtcaataaacttaatggcgtttcatacatagaatgattaacgaatcaaaaaacattaaaaatgagtcaataaatcaaattacacgtgataatgtgcttgcattagatatagcagagcactgtggatatcactcaacccatgaatcgggaacatggaattttacccaaagaaaaggcaaaaatgcgaccgagcaacataaaatgttttatgacacactggttgaatttatccaaaaatacaacatcaaattgattatcgctgaagatgtatgcgtttcaaagcatttcattgcagcgcgaaaactatccgaatttagaggcatattatatctgatatgcgcccagcttggactcccggaaccaaaattcataaacgttagcacagtaaaaaaatgggctaccagtgacggaaaagctgacaaaaagaagatgattgaatattgcatcaaacgatggaatattacaccagtcgatgacaacatggctgatgcaacccacatcttcaaatattatgtaagaatatacaaactttagacagaaaatgagttacgcaagaaacataaggcgtaggcaacaaagagaaggccagccccatttaatgatgctaggaagcttgctaggagatttttacgaattccttagtaaacaaccccagccaacagacaacgaggtaagaagtaattttatctctagtaataataagtggaagaagtattgtaaagtccacaaattgatgaactcggatcacttgtttgtgctcaatgttcaagaggcgtggaagagacatactcagcagttaccacagaacccataataataagtgatgaagtagctgcacggcgaaaagccctatttgataaatacgtaacaccgtacaaccgaatgatatacaagttatgtatgcgctatacttttaatccttctgacatagaagacaattacatagaagtgcttaccaacatgtataaatatatcgagacatataatccagagcgttctgtacaaacatggctccatattgtaaccaaacgatgtgtttttgatttggatcaacgtaaaaaaaggcatcaagacatgttgagtgatgataacgatgtggaaacattttcttccagtgaatctattgtagattttgacgaagtaagctctaacgtaatgggtattgacaattatcaagagttatacagtgatgatgttttagctgcattaaaacagttgaaaccacaatacagaagcgcacttttgtatcaacaggcaggatataaactcaaagaaattgccgaaatcgaatatcggaacggtgccttagaatctcgcaatatcgaaactgtcaaaagtcgattattcttggcgcgtcaacaacttcaacaactattgactcgtgatggaaaaagaagaacgactgacgaaacagattaagacagtatatacagaaatagccaagcgtttggtagacccctccttctcattcccagagggagggcaagccaaacgccaactatccaaatttattgtcaactttactcaaatttgtggtggagaatttaatacttcacgacttgtagactattgcgtattccagcttcataaaaacaggaatgcccaatatcaacgtacattagctccaaaaacatttgggactaccgctcttcaaaaatatctatcaatgtcttccaaatccaagcaatatctggaagaccaatggttatctgaagccaatctaaccagaactagtataaacaaacaagatacagagcatacagaatcagctgaaacattatcaatatccatttcacaaatatcatccaagctagactctctataccaaagggttaatgaacttagcaaatcatcaggaaagactatagaactaaattggtgggatttacataaagataagatttatctatcggcaataattacaatgctaataacaatatttcttgttaaaatcaaaaaatcatatcatttataacaaccacctctatagcaaaagactattcttgataaaacattaagaagttatggatttacatattaaagatagattgcttattccttctatttttccagaacggggaaattttatggattttaatttgaaaaagtctatcgcccgaaaaattgctatttcagagcaagacagaaaggactatgaaatagtcgaaaaaaaggaagaaaagcgaattgaatggaacgttcaaaaagacgcagaaaccccattagtggtagaattttctaaagaagaactggattatatgcgtaggtcttgtgaagctattgcagaacaacaaatgccagatgaaatgtgggctgtagttgaacgcatctataacgaagcacaaaattgatttcttacttctttactcacaatcatatcttccatacgaatgggaatctgtcttactgtacggattcccattttttgttttaaattaacaatatggctgtaggattaaaagcaccaaacataaaaattgatttcaagccatctcccaaacaatatgaattatggaaattacttcaacccgactattgccctcattgtggagggcatatatcacaaaaaatggtcggacatgatattaaaggaaacccacaatataaaccatattgcacatcatgcggctctgagaatctaccacaacttattttaggaggcggtgcagccggaggtggaaaatcttatttaggaagctgctggcttgtcagtagctgtatgagatttccagatatacgtgccgttgtagctcgtaaaaccttaaagagcttgaaaggttctacttggaataccataaagaaagtatgtaaggaatgggggctaaaagaaggggtgaattacaaaataaacaatctggatgggatattgacattttggaatgattcagtcatcatcatgcaagaaatggttgacttaccttcagatccaaactttgaacgtttcgggtcttcagaatatactattgcattcatagatgaggtatcagagatttcagaaagagctattgaggtattattttctcgtcttcgttggcgcacagcagaaacatttaaaactgctagaatgatgatgtcaaccaacccttgcatcaattgggtacgttcgcgttttgttcaagacgatgaaggaaatcctgtattatgcaaagaaggcgaagcatacgtaccattctctgtttttgataatccggatattcagtttgtacagacctatgttgcagcattaaacaaaattacagatcgagcaacacgagaaaggcttttatatggaaactgggattttgttgactcaaatcttatggctgcatattggaattttgatggcgaaaaacatcttattgaacggttaagggaaaaagtttatgatccgatgaaaccgatcatatcaggatgggactttaatgtcgctccatatatgagtgagatggagttgcagattaattatgagaagaaagaaatatatctgctggaagaaaacttaggtaaaccagagaacaaagaaaacaatacccccaaattatctcaaaaaataagagacaaacacctccagaatcagcatataggcggaataattataacaggagacccagcaggattagcacgtagcacgcaaacagaagaaggtgtcaacaactatactattatagtggacaatatgaaaaacaatgtgctaaggccacgtataaaattgcttcagaaacagccgccacaaagtacccggttggagtttgtcaacgctatattaaacgggtttgacggttggaaattcatggcagacctacggtgtcgtaaatttactgaagatatgatatatcagcagaagaactctgacggcaccaaatccaagaaaaaagtattaaatcccaaaaccggtggaaaagaagaaaaatatgggcacttatcggacatcttggattatgtattggtattgtttctctgtgactcatggagacggttccaaaatcaaaagacaacaattgaaacatatacagcaccagtctataacacttttgaatattaattatgtatagaaggtttttaaacaaaaacgattatctgggtattattacagaggatgctctatcgcaacttacacgtggaaaggatatttgttttgtgcaggcagaacaagccgctgaagcatcaataatggattaccttactgaaaattacgagattgaacgcgaactaaatcgaggtaaattcatctttgaatatgatcgaagagtcagctatcctataggatgtcatttttactttgacggaaaaatatgcgaggtaattcaagctatcaatggttacaaagctccttgtcctatttcttattggcacgaaacagaagagatacttgacctagaaaaaatagagcaatatagccagatgaaaaactatcgtcccggagatgtgacaaagttcttaggaaggacatatatatgtgacatcgccaatggcgtagacttcaacgatattcgtattccggaagttaatgcctgggaaatggttgatacatacaagtgggacaccgttccatacaatgaatgggaagttgtagaatatgaaggcaaattcttcaccttgctaacaatggataattatgactgtctagtcaatccaatggaatctgactgttgggggatgattggagaatatgatccttcactcaattcttatgaattgtcagaacacgaatatgtagaatataaaggaaaaatttattatcctataatcaaccccaatgctgatgtaccggaactggaaaggaatatcagataccatgacccaagaaactataacttgaaacgccacatggttcaactgtcattatacgagttgcacaaactgatttctccgaacaatatcagcactgtacgaatagatgactacgaccattctatgcaatggttaaaagacgcttccaggctaaaattaaatcctcaaattccgagaaaaattgataacaagaaagagcctcttacagactggcagatggcaacctttcaaacatcttatgacccatatcaaaacccttggcatgtatgaaatggttttaatatgatagcatcatctcaaaattaaaaattaacctcaaaaattacatggatcttctaaaaagaattaggcagaaaatagatgaattctgctttaaccacatgagaatggacggtgcccagcatctgattgccggtatcttgatttatgatgtactcaaataccttatacctgtttggagtgccatattaatcactctgattatacttgtcgccaaagaagttgttttagacaaatgggtaaagaaaggggcggcagattggcatgacataatctggggagccatagggcttctgttaggagtgctgtaaatactactattaaacttaacgatacggtgggtaatagtaatattattcaccgtattcttgttaatgctgctgtagatactaaactttgtgttaaaagtagtgctgataaagatgattttaatgatgctgaaaaaaaaagtaaaactaatgttgtatctttgtctcgtaaaaacaattgatttatggcagtttatatcaaaccaataccaacattaaccggcaaagtcgcagaaaaatttgaaaagattgcccgcgagaatgagaaaaaacgagggaccgttgatttttcgcgtgaagtagaaatgaccaaaagaattttggaaaaatcaaaccttcgtaaattcaaatagtgggtacatttatcgaagataattgcgaatttgttgaatggagcagttctctaatagagaactgttctgatttttcatgcactcacgataaggatattgaaaatttcttcaaaaatgattttgaaaattacaacaatcaattacttggtaaatcatacggtttcgtcaaggctaacacttctttagaattagttgcagcatttaccgtatccaattcaatgttacccgtttcgtccttacctaaaaatataaaaaacaaaataaatcgcccaatacccaatattaaacgcaactctcaatatccagctgtattagttggacaattagctgtatttgattcctttgccggaaaacatattggtgatgaaatcttgtcttttataaaaggttggtttattgatccattaaataagactggatgccgttatattattgttgatgccgccaatcatcaaaaagtgatagatttttatcagcgtaatggattcaaatttatatttgaaaatattgcagatgaaatagaatacatgaaactggacctagaaccagagtataaacgtactcgtttaatgtattttgatttgattatcctaaaatcataatttgttttcttctaacaaagaaaaataccccggtcacttagggtggggatattcctaaaataataaaatttaaggcaactacttcattgcgaattagttgccttttttgtatctttaagcattcccccaaaaaaacggtttgacagccaaaacggggggaatctaaaataaaaacacatggtaaagatacaaaaaatctcagaaatcgaaccttgtttaggttttaccgagttcgatatgcttaaaaaatatcgtcaaagttttgcaacgagtgaattaggtcgactccattctctattccctttctcggaactggcccgacaaatgcatttgaagtcctctgctttggggcgtaaaagttatttttctcccgaaggtaaaatagccttgatggtcttgaagtcctataccaacttttccgatgcacaactgattgagcatttaaacggtaatattcattaccagttgttttgtggtgttcagattgatccgcttcatccactgaccaatcctaaaatcgtcagtgcaattcgtcaggaactagcgaatcgccttgacgttgagtccctccagctcattcttgccgagcattggaaaccttatcttgagaaccttcatgtctgtatgaccgatgccacctgttatgaaagtcatctgcgttttcctactgatgccaaactcttatgggaaggtattgtatggcttcatcgtcatctgtgcaaacattgccgtacattgcacatacaacgtccccgtaacaagtatcttgatgtacgccgtgcctatcttgcttatagcaaactgcgtaaacgcaggaaatcacaggctcgtatgattacacgaaggttacttcagttattggaaaagttacttgaccagctggagcaacttcattcatcctacaggaacaggcttgcactatcctctgattaccaaagacgtttctcggtcatacagacagtccttgagcaagggaagaatttatttgcaggcaaaaaagtgtccaaccgtatcgtgagtatcgaccggcattaccttcgccccattatcagaggcaaggaaaccaaatccgttgaattcggagccaaagtcaacaatatacagatagacggaatctcctttatagaacatatctcctttaaggcttttaacgaaggagtacgtttgaaagactgtattcatctgcaacaacaactgaccggggttagggttaaggcgcttgcggcggattcaatctatgccaataatgccaaccggaaattttgtacaaaatatcatataagtacttcctttaagcgtaagggcagagctgccaaagatgagccgcttcggagaatcttacggtcggaactcagccgcgaaagagctacccgcctggaaggaagttttggaacgcagaaacaacattactcactggccaggataaaagctagaaacaggaaaacggaagtactttggattttctttgggatacatacagccaatgcggtatgtatgatagaaaaggtcgaaaagaaaaaaagaaaggcagcataatctgactaaaataacaggaaaaacaggagaggttttaacttcccctaaaaaagacatgtacataatgcatgggtgggaaggaaaaaacaagaatatgtaaacaatattctacaaaaaagatagaagactgggagagttgaacgaaaaaatcaagagaaaagctttgctttacgtgagcttttctcttgattttttagaaagaggaacatttactgaatatccctagggtgaataccatgtgtcaaaacagtaatctgggcttttacctattttggtaagtcataaatgacacacagcgcaaagtaaccgaggcatatattttatctattcgtcatattgacgaagttcatcaagtcttgctcctttatcaatactctaccggctggcttggtgtacggtattcttccttcagccaagtatcgttgagctgttctgtaagatatacgaagaaaatcagctgcttctcttacagtgacaagtttcatcttcatacaatattattaagtcgttcaaactctttgtctacttcagcctggtatatatgcgcatatagctgcgtggtctggatattcgtatgtccaagcattttgctaataacctcaatcctcaccccattggctaatgcaacagtagtggcaaaggtatgccgggcaacgtgactcgtcagcttcttctttatttcacagaacgcccccagaatttttaaatatgaattgtacttctggttagatataacaggcaacttaaactcatacttctttaatatattcatgactttatccatgagtgatatattataaggagttccggtttttattctctcatctcgtattctatacattccgtctgtcattatagcatctttgaagttgaaaattgctaaatccgcatacgccaaaccagtatagcaacaaaacagaaaaagatctctcacacgattcaggcacatatcatcaatctgtttagtttcgagtttagctagctcctctttagtcaagaactttcttgctacacgtttgccgcgatctaatttgaaattctgatatggattctctgaaatcaaatgagccgcgtatgcttctcttacaaacactttcagtatcttgtgataattatacaccgaagactggcatttgcatcgttttttggcgaattcatcgtatgctctgatattttcgtcacaaatatcagtaaaatctttaatcctgccaaattctttcagtgcttttagtacgcacttctgcctttgcttcgttgaatcagtaacctgtcgttcgtatatccgtttctccataaaggacagaaatgaatttgtggttccggattccgaattgttcaaataccgttccaatctttcaaaggtgaaaggaatgttttgagaagagagctgatagacaaaatcatatatcccagacaccatatcattcaacttttggttgaacactaatgactgggggtgatttttaactttcaggtctttgccccactggtcggaatagagttttatgccagttccgacatacttgcgtttccgctgataagtaacctccatttgtacggaggattgacgttttttggtggctacgtgctttctatcaaagacgagccgtacagatacattgttcatacttttactttaagtatgattgataaatgtagataaggagaaattgggaagatttacgtctggtatcacaccgggtatcacattggtatcacaccggtatcaccccctagtatcgcattggtatcacaaatatgtcactatttactataccttgtcatagtttgacgtaattagtactatcttttgatactcctttagatgtcaattcatataacatctattcaattaatctgctgtaaaccaacaaaataaggaggcaaaaacctcctttttccttgtacaccctcagggattcgaaccctggacccactgattaagagtcagttgctctaccaactgagctaagagtgcaattttttttcattgcaactcggaatttgtacaccctcagggattcgaaccctggacccactgattaagagtcagttgctctaccaactgagctaagagtgcttatttcctcgtttgcggttgcaaaagtaggtcttttattttatttgaccaaacaataatgcagcttttttactatcttttttccgcttttattcgaacacatagagctcggaaggtgtatttcgctttaaagcaagcagttgcacatctttgccgacgattactcctttgttctttaatttccattctactgttttgaaagccaattccggatgattattgtctttgcttaaatgacacaaccaaatatatcgcaaatgttcagtgatattttccgccaaaaactccgccgtatcagagttactcatgtgtccggtcctactcgcaatccgttccttcagatattgaggataaggacccatcttaagcatttcctcatcgtagttggcttcaagtatcagataatgggctttactgatataacgggcagccgtaggagtaatttccccaagatccgtcaagaaagaaaagactttgccgtcaatctcaatgcaatatcctacattgtccgttccatcatgtggcacctcaaaagactcgatacgaaaatcctccaacatcatgggttcctgcttttccaaataacggactgacgaactgagtttctctgtcatacaataactacgattaattccggcatgaatacgtgcggttgtataaacaggaatattcattttttctcccagattacccactgctttaatgtggtcagcatgatcgtgggttataaataccgcacggatactatccatcaggatattataatctttcagtactttcttgattgtacgtataccaattcctgcatctatcagtatcccataagtttcggtacccagataataacagtttccactactgccactcgccaggcttataaattttactttcatgttttatcttctttattaaaatgcaaaatgccgtcaacttttacagcaaagtgacggcaaatatacgtaaaaaagaagagaattaccgagaagctttcttctttttgtcgatggattcggtgatttttgcaaataacagtaatgccacagctgcaatcagccctatagcagcaaaataataccatatataatgagcatttacgctagctccctcccacgctgcccgtgtctcgaacaaagcaggatccggacaatacttagtgagcagaattcccgccagaccaaaaccgaaaatagaagaaagaaacgaatgcaaatggctgaaccctaaatacattccttcttctcctttaggagcctgcaaagagaaatattccaaataacgcggtgaaataaaacattcggcaagtgcctgcaccactataccagcaatcatcatcagagtaatattgctcataccggcaataagatcattgcccagcaaattcccgcacgccatcagcaacgcagaaacaggaatcagaaacatccccacattcatcgaagtaatcgcactgcgttttgccatcagacgtgtgataaaactaacgcaacaaaccaccacaaacggattcacattagcaatccaacccggtcttgccgtctctccagccatacgaatcacatacttgggcatagtggcataaagttgctgctgtaccatccagaaaccggtaacaattagaataagaatcaacaaacgccagtttgtaatgattcgtataaatccttgcccaatctcacggagtgtttttccttcgcctgccgtgtgcgttgatttataaaggaaaataacagcaaacaaagcaataactgtcatcgtaccggaaaaataattaatatagatatatgcttgctcaccaatgacattacgcaaagggtcgattattgttttaccggtgaaagcacccacatttaccatcatataaaagatggaataaccacgggcacgggttgcttctgttgtttctttagccacagaagcagagatgatagacttaatgaaggagcctcccaccataagcacaaataaaaccggaacaatgatccaccgggtataactatcaggcaaaccattaaattgagtagcagtgccataactaaccagccctgcagcttccagcaaagtgggcaacacacctagccccaaatatccggcagataataaggagaatgctataatcattgatttccggaaaccgattttgtcggcataggccccggaaaaaataggaagcaaatataaacctccggaaaaaagcccggaaatcatacttgcttcgaaatcgttaaaacctaaaatggaagatagataaatagtgagaacgataaaaacggcataatatgccatacgctcaaacagttcgactgtgttgctgacccagaaagctctcgtaaagcctttagcagcacgctgaggggaattgtccatgtatttatatttttgttaaaatgttaattcggggcaaagatacgtttttttagcttactgtctgtatctttgtcagaaattaggtactagaaaactatgattatagctgttgattttgacggaacgattgtagagcatcgttatccacgcattggtgaagaaattccgttcgccatcgatacattgaagttattgcaacaagaaaagcaccgcttaatattatggagtgtgcgtgaaggaacactcttggaagaagctgtcgaatggtgtaaagccagaggtctggaattctatgcggtcaacaaggattatcctgaagaacaaaaaagccatcaaggcttttcccgcaaattaaaagccgacttattcattgacgatcgcaatctaggcggtttaccggattgggggcttatttatgagatgataaagaagaaaaaaacattcgcggatatatatagccaaaatgataatgagcagcagcctttgaagaaaaagaaaagatggctgcccttttaacacttaaaatgataaataaatgactatatacataaaaaatgtgattaaataatcaattattgagattattcggtgtatatttgcatatccttatttctcgtaatctccgaagatacgagtataatatgttaattttgtttgttttgtttgttgtgcactcttgtcaggcgtgatcagagtgcacttctatttatgcgcttctctattctcccacttttctctaaactcccacaattgctctatagtaggatgaaaagtcgagttttcccaatttctggaaatcattgcaattaatgtttccagataatgtttcccatcaataattgttgtacacttattgatcttaaatctctctgtcggataattattagtttcaaccattttttttgcccaatccagcaattcctgaacggactcattatcataagtatgctgttccatatcacacatttttctacaaagatacaaagtttattataaaattatgagaacaaaatcaagatttcttatgtttatcataaataagaacaaacttaaaatagaatatcttatgatttataactttttatttccaacaaaacccaacacaacaaaaacctctttgttgctactagcagtccggataatcttcggagtattattgatgaatcacggaatacaaaaatggagtaactttcaagaattatctgccgtttttccggacccactgggattaggcagccccatttctctcgggttagccattttcggcgaattggtatgctcaatggcatttatcgtcggctttttatatcgtttggcaatgattccgatggctttcacaatgatagtggcattttttatcgttcatgccaatgatgcatttacagtcaaagagttggcttttatttacttaattgtgtttataatcatgtatatcgccggacctggcaaattctccatcgatcatatcatcggaaatgaaatggcacgccgaaaattaaaatcataaaaaacagggattataacctaaataaacaaaaaagtattatatttgcaggtacacaaaagaaaaaatataaatattttttattaactaaaaactttctgacatgaaaagaaacaaaatgtttttggttgcggcagtactcagcggcagcctattatttagttcctgtgtaggttcattcggcttatttaaccgcctgacaacttggaatcagtctcttggtaacaaatttgtaaatgaacttgtgtttttagccttcaacattgtaccggtctatggtgtagcttaccttgccgatgctttagtaatcaactctattgaattctggagtggttccaatcctatggctaatgtaggtgacgtaaagaaagttaaaggagaaaacggtaactatatggtaaaaacgctggagaacggctactctatcactaaagaaggagaaactgcttctatggatctgatttacgacaaagaagccaatacatggaacgttgttgcaaacggtgaaagtgctgaacttgtaaaaatgaataatgacggtactgctgacttgttcttgccgaacggtgagaaaatgaatgtaactctggatgctcaaggtatgatggcagctcgccaagctactacaagcaatctcatgtttgcagcccgttaacataacaacccaagaatatataataaaggagatggaactgaactcgactttgtttcatctccttttttcatcctcattaccactataatattatctccaatcatataaatttaatgttatgaataaactgcacatacacatcctatccatattctcattcatctgcttatcttgtcagcaacaaacaccccaaaaccaaatagagcaagcagccgtagacttttgcgaagccttttataacttcaattatccagttgccgaagagtggagcactccttcttccctatcctatcttagctttttagcctccaatatacagcagaagcatatagaacaattaaaagcacagggagcagccaaaatatctgttgtttccagcgaaatagatgctaattccgaaagggcaacggtcgtttgcgaaataaaaaatgcgcatatcataagtcccatcagtggggaaatgcaacaaataagtgttctgcgagacacacttgaactaatgagggaacgcaataaatggctaatcagaatggatatcccacggcaaaatggaaagcgaaatcacgactaaacttaggatgaataatagggaaacgctctttctttgtttcaaaagccggattaaccgctttcatacctccgtcaaaacgaagaataaagaaatccaggtcaagccgtaaacctaagccataagcaaccgctatttgcttatagaatttgtcgaacttaaaaacacccccgggctgatttgcatagttacggatcgtccagatattacctgcatccacaaatacggctccttgaaatttccaaaacagtttactccgatattcaatactcgcatccagtttaatatctcccgattggtccaacagatttccatttccagagaaagaacccggtcctaaatcacgcacggcccatccacgtacgctattagcccctccggaaaaatattgtttctcaaacggaatcgtttttgcattcccatagggtactgcaattcccaaaccgacgtgaaacgcgaatgagttacggtggtcaatccgtatattctttgcgaaatcaaattcacctttcagatattgggcatagggaattcctagaatggcatactcaccattatcattcttccggatattggcaactttggacaaggcatacaatatatttcccgcagactcaaaattaaagcggatagaatatgaattagaagcaatagtattattgacgatagacccacctacactattataattgtaactatatcccatatttacaatcaagcggtcttgataattatattggaatatatgattttgccctttattgatataatcttctctgaatctgtctgaaatacgcggcaaatagagaaaaccaatattaatcaaatcgatacgatgttgaattttctggcgttgtgtccatttgtaactccagttggcagatgccatcgtccgcagaaactccggccgtaactgataattatactgcaacccgaactcagtggtagccctgattctacgtttaaagtcagaagaaagaaagggaaacaagaaattaggaaaattaatgctcgtctctaccccgtattcggtatagttgttattcgaatagcctgcctgaagtccggagatcacctcgtatgccccacgaaactttatcataaaagtctccgaaccacgaaatagattcctattctgaaaagcgactgaagcagccgcccccaagtctccggcggaattcgttccttccacctcaaaagacacagacttatgcttgctttttgtcagcattacatagcaatcgagcattgtcgaatctcctaactgagtctcaaagaaacggatattagtatatttcaacgccgacaaacgcccaaagctggagtatgtttgctgcacatcgcgttcattatacaaatctccgggactaaaacgaaggttatccgtcaatactttgggacgcaaataaagtttatctttatagaaaataggatatcctttataatgaatagagtcgttgatttccacactgctcaatgccgaagattgcaggacatcataatcagtgataaaattaatcttattgatccaatattgttgatgtgctcgtgccgaatcattcgtatgtgccttgtaagaccgcaaaaactgagtcaaatcgaccttataggtattacggacagtatcggcagtatagcctatatagtccttattaaatttataataaccgttttgcaacaatttatccgtgatacgttgcctgtccgcatccaatacatttacatcaaaatacattccttgtttcaacagactcctggcagaatcctgcttgagaagcgcttctattttaggatcggatatattatatttaatggactgaacaacatacggctttcccgcagtcacatcatagtataattttatcttcttcttttttatctttgtcgaacgtttcacagtagctgccatatatcccatattatgcacagccttcgtgatttcctcttcagaacgcaatgcttcatcctcattatatatcacgggagcatcacctattctccgtaaaaacttatttccccacttagtagaatcacgtccggaaagattgtaaacgtaaagttgggtctttatcagactaaaccacttggcattaggattctgacgaacatacattttcaatgaagaagggcggatacttttctcatccgtacgaattttgacttcatccaacagatatgaaccatccggcacaaacttggtggcagtgcacgaagcaagtgacaagacagcgacagaagcaaacaaacaaagaaaatctctcctcatacggttcttacatcgatagcataaaaaaagtgattacaaagataaattatattttccgatagggaaaataatttaagaaaaagagaggaaagtaaaggcagattggaaatatctttatagctttgcaaaagaatatcaaatctatggcaccacttagtaagaataaaataaagtatatacactcgctggaacaaaagaaaatacgtaaagaagaacgagtatttctagctgagggcccaaagctggtaggcgatttactcgaatattttccttgccgttttctggccgcaacctcattatggcttcagagtcatccgaatatatatgcgggcgagatagcagaagtctctcaagaggaactctcacgggcaagtcttttaaaaacaccccaacaggtacttgcaatcttggagcaaccgcaatatacgctaactccggatattgcccgtcactccctttgtctagcattagacgatgttcaggatcccggaaatctgggaacgattattcgtttggccgattggttcgggattgaagacattatttgctcacagaacacagtagacgtttataaccccaagacagtacaagccactatgggtggaattgcccgagtaagggtacattacacttctcttccggattttatccgttcacaaggcaaagagatacccgtgttcggtacttttttggatggacaaaatatgtatgaacaaccattagccgctaatggattgattgtgatgggaaatgaaggaaacggcatagggaaagaagtggaagcgttaatcaatagaaaactgtatattcccaattatccacaaggccaggaaacatccgagtcgctcaatgtagccattgctaccgcagtaatctgtgccgagttccgtcgacaggccgcatggaagtaaaatcaaagggataaaacaaataaggaaacaatacttctccactcttccgggatgtatcaagaaagtcgttcaaagtacaagaagacgcaactataagaacaggaagattctgttgaaataccgggatgtttttaacaaccatcccggtattttttatttcttccatctgatgtacagacaacaaaacaattagccccggcagccattcaacggactccacttcttcattcagtggaaatatattttgagcaactccttcatcgcttatctccactacctgttgctttacgaatccgacaccgggtatcagtaaataatgagaagcaaaacgtttcatcataactaacgtgtttgacgtctttgctgctgacgcctacgttgattcatctggcgttccttgcgctgttccattctttcctgctggatatgttgttccacttcgatctgctccggcttcttctcacgatgtgttcccgtacggcggcggttcatttcttccggtgtcaatcgttgaacatcttctttacccttctccttctccactactttcttcaaagaatcagccttatgatcggagagtttcttcaaagaatcagcttccaaagcttttatcttattcagtgaatcacggacagcaaaagcaagtgtatccgtacaatgataacgggtcatgctaaagcaatcgaccaacaatgcccctgctttttcctgtctttccaacggataataaatgaagccttttatctctttcatctgtcccaatgtatctgcaaaaagacggattttctgaacaccgggttcggtcactattgtccaatgactaactgtatctttctcgtaaatcacctgcattgccatagtgacagttcttaaagaatcggccaacatcggttccagaaaacgataccgcacttcccacaccaacgtatcccgatctttatagttagagtcagtcggcaaggtaaacacatattgattgttcatcatctcacctgtgaggcgcaccatacgctgccacggccatacatcaatactgtctccttgtttggttgttttcggtttcttatcacgcttggctatcagatcgccaacaagttcctgctcatttttcaaacgtacctttaccttctcataaactttcgacaacacttctgtgttacgtgtgtaccacaccatagaggaatcaaacacagcctgcgtagttccgtgtttccgaaagacggcatcaagatacaacgctttcttatagttctcgctataaggaaggttatcccccatagactttgccagatggtaatcgtataacaaattctccatctctgattcagggattaccccaccgggtcttttcactttacacccggctaccgcaaaaaccactatgcagacaagacacagatgaaaccgaaacttattattcatgattcacacttttcttttcttccttatccaacgaatgatatgactcattcagatatttactataaaaaagcaataaagcaatgataccacagctaatagcagcatcagcaaaattaaagatcggactaaagaatataaaatgctcgccacccacaaacggcatccaagcaggccagttcgtatctataatcgggaagtagaacatatccacaactttaccgtagaaccaagtagaatatcctcctccttcgggcataaagctcgcaatctgcgaatgtgtgctttcattgaagatcactccataaaagacactatctataatattacccaaagcaccggtcaaaatcaaagccacacaaacaatatagcctgttttgaatcctttttttattatcttgtagagataccaccctatcaacgctaccgcaacaatacggaaagtggtcaggaacaacttcccaaaaatctccataccgaaagccattccattgttttcggtgaaatagatataaaaccaatccgtcacacgtatgctttcatgccaatacatatgagttttaatccagattttaatgatctggtcaataatcaatacggaaaagataacgagcagagcgattctccctttcgtgaatagtttcttcatgtgttcattataaattaaacataacgagctacaagtgccgtgcgtaaactttgcgcagctacttgtagctcgtcactcgtagcttgtgtagctatctattattttttaccgctgttttttgcttcaatgcttaatgtagcatgaggaacagcacgcagacgttctgccggaatcaactttcctgtttcacgacagataccatacgtcttattctcaatacgtaccaaagctgcctgcaatccttgtatgaacttcaactgacgctgtgccagacgggttgtttcttctttggatagcgtattcgcaccttcttccaacactttataggtaggagacgtatcatcggtatcattaccgtccaatcccatcaaactcttcttcaactgttcatagtcacgttgggccaattccagtttctccataataatggcacggaattcttcgagttccgcatctgagtatctagtcttttctgccataatcttacaattttaaaaggttaatcaatatagtattagtcttttatcacattcacgaacagtgaaaaatcgtcaaagttaagctctataccgtctttcacttcatctacaagtcctaaagatgtgcctaaaacttggttacaaatataagtattatattcttttaccgcatcatctgtttgcgtatttttcgagattgttatttttattttgtctgtaatttcgaaaccgcttgattttcgtatattttgaatacgatttaccaattcacgggcaataccctcccggcgcaactcttcggtaacggttacttcaagcgcaacggtcagcttaccttcattggcaaccagccatcccggaatatcctcactgaagatttccacatccgctgcttcaataacagcttccgctccatccaggttcagcacatattttccattcttttccagctcggcgatagcttcctgcgacattccggcaacagcagcagccactgctttcatttgttttccaaacttcggacccaatttcttaaagtcgcatttcaccttctttaccaatacaccagcagcaccatctacaaatttaacttccttgacattaacttcattcattatcaagttcttcaccgcttcgatatgggctttctgttcttcatctaccaccggaaccatgatacattgcagaggttggcgcactttgatattcactttacgacgtaatgccaataccatagacgttacatcctgcgccattttcatacgggcttccagttctttatctatgctattttcctggtattccgggaatttagccaaatggacagacacaacattatcacgtcctgtcgctgtaatcaagtctgtgtacaacctgtcggcatagaacggagctatcggcgacatcaatttagccactgtctcaagacatatatacaatgtctggtatgcagacagtttatcttgtgtaaattcaccaccccagaaacgtttacgattcagacgaacgtaccaattggacaaattatcattcacaaagtcggaaatcaaacgtccagcctttgtcggctcatattcattataacaggtatctacctcttttatcaacgtgttcaatacagacagaatccaacggtcgatttccggacgttccgccatcggcacatccgcttccttatattcaaatccgtcaacattagcataaagcgcaaagaacgaataggtattatataaagtaccgaagaatttacggcggacttcttctattccatctacatcgaatttcaagttatcccacggagacgagttggtaatcatataccagcgcaacgggtcagaaccatatttctcaattgtactaaacggatcgacagcattacccaaacgtttggacatcttgttaccgttcttatccaacactaatccgttagaaattaccgctttataagatacactgtcgaataccatagtggcaatcgcatgcaatgtgaagaaccatccgcgtgtctgatccactccttctgcaatgaaatcggcaggatatacctgacggctatccaacagttccttgttttcaaacggataatggatctgtgcgtatggcattgaaccagaatcgaaccaaacatctatcaagtccatttcacgcttcatcggcttaccgtctttagaaaccagaataatgtcatccacgtacgggcggtgaaggtcaatcttgtcatagttctgctctgtatattcacccggaacaaatcccttatccttatacgggttcgactgcatgaatccggcagccaccgatttctctatttcattataaagttcctctacggattcaatacacttttcgtccgtattatcttccgtgcgccagataggaagcggagttccccaataacgcgaacggcttaagttccagtcattcaagttctccagccatttaccgaagcgtcctgttccggtagactccggtttccagttgatagtcttgttcaactccatcatacgctccttgcaagctgtagaacggataaaccagctatccaacggataataaagtactggtttgtctgtacgccaacagtgcggatagttatggacgtgcttttctattttgaaagcttgcttaccagccttcatcatcatgcaaagagcaatatccaaagattcggcagcctgagcagccttctcatcatattttccgtccaccgtaaactgcgggtcataagcattcttcacccatgcgccttgatattccttatatttatctacatccacgcattccttgacgaatctttcatccagttcatccaacaaatagaacttaccggtaagatctaccatcgggcgggtttcacctttcttatttatcatgaacaatgacggaatacctgccgcacgtgccacattcgcatcatccgcaccaaaagtcggtgcaatgtgcacgatacccgtaccgtcttctgtcgtcacataatccccttgaataacccggaagcctttatcgctgactttccacattccatcttcggaaacctctatcggtttcacccaaggaatgagttgttcatattccatgcccaccagttccgtacctttatattcggccactaccttgaacggaaccagcttatctcccggtttgtaatcttccagattcaggtccgcagctttcggattaaagtgagtatttaacaacgccttagccaaaacaaccgtaatcggttctccattatatgcattgtatgactgtacaaccacataatcaaatttcgggccgacacagagtgccgtgtttgaaggcaatgtccatggagtggtggtccaagcaaggaaataaggagttccccatccggtcatttccggtttcgggttctttatcttgaattgggcaaccatcgtcgtatccttcacatcccggtaacatcccggctggttcagctcatgagagctcaatcccgttcctgccgccggagaatacggctggatggtatatcctttatacaacaatccttttttatataattgctttaacagccaccaaagggtttcaatataacggttgtcatacgtgatatagggatgtttcatatccacccaatatcccatcttgtgagtcaagtcctcccattctttagtaaacttcatcacatccttgcgacaagcagcattatattcggctacggagattttcttgccgatatcctcctttgtgatacccaacgccttttctacacccaattctacaggcagtccatgcgtatcccatccggctttacgctttacctgataccctttcatcgttttgtaacggcagaaaatatccttaatcgtacgggccattacatggtgaatacccggcataccattagccgagggaggtccttcaaaaaaaacgaacgaaggacagccatcacgttctgtcatactcttggcgaaaacctggttttcgtcccatttcttcagcacatctttgttcacctgtgaaaggtcaaactgcgaatactcagtaaatctcttacccatagctatatctacgattttactatttacaatttacactttgaggggtatccccgtttttaagggtgcaaatttacaaaaacatttgtttagttgagcaaaaagcaaagacttttaatcggaatcctataaagttaacgatttaaactgcctgtgacctaaacaaaacaggcctatccttgttctactgaaaaacctaaaagcacttatcttatgaattacggtattagtattttattcagagcaatccctttggtgatggcactcttttgcttcggatacggagcattcatttacggttacggagatgcaggaggtcgcgttgtggcaggccccgtcgttttttcactaggcatgatatgtattgcgctgttctgtacggcggctaccattatccggcaaatcatacatacttataaccgagccgcaaaatatggattgccgatccttggttatctggcagctattgcgacaatcatcacaggaatatgcatcttcagtggagctgattctccttcagcattcgttgccggtcatgtaataaccggtgtcggatttattacaggctgcgtagccactgccgccacctcttccacccgcttttcttttattcccggaaactctaaaagcacagggcatgaagttccgaaaggagctttttccttgggtgaagaacgtacgatggaagccgttgtaatcaccatatctttggttgcatggatatgggcatttgttttattagccaacagccacgttcatccggcttactttgtggcaggccatgtaatggtaggccttgcatgtatttgtaccagcctgattgcgttagtagctactatagcccgacagatacgtaatgtatattcggaaaaagaacgttcacaatggccgaagttagtgttactgatgggatctctttccttcatttgggggctttttgtaattttcgcggactcaggaagtacaaacggtactacaggctatatcatgcttgggcttggtttagtatgttacagtatctccagtaaagtaatcctcctggcaaaaatatggagacatgaattcaaattagccaaccgcattcctttgattccggtactgactgcattggcttgcttattcttggctgcatttgtatttgaacttgccacagtacattcggattatttcattcccgcccgcgtcttatcaggactgggagctatctgttttaccttattctccatcgtcagtatcctcgaaagcggtacttccgggaaggagtaaaacgggaataaatcaaaactcttttgccacagattacacgaaccttcacagattgaagattaaaggattcattcttaatagaaataatccaataggaataatctgtgccaatccgtgtaatctgtggtgaattttgagccactgtcttatttttttagtcttacttcataaacatcacttctgcgatctttcagattacgtacgctaccataagtatgcagttcattcaataaatccagatccacatccgaaacaagaatcatctcggtattaggagtcgcttccgctctctttccgtcagtcgggaaagcaaagtcgcagggagtgaagacaccggactgggcatattgaatatccatattatgtacacgaggaagattccccacacttcccgcaataactacaaaacattcattttcaatagcgcgtgcctgcgcacatacccggacacgggaataagcattctgcgtatcggtcaggaaaggcacaaataatatctgcatcccttgatccgccatcaaacgggatagctcgggaaactctacatcataacaaattaaaactccgattttagcgcaatcggtatcaaatgtctgcaacaacttaccgccactcaacccccaactcttgatttcatccggagtgacatgcattttttcatacatttcgtatgtaccgtcccgacgacaaaggaatcctacattgtataaaagtccgtcttctttgacatacggcatacttccggtaataatattgatattataactgattgccagattgataaatctgtcgcgaatttcctctgtgtacttcgcaagcccacgaatggcctgagattctcctttatcattatacttcgacatcaaaggagcattgaaatactccgggaaaaggacaaaatcacttttataatccgatactgcgtccacgaaaaactctacttgctcaaacaaatcatccaatgtcttataactacgcatctgccactgcaccaagcctacacggactgttgttttcggattaatatattcctgcgtaggtggctgataataaatattatcccattgcaacaaacaagcataatgtttcgattcttcgtcattaggaagataattggtcataactttacggacatgaaaatcatttgacaactgaaaagttagaaccggatcatagatttcgtgctgacgcacacgttcgatgtattctttcggacgcatcttatcagcatatttatgataattggggatacgtccaccaaacataatagctttcagattcaatgtttcgcaaagttctttacggtattcatacatacgacgtgccagacgcaaaccacgataacccggatgaataaacacttcaataccgtagaggatatttcctttaggattatgcgtgttgaatgtttccttgcctgtcacttgcgcatacgtatggtcattcttcactttatcataatcgacaataatagacagggcacaacccacaattttatcatcgacaaccgtaacaatctgtccttccgggaaaatattgattaatttctgaatttgggcgtgagtccaaaatacatcgctaccatctgaataaacgcgggtaaacgattgagataactgtgcgtaatcttctatctgaagattgcgtatctgcactttattaatttttatcggatgttgttccataacaatacgtgtttttataaaagatagtgcaaaggtatagctatttatagaaaagatactgttcaaagctagaaaaaagaaaaagcaccgctttaagagagggaaagcaccgctttaactaagctaaagcagtgctttagctatggaaaatgaatgcttttatttaagtctacataacacattgcagatctgtttattgcatatacaaacaattatgacaccataccattgattggtacgatgtcataatctcaatagagtcatgtcaagagagcaaagtcataatgacacgatgaaattacactaacctatttatttttcttccaaagtttgctcatatcttccagtgtcttcccttttgtttcgggtacccaacgccaaacgaagatagcagcagccacacaaataatgccgtataaactatatgcaaacattgggctgaaatcgtacaatgccgggaaagtagaagatacaatatagttaaatatccattggaaagccacagcgattgccaccgctttacctcggatggtgttcgggaagatctccgcgatcaatacccagcaaatcggtccccaggacatcatgaagaatgctgcatacacaatcactgaaagcaccggaaggatcccctttattgccatactgtcacacatcgccactgcaaatgcaccaacagccataccgatagaaccgattatcaacaatggtttacgtccgaagcggtctacagtgaagatagcaaccagtgtaaagacaatgtttacaatacccataataaccgtttgcatcataccgccgccttccgcacctgcattttcaaaaatacgaggagcataatatagcacggcattaataccgatagcttgctggaatacagatagcagaataccgatcacaattaccgccactccataagtaaatatcttctctgtcttttcgtgagcggtagctttaatatcattaaggatttcctgtgcttttgtcttaccattgatcttttccagaattgagtaggcctttccatcctgctgtatcaaaacaagatagcgaggtgttttcggaacaaagaacaataacagtccaaagaaagcggcagggaaagcctccgaaccgaacatataacgccatccttcataaacagtccacatatcagattcagaactgacagacagcacaccggctgcatctttcaaaataacaggattctgatggtcacccataatcaggtaattcacaaagtacactaccagcataccgaagatgatggcaaactggttacacgatacaagcgttccacgaatattggaaggggctatttcagcaatatacatcgggcagactgcagaagccagtcctactccgataccacctaaaacacgatacaaattaaaagcaatcagcaaatccatgttcggctttccatattcgaagaataagaattccggataataggaacctaatgctgaaaggaaaaagagtatggcagcaagccttaaggaattacgacgtcccaaacgggaagcaaatataccggaaatcgctccccccagtacacagccaattaatgcactggaagaagtgattccatgcattactttattgtattgaaaatcagaggctgaaagaaaaaaagcttccaagcctttctctgcaccggaaataactgccgtgtcatagccgaaaagcagtccgcccaagatagcgacagaggttatcgaatacaggtagagtttactaccctcgttcattgtattaatcatagtgataagtagtgttgtagtagttagatatatcaccacagattacgcagatgaacacagataaattcaaaagagagaagaaaaaatctgtgaaatacacgtaatctgtggtgggttaattagcaatacatattcaagattgcttcataaagttcttgtttgccactagtctgtttcggttcaccatttgctttagcataagcaaccacgtcttccaacgttaatttgccatcttcaaattccttacctttaccagcatcgaatgaagcgtaacggtcagccaacattttcttatacggagattcgttcaacagagctgctgcgctttccaatgcacgagccatagcatccatacctgcgatgtgagcaatgaagatatcttccaggtcagtagagttacgacgagttttagcgtcgaagtttgttccaccgttacccaagccaccattacggataatttgcatcatggcctgtgtcagttcgtagttgtcaatcgggaattggtctgtatcccaaccattctgataatcaccacgattagcgtcgatagaacccaacataccgttgtctactgccactgccaattcgtgttcaaaagtatgaccggccaaagttgcatggtttacttcaatattcactttgaaatctttgtcgaggccatgagctttcaagaagccgattacagtttccgtatctacatcatattggtgtttagtgggctccatcggtttcggttcgatcaggaaagtacctttgaaaccacgggcacgagcatagtcacgagcgatagtcaacatctgtgccaagtgttctttttcacgtttctgatctgtgttcagaagagacatatagccttcacgaccaccccagaatacatagttctgaccacccaattcgatagttgcgtcgattgcattcttgatctgaacagcagcacgagctactacgtcaaaatcaggattagtagcagcaccgttcatataacgtgcatgaccaaatacattggcagtaccccacaacagtttgatgcctgtttcagcttgtttttgttttgcataagctacaatttctttcagattggcctcatattcttcaatgcttgcaccttcagaaaccaaatccacatcgtggaaacagtagtattcgataccgattttctgcatgaattcgaaacctgcatccattttatcttttgcagcttgaacagcgtctgcgttaccattccaagggaattgttttgttccgccaccgaactggtcaccgccttcagcacacaatgtatgccaccatgccatagagaatttcaaccaatctttcatcttctttccattgattactttctctgcatcataatagcggaatgccatcggatttttgctatccttaccttcaaacttaatcttttcaattccagggaaaaactcttttgttgccataattaataatgtttttagtgtgagaatgcaccaatatgaacagcacattactcacgatgttatacttagattatttactcattgatttttctaaacgatacttccatttagcatacgcgtccgcatattcctggcgtttagccatattaggctcaatcacatccaatttgtcaagcgtagcaaatgcctcattattatctttatagatacctgcaccaatacctgcacctttcgcagcacctaccgaaccatccgtatcgtaaagctcaatggtggctccggtcactccagccaacgtatcacggaagatagaactcaagaacatattggcgtgtccggcatgaatcatcttcacaggaatccccatctgctccattatatcaatgccatacttgaaggagaacacaatcccctcttgagctgcacgaataatgtgatgtttgccatgtgcgttgaaatccagtccgcgaatactacatccgatttctttattgttcagcatacgctcggcgccgttgccaaaaggcagaatactgattcccgcgctgccgataggagctttagaagccaacacattcatttcattataagatattccttcgggagctatatttcgttttacccatgaattaagaatacctgttccgttgatgcatagcaatactcccaaacgtgtttggtctattgcatgattgacatgagcaaaggtattgacgcgcgattgcggatcataatttacttcaccgttcactccgtaaaccactcccgacgttcccgctgtagaagctatctctcccggattgaatacatttaaagaaagagcgttattaggttggtcaccggcgcggtaagtaatcggtgttccttctttcaaacccaactccttagctgctatcacattgacgcgtccctgctctgcaaaggtcagtttaatatctgcaatcaaagaagagtcgaatccgtaataatccattaggaagtcagccacccggttgttcttgaaatcccaaaacataccttccgaaagtccggaaacggttgtgcaaatctctccactcaacttcatggcaatataatcacccggcagcattatcttgtaaatctgctcatagatggcaggctcgttttctttaatccatgccaacttggaagctgtaaagtttcccggcgagttcaacaaatgagaaagacatctctcctctccgatcgtttcaaacgctttctgtccgtatggcacagcacgggaatcacaccaaataatagcgggacgcaacacatgctgatccttatcaacgcataccaatccatgcatctgatacgagatgccgatagctttaatttcagcagcactcactccggattcggtcataatagcttgtgtagccaactttaaattcccccaccaactctccgggtcttgttccgcccatccgggatttactgcgataatgtccgcctctgttttcggaaagaatgccgatgatacacatttgcctgtttcagcatttaccaaactcgcttttacggacgagctacctatgtcataacctaatagaaacataattttatttacgattaaacgatttacgatttaacgctcaatgcccgacaattaatactataacattcaacgcctaatacttaatattatacctaatacttgaataaagtcttaccgtcttactttattatatatcttcttgtcaaatttataataacgtgcagcccggtgagccacgccttgttgcttttcttccaaaggaactacatattccatcatggctatttttttatggaagttacgtacatccacagttttgtcatataccaactcaaaaagaattctcaattgtgcagctgtaaatttacgcggaagcagttcgaacaacatggaaggattaaattctacgaactgacgaatataagtcattgcttccttaataatcagattatgatcaaaagctaatgttttcacatctttcaaagcaatccaacaagcctggtgatcatccaggttcttgtccaatgtacggtctatcttgaccatagacagataagctatagtcacaatacgctctaccctcgattgcatagcccgttccaaccagcgcacatctttggggttactggttctgtttttagagccgaatgccttaaactgcatcagatttacatttttaagtcctgtcaattcgtacaagacacgttgtgcagcttcgtccagatcttcatccatatatataagacttccgggaagtttcatatcgtgatatacttcaccattatcttcacccgcacgtttcacaagcaacactttcagttgttctccgtcaaaaccaatcacaacacaatccactgatatatgattgttggccaaaggggtatttttatgtatattatgcatatatatttctttaagacgatgcaaatatagaagagaaatgcagtcccaacaaaaataacagatatgctataaaacattgtttttcatatatatacatatcatataccatacaatatgtacagttggcgttatcttacaatttacaatatgtattttagctattcgtaggaagagtaattgtataaagtacgaaaactatattcgcactttattatcagcacttttcgcatttgtaccgatagattaaaataccggtacttattgtattttaaacgatatgtccttttgtaccttatcgttttttatcctatctttgcaacctaaatattaaaaaaactaaaatgaaacatcatcctgtcattttatccattgccggttccgattgttcgggaggtgcaggtattcaagcggatataaaagcaatctcagcattaggaggatatgcggcttcggccattaccgcaattaccgtacagaatacattaggagtgcacactgtacaggctatgtcccccgaaatcgttcgcggacaaatagaagctgttatggaggatctccaacctgttgcgctaaaaataggtatgataaatgacattcagatcgtccgtgtcatttctgactgtatccgaaaatatactccgcaatatatcgtttacgatcctgtgatggtatccaccagtcgacaaaaactaatgacggacgaggccatagaagaaataaagaaagaactgttaccgctcgtcactttagctactccaaatcttgacgaaacagccgtacttatcggtaaccccatccataacattcaggaaatgcaggaagccgccaaactactgacggaacattatcatatcagtatattagtaaaaggcggacatctggaaggtgatctaatgtccgacttcctatatacctccgaatctgcttcctatatatataaggagaaaaaaatagaaagtaataatctgcacggaacagggtgtaccctctcttccgcaattgccacttatctggcaaaaggatatcccttacacgaatctatccgccacgccaaagcctatgttacccaagccattcttgccggaaaagagttacacatcggtcatggcaacggtccgttatggcattttccggactccgttgcacaaatgtgtacaatttgtgcggttgtatcataaaattccgtaactttgcacccgcaattaaaaaccaattaaataataaaaatatgaaagcatttgtatttcccggtcaaggcgctcaattcgtaggaatgggtaaggacctgtatgaaaactcagctttagcaaaagaattgtttgaaaaagcaaatgatatcctcggatatcgcattacagatatcatgttcaacggcacagacgaagacctccgccagacaaaagttactcaacctgccgtattcctccactctgtcatatccgctctttgcatgggcgatgacttcaaaccggaaatgacagctggtcactcacttggtgaattctcagctttggtagctgccggtgctctgacttttgaagatggacttaaattggtttatgcacgtgcaatggctatgcaaaaagcctgtgaggctactccgtccactatggccgctatcatcgcactgtcggatgaaaaagtagaagaaatctgcgcatctgtaaatgcagaaggcgaagtttgtgtacctgccaactataattgtccgggacaaatcgttatctccgggtctatttcgggcatcgaaaaggcttgtgaactgatgaaaactgccggagccaaacgcgctcttccattgaaagtaggtggtgcctttcattctccgttaatagatcctgctaaaatagaattggaagctgccattaaagctacggaagttcacactcctaaatgtccggtataccaaaatgtagatgcacttccccacactgatcctgcagaaatcaaaaagaatctggttgcacagctgactgcttctgtacgctggactcaatcagttaaaaatatgatagctgacggtgctacggatttcactgaatgtggaccgggtgcagtacttcaaggattgattaagaaaatcgatagttcagtgagtgctcacggtatcgcataaacagaaacaacataataagaaaggcgtgtcggttatcaccaacacgcctttctttatttttcggctgtatatccagtcttagtttcttggtaaagcttctttcactaccattgaacgacctacatattctgcaccgttcaattgcttgatagcgttgttagcttctgtatcatccggcatttcgataaacgcaaagccttttgatcttctagtttcacggtctgtgattaactttactgaagcaactgttccatactcttccattacatttctcaggtctgattccttaacattatagctaagatttccaatgtacaaattcataaaaatacaaatataaaaaattaataattcaataagaaagttttgggaagagctaaattagagatggatatgctcaaataaatgagaagattcatgtaaaataatcaaatcgcaataaacctctttattgttgttgatgcaaagaaaagcattatttagggatatcgcactatgttagcccctttttcttctcataaaacatcttttttatgaaaataggccaatacttaacgttcaatatccctaaaaaagccttatacctttataatctcactatccgcaatgaaaatacttatgtaccaaatctaacatttcctgtggttttccttccaaatccgcacgtaatgtcttgtcgccataactgcgaagcttacggatgataccatcaatcattgccggactgaatacattatattgttcaaaaatgactctttgttgttgcaggcaatcggcagaagcctcacagctatccggcagttgcgctaatgatttcagcttatcttcattctctttctgatggatattcacatttacatacgttttttgggcaatctccaatgcgtttccgatttcaaacccatgacggcaggcaacggccaagcctgccaacagttgatatagatccgccgatccgtccggagaacgcatttctaccgtctgcttctggctagtgtcgaaatgactttcagcttctaacgggtttgccaatgtacacatatctgtttttgcagcccaccctagaggtacacgcactaatacagaacggttgcgatctccccaacaaacattggtaggtgcttcctgatgaggaacaagacggaaatacgaagttggattggtgtttccgaaagcagtgattgaaggagcaagcaccatcattcctgcaattgccttgcgtgccgtttccgacaaaacgccatctaccagcatttggttctttccgtccttcattatacgcatatggatatgtaaccccgaaccggcttttcctgccgtaattttaggagcgaatgttacattatatccatacttatatcctaaattgcggatcacccatttagctatcatcaattggtctgccgcctgtgatacgggaacaggcaagaattctatttcattttgttcataaatatagccatccaaagtaaagttacccacttcggaatgtccgtactttatttgcccgcctgtctgtgcgatataagacatacattgggtacggaactcattaaatttcgcataagggcctgattcatgataaccgcgctgatcggtcgcttgaaacatacccgtatccggtgctattacataatattcaagttcgcccatagcttgaaattccattccggtgacttccgtaaagatcttacttgctttgtacagggtatgttccggcgcactttcaagcggttctccatctttattaaagaaagaacaaagcatggacaaagtcggtatttctgcaaacggatcaacaaatgctgtgcaaaaacgaggaatcacgtaaaggtcactactgcccgcctctataaaagagaaaagactggaaccgtctacccgttctccacaagtgagaatagcttccagataagcttgattattaataacaaagttcagtgttttcaaacgaccgtctcccgccggatacataaaattgaccatgcggatatctttttctcgaataaatgaaacaatatcggctttagtaaattcagaagtcggcttctggaagaatgccaccaattggtttgcattcattgataattcttgattcataatcggttgtttttcgttgttatatgattaaaacggtttgctgaatgccaaagataaggaaaaattcactaaattcgtgccgaactaacgaaaaagtaactcatggaggtatttacaaacagctggaatagtcggaaatatcagattggctatgctctaagcggaggatttattaaaggatttgcccatttgggagtaatgcaggctcttttggagcatgatgtcaaaccggatattatctccggagtaagtgccggagcactcgcaggagtattctacgcggatggtaatgaacctcataaagttctcgattatttctccggacataaatttcaggacttaacaaaattggttattcccaagaaagggctattcgacctttgtgagtttattgattttctccgaacaaacttaaaggctaagaatctggaggatttacaaatccctttgattatcaccgcaaccgatctcgaccacggacgtatggttcatttccatcgtggcaccatagcggagcgggtagccgcttcctgctgcatgcctgtcatgttcgctcctgtcaacatagaaggtactaattatgtagatggcgggctgatgatgaatcttccggtttctactcttcgcaggatttgtgataaagtagtggctatcaatgtaagtcctatcatggcacaagattataaaatgaatattgtaagtatcgctatgcgttcattccattttatgttccgtgcaaatacttttcccgaaagagaaaaatgcgatttattgatcgagccttataatttatacggatacagcaatacggaactagaaaaagcagaagaaatctttgaacaaggatatagtactgccaacgaggtactcaaccaattattggaagaaaaagggaatatatggagataatccatatttttcctccaaataacaataaatataaaaatctactcgatatgaatgacgaaaagaaaataattatctatcaagtgttcacacgcctgtttggaaataataacaatcactgtgtttacaatggggatatcagtaccaacggttgtggaaaaatggcggatttcacactgaaagcactaggagaaataaaaaaactaggtagcacacatatatggtatacaggcattatcgaacatgccacacaaacagattatcgccgttacaacatcgcgcctgaccaccctgccgttgtgaaaggcaaggccggatcaccctatgctatcaaagattattacgatgttgaccccgacttggcaaatgatgtgccgggacgcatgaaagaatttgagaatctggtgaaccgtactcatcgtgcagggctaaaagtgattatagactttgtgcccaaccacgtagcccgtcaataccattcggatacacagcccgacggaacgacagagctgggagccaacgatgattcaagtttggctttcagtccgtacaacaatttttattatattcctcaggctgaacttcgcgctcagtttgacatgaaaaacggcgctgcagagccttaccatgaatttccggccaaagcaaccggaaataatcgttttgacgctactcctaatatcaatgactggtatgagacaattaaactgaattacggagtggattatcaaaacggtggtacctgtcatttctccccgactccggatacatggataaagatgctggatatacttcttttttgggcatcaaaaaacattgatggcttccgttgcgatatggcggaaatggtccccgtagagttttgggaatgggctattccacaagtgaaagaagcttatcccgaaattatttttatcgcagaagtctacaatccgaatgaataccgcaactatctgtttcgtggaaaatttgattatttgtatgataaagtaggattatatgatactttaagaaatgtagcctgcggatatgaatctgctaccgccattacacattgctggcaaagtctgaacgggattgagaaaagaatgcttaatttccttgagaatcatgacgaacaacgcatcgcttctgatttctttgccggtaatccgcgtaaaggcatcccggcactcattgtttccgcctgtatgaatacaaatcccatgatgatttactttgggcaggagtttggagaaatgggtatggataatgaaggattcagcggaagagacgggcgaaccaccatctttgactactggagtgtagagactatccgtcgttggcgcaacggaggtaagtttgatggaaaaatgctcaccgaagatcataaatacctatatgatatctatcagaaggtacttacactttgtaatgaagaaccggcaatcacgcaaggagtattctttgatttgatgtatgctaacattaacggatggcgtttcaatgagcataagcaatatactttcatgagaaaatataaaaatgaactgttgtttttcgttatcaatttcgatagtcaattagtagacgtcgcaatcaatattccttcacatgctttcgatttcttgcaaattcctcaaatggaaagttatcaagcggttgacctgatgacgggagctaaagaagagatctgtttgttaccatataaaccaacagagattgcagtgggagcttacaacggaaaaattctaaaaatcacgtattaggctatacactctcattttatgcacatcattcaaacaaatattcaaaaaggctgttttaagtagacaattaataatcctctaaactcaaagcttatgaaaaaatttaatatttggacagtcgcgttacttttgataatatccgtatccacttttgccaatactcctcccggtaatattcagtcaactttcaaaaagatgtatccaaaggctaatgatatagcttggtcacaagatgatggatattattgtgccaattttgtaatgaacgaattcactaaaaacgtatggtttaatgctcaagggcaatgggctatgacgcagactgacctcgtcagcctcgaccgtttatcgcctgccgtttataatgctttcgtatccggatcttacgcaagctgggtggtagataatgtaacgatggtcgaattcccaaaatggcaagccattatagtgattaaagtaggccaggataatgtcgacattaaatatcagttattctatactccacagggcgttttgttgaaaacacgcaacgtaagttatttacatgatattttcggtccaagtacattttttcttaactaaaaaagagtgcatatagaaaaaagcccctgcagatgtaatgatttgcaggggcttctattttgtgtgaaaagagttatttcttctttctaagcactacagcagtacgtgcaggtatatagagttttaaccactctttcttttcttttttgtacaacggatcagcattcgtaaaatgaacgatagaatcatcggtcaagccatttcctccaaacgagacattatccgtattcagtataacctcgtatgcgcccggagtcaccagaaaaccataatcggtgaacgactgtttcggattaaaattgaagacgaatatcaaatccttacgaccatatgccaatacctgatcaccatcattatgccagatttcctgaacaggtgttgcctggaagttttttacactcttgattactttcagcatttccgcatcaaagtctcccatataatgataagtaagatccttattatctaccaaattccattggcgacgggcatatttgcaagaccatccattaccttcgcgcgggaagtcaatccattccggatgaccgaactcattacccataaagtttaaatatcctccattgattgtagaggctgtcagtagacggatcattttgtgtaaggcaatacccctattgactacataattttcatcccctttctgcatatgccaatacatatcagcatcaatcaaacggaaaataattgtcttatctcccaccaatgcctggtcatgactctccgcatacgatatagttttctcatcctggcgacgattggtgacttcccagaacatactggaaggtttccagtcctcatcaatcttttctttaatcgtcttaatccagtaatccggaatattcatagccatgcgataatcaaatccgtaaccaccgtcctctactttcgcagccaatcccggcataccggaaacttcttctgcaattgtgatagctttcggattaacttgatgaatcaccttgttagccaacgtcagataacaaatcgcattatcatcttgatgtccgttgaaataatctccataattacagaacgcctctcccaaaccatgactataatataacatagacgttactccatcaaaacggaatccgtcaaatttatactcttccagccagaacttacagttagacaataggaaatgaatcacttcattcttaccataatcaaaacaaagagaatcccaagccggatgttcgcgacgcccacccggatagaaatactggttcggatcaccagcaaaattacctaaaccttccacctcattctttacagcatgagaatgaacgatatccataattacagcaattcccatctcatgtgccgcatcaatcaaggctttcaattcgtcaggagtaccaaaacgggaagaagcagcaaagaagctagatacatgataaccgaaactcccatagtatggatgttcttgaatagccataatctgaatgcaattgtatccttcctttgcgacacgcggaagtatcttttcacgaaattcattatagcttccaactttctcttcctgttgtgccatgccgatatggcattcgtaaatcaacaaaggattagtggtaggcttaaatgccttcttcctaaatttataggggttctccggagcccacacttgcgcactgaatatctttgtctgttcatcctgaaccacccgtgtagcccaagctggaatacgttcaccttgaccaccatcccaatatatattcagtttgtacaagtctccatgatgaatagcatctgccggaagattgatttcccaaattccattcttcagcttcttcaacttgtaagcagctttttcttcccaattattgaatgtacctaccatataaatatgtgtagcattcggcgcccattcacgaaaagtccatcctttggcagtacggtgcaatccgaagtaaagatatcccgatgcaaagtccgaaagagtttgctttcctttattggttaattcggcctccttgttcagcacatattgatgacgacctgtgattgcatcagcaaaaggctccagccatgggtcatttttgataagattaagtgtcttttccatatcagaattgaatttagattatgcttttacttttactattactttcttcacaccctccggagtaatgccgggggcatgtccgtcttgaggaaagaaaatagcaaacattcccggcttcacagtgatataagtttcagctaatccttcaaaaaaagtaatatctttttctgcattataaggcgcatctgccggaatacagtcttttgcagcagtatatcccatgatttccgttcctgacaatggaatctgaatatcaataaaatcacgatgtgtctccagcttggcttcttccttcgttttaggcttggtttgtgctatatttaccaacaaatcttttcctttcaactccgtcttacctatttccatagtctgaaaatcatgagattttaaaaactcaatagcttgtgcaaacaacggattcaaagacgcatatttctccagattttctaaagtatctactaccatatcaagttcaattttaaagtttatattttagggattattcaaaatcatcaatagtgtaattaataaaatcggcaaaccgtttaaattgccggaatgccttgtctatttgctccaacacatcagattgagtaaaaaaactatcagagacattataagaacagatgtattctttgcacttcaaatagtcaatatgtttgaaatctttcggaaagcctttaggagcggttttcaagaaatcctcccctatcaccggaaaatatttcttaaattccggatcttctgcaatagcaacaaattcttcaatattatcataaatagattgccgaacagcttttaagacatttgaaggtagacagagacttcctccggcaagcatagaaccattcggttgcaaatgcacataatatccgcaatgatttgatttcttgcctttcgcattaatatatcctccaaaatgtattttatagggtgttttatctgcagaaaagcgggtatcccggtaaatacgataagtacagtctttgggctgaattccccgaatcgtttcgtcaaacagagatatacgggcaatcactattgccagaaagttatcaaactcagcacgagccaattcatattccgccttatgctcattaaaccactcgcgattattattcgcggaaagatcttttaaaaactgaaagataacaggtatgttcatctttatcattttctattattatcctacaaacgtacaaattttatttcatataaactacaaaaggacacaaaaggagataaaaaaagcatcggcttaataaaccgatgctctaacacatttatcaaaaaaacagactcttctgtctctgatgtactttagctttcacaagtggagtacaatctctttaattaatcttatatctaatactatgaaaaacacataaatataacagtacaaatgagatttttgttcagtacagtcctgcatatttcagttaattatagttataaaaccggtagagaaagataactataaaaaagggctacccagacaatgtctatcggtaacccttcctagttctttatatgatagtctaatttacttcatagcagctttcacttgaggaagcattttcttaacgtttgcattctccggagatattttagcagcttcttccagataatctaccgcttctttgaatctggcatcagctttctctttttccgcagcatatttatccgcatcagagtttgccaaaggagcagctttctttaaaatattagctccatcattgtaacacaaaacacccaaactatacaacgcattcgttttgtatgtcttatgattcaaaggaattacttttttaaagttttcttctgcttcttctgtcttacctgctttctgagcggcaagccctgctttcaaaaagtgaagaccataatttttcaccattaccttattgttaggagccaccttcaagccttcttctaatgtagccacatattcgtcagttttcttcaacgcatccaaagccgcagccttacgagcatatgcattccctatattgaacttcttttgaattgctatatcaaaataagtaacagcttcggcatatttctttatctcatcggcagccataccacaataataagctgttgcagaatcttgattattagtttgcttcaagtattcactaaacttagcatacgctacgggataatttttagcattgaatgcgtcatttccttcttttttaatttggttagggtcggtctgtgcaaaaatgttagtaacagtaatacaaaatgcaaataaaaaaataaatttcttcataactttatgtgttttttagttgtttatcgttcaaaagtaaaccttataatagaaaaacacaaccctatttaagttttttgagttttttgaaacctatataacgttcgttattcttcgtaaaaagggcattcctctatttaattatcctaccatatatagaagacacccaatatttgtattctataaatagctgattcataatcaaaaagaaaaacacaaataaaaaaacagccaaaaatttttgatattccacaaaaagcactacctttgcatccgcaaataaggatggttccgtagctcagctggatagagcaacgcccttctaaggcgtgggtcctgcgttcgaatcgcagcggaatcacagttaacatccggtaacagttaaatgttatcggatttttcttttaaatagctgatattaaacatcttacagtccgaccggtatctccaacaaataccagacaacaaacaataatgtccaggcaaacaagatagccagtgaatatctccaagtatatttaagcaaagctccatacgtaattcgcttgtcatattgccgcatataagtcaataccaaaggcatataaaacaagaaaggagtgattgcattggtcgagctatcccctatgcgaaaagcacattgtacaatgtccggagtaatccccatttgcgcaaacatcggaataaatatgaaagacataaaagtccatttagaagtagcagataccataataagattgacagttgctgtaaacaggataaacaataccaaagcagccaatggagcaggttcaaaagaagaaagcaattccgctcccatgatggcaaggcacttatccagatgtgaatactcgaaacatgcaaacatctgtgctgcaaaaaaagcaattacaaaatagacaccaagaagtttcatgggttgcgttaacccttctatgacgtcattatccgtacgataacgaccggagctgaagccgtacgccattcctgtgataccggcccccaatgagagaagaaacaaaatacctgcaataaaaggtgaatgcattaaaccaccgtttaccccacgtagaatcccgtaagaagaaaaagtaagccacaaaataagagccacataaatagctgccacaacaatggagatcataatagcacgccgttctttgcgggacagaggccggtaagcttctacctttatccctccttcataattccctaacttaggaataagccatttctcagtcacccaataaacaatagcagtaataaccaccgtagaagcactcataaagaaataattgcaaagaggttcggtgttcccttgatatccagtctgcgccaaagcagcctcttgtgtagtatgagctaataacgggtccatcgtacttaatacaatattggcactatatccacacgcaacggaaacataagccgttacaattccggcaatcggatggagacctacccattggaacaacatagccgcaataggcaacaaaattatatacccaccgtcaccaatggcattcgataataaccccagaacaattacccaaagaataattctctttttctctttcctgttccccacccccaaacggatacacgcattaataaacccggaatgttgggcaaccccaagtccgaacatcgcgatgattaccatccccaaaggagcaaatcctgtaaaattcttaattgcgttgcgcaaccaccagcgaataccttccggactcaacaaactttgcacacgaatgtcttcaccggtttgcggcaatatcacctttaacccatagatatcgcatatccatgaaagaaaaaccactgccatcgtcaacagcataaacatcgtagcaggatggggcatacgccattttgtcttcatcgcttttcaggatttattcttcgtcagctttccttagttattcatcatcaggctccagattatccagatcaataatgcgcaattccaatgcacgcacagccaatcgggtagcattcacccccacccgctctccattcgggaaaagacgtccgataaggtcattctgccgtttttccaatgatttcacgccgaagggcatacctttcagatttgcaatcatctccttcgtatatcctaatgccaaatgacggagaaaacgctcgtcatattcatcaatatcataactgataaccgcctcctgacgttttgcatcattagcgacagacttcttaaaacggtctacaatcttttctagaatcggataattgaacactagcttctttccatccattacagcctgtacatccgttttagtaagcagctctcctgtcttgagaataattccatcggcaccggcattcaacacatccacccataatttctcattcaagatctcaccggtgaagatcagcacacgaacccccttataacgtttgaatatattccgacaaatatctactccgatagtggtagagccccccagccccagatccagcaaaaccaaatcaggaagttgggcttccatcaagggccagaattcattctctgtcatggcggtaccgatcacttccgcattcggtatttcgtgacggaatatctcctccgtgcctttcaactccaattttacatcctctacaataattactctaaatttctgttcttccatttccttatatctaaacttttatgtgttttccttattttatctacgcggtacagtaaaataaaccgtaaatcctccatctgcagcaggttcggcattaatacgacatcccctgcgtcctgcaaattcatcatgatcgcggataatctgtttacataccaaatattccgtaccacgcaactcccctttttcaccggcagtcatacgtgccagattcggataaaacaacaggttcagttcctccagactcttctcgcgtcttgtatccgtaaaaagaaagcgaatatattcatcatcctgccgtgcctgcaaacgcaacagaccgtcttcgtgaaccgccaacgcttcgtcaatcaggttttccaataggaagcgcaactgattcagatctcctatcacttttgcgtccaccgttcctatctccagttctatcctctccgtccggttcttcattgactttctgaagtattttccagcagtatccaaaagttcctgtacaggaatcaccacccgccggaaagtagcctcttccaactgacgggaagcgcacgaacttagaatcgtaaagattcctttataatattcaatcaattcggtcattgtctccacagcctcacgttcttccttctctgaaatattctgcatattgagcctaccgacaatttgtttgatcttattcggataataaattgtttcatgtttaatcgtagacaggcaattatccaataccatattttgtacatgcaacatactgtcttcccaaagagcacgtcgtgcctcttcatgcgccgactcaatatcccgatatttcgtagccaatttcaccaccgcattaaatatcacaatcgccacatagcgtgccaccaattcaaacaacaaacgatctgtttcctgctccgacccttccctgcgttccagataaagcacacccacacactggtgttctcctcccgcttccaccttcaatggaatagccagataatgccgtcgttcaagatattcaccggaatcaaaacattgctgtaccatctccggcatctcctgaccgggacatgaagcgtattccagcctatgcgtcgtttcattatacgctgcaatacccatccggtcaatcgtaagcaattcatttacagacccgaatgcttcatccactatgcgttgcgggatttcctttagcgtactctcctctcgttggagtgcttctgcatcctcttgctcctgtggtctgaccaaagaggctgcaaacactttttgatttatctcgagcacctgttcaagattcagtcggttctgcagccgcttgcgcatatacagaaaatagtacccgaccaacaaaaccaccaacaggacaaaacataaaatgatccccaccgtcttgttcgtattcgaacgttccaactgcttgcaatatgcctccaacgtctgatcttctccttgcaacttatacaaatccgtaaatgccgaattattataactgtacgcatccagttgtttcatagccagaaaagcgactgccgcttcgttccttatgtccagaatcacatgataatccgagtcaaacaactcattccaccaactaatctcggcaggtatcccctcaccaaccaatttcatataacgatgcggatgttccgcccgtgcatatttctcataatgctcgttcaataacatcatagccgaatcgatatactgcaaagctagttcatattcttcatccacattagcaaaatatgcagcatttgcatagtccgacgcagcatccagcaaatcctcatataccgaatccgtaaccacaactatcgaatctccttcctgcaacatgggggaaatagaatcatgcacacacgacaccatccctaccggaagcaacaggcaaagcaatacaccgactatcttacgtatccctaaaggcaaacgaaaatagaaacgactccccttacccaattcactttccacattgaaagcacacacacggaacaaatcattcgtcttcttatatttctcaatgattcccttacagttcattaatccgaagccactccccttgttttctttcagttcctccggatcctccgcattcttcatcccgattacgcgcgaatcatacaccttctcaccaatgatacgctccacatcctccgttgaaatacctcgtccgttatcttctacggaaatctccacataagtatccgtcatacgtgcgtataccttgatgttcccaccttccggagtatatttacgcgcattctccgccagcgtattaatcataaacagagtcaatgcacggtcggccttcaccgtgacaacggtcggttcaatctccaaagtctgttttttcatctcaaaggcacgccgtcctttccctaccagttcaaataactcattgaggctgaatatctcaatattcaagctgagcgttccttgcttcattttaatccagagagccagaatatcattatattcattgatcgtagtaaccaattcgtcgatatactgatatttctctttcttgatcttttcatcatcgatatatccccgttccgtcaacttatgtacctcattcagaatacggtcaatatacggattgataccatttacgatagccatacaggctttttttatcaagttctggcgtttatttccggcaatatgctgctcatagatataccgctgtttttccaattgcatccgctcgtcactcaatgcttccaccatctgctcattgtcagccgcccaaataatataaggctccaatacgtggaccaaagccttctcgtcgcggctcagccgatatccagagcacaacgtcgccttaccttcctccgatatttccaatttcatacgtccctttccaaacaactgatctatcccctgctgaatcaaagggacattcattgggatggatgaagtaatatcccggcagagtcctaaaatctgctgcaaacgttccacatccaaccggtttcttattttagaacgcttattaaagaaccaccagaaaatcaccaccaataccaatccggcaatcaccagagaaaggacaagcgtcatctggcgcgaaccggcttccaatgacacataacgactttccagttccttgtcctggcgggtaaaattcaaaatatccagataaatattccgattataatcagaagcatatttcattccgagccctgcatacgatacactcaattgttcccgaatccttgaaatccattcaggaacggtcttcacattttcctgcgcaatccaaggcactcccgtataggtagtatcgccttctgcaaacgtatgcagcttatccagtgtatccgcttcatgatgataataaagtatatgatggcgattcacacaatccaatgctttcgtaagtgtatccagcgcttccgaatatcgtccgtgcgcattcagatattttccgatagaaacatacgctccggcaatctgatacaagtcgttatattggcggaatctctcaagcgcgagttgtgccatgcgcaaaggtaaaagagaatctaccggcaaagcaaactgctccagcatatgtcctctccttgtctggaaaaactcgaaactatcggaagaagccatcaagttggcaagaccttgcaaaccatttccttcgaaataaggatgattgctctgaacagccgcccgccaagtataatacaaatgatcaaactcacgtagttttctctcctccggtgtctttgcttcaaccaaagaagcggcccccttaagataatgatagtaaagcaattgattagtatccgccaatgcttcctcttccggaatatgactgagcgacgcaatcgcttcctgtcgttgctgaaggtaatagtaataaatggcggaaacaataaagaactccgtaaaagcatagtccagccgaagcttttcgtgcctgtcggcaaacaaatcactttcctcacgaatacgtttcatacgtctcaacgcactgttcctgtaatcataaaattctttattcattgccgtcctctgacagattttcatcagtccgatatcggcaatcaaaagctcaagttcgtttttagtcagtttatagacctctttatgagacgcttcggcacggtcaaaatccatattcataaaagcccagaatcccagattatttaaagcttccgctttccccgacttataaaagttcaccttactataagcctgttcggcatatttataagaagaatccagatttcggtaacgataagcatacgctgttccattaagcgaatcaatcaaacgcacctctttagtcggcaccatatcagtgcacgagaagaacaaagaaagaattatcagaatagataacggataataaataatcgataatgagctatgctgtgcctcattacctattcttcggacattattatttaaagaaatccttttcataatccatcgtcaactatccattaattacgcaaatctacaaatatttccgataagttggagagaaaatgattttttatacaataagtccttctaaataataagagaaattcctacctttgcaggcaaattaacaaataggtaaaacatctattacaaaatgagcgaaaaagcaccctttatggtattctcgggaacaaactcgagatatcttgcagaaaaaatctgcgcaagcctgaattgtcctctgggaaatatgaacattacccattttgccgatggcgaatttgctgtttcatatgaggaatcaattcgtggcgcccatgtattcttggttcaatccacattcccaaactcagacaacttaatggaacttctcctgatggttgacgcggcaaaacgtgcatcagcaaagagcattgtagccgtaattccctatttcggatgggctcgtcaggatagaaaagacaaacctcgtgtatctatcggagctaaactagtagccgacctgctttccgttgcaggtatcgaccgactgattactatggacctgcacgcagaccagattcagggattcttcgatattccggtagaccacttgtatgcgtcagccgtattcctcccctacatccagtcattgaaattggaggatctggtgattgctacaccggacgtaggaggttcaaaacgtgccagcactttctccaaatatctcggtgtaccgttggtactctgcaacaagtcgcgtgagaaagccaatgaagttgcttccatgcagattatcggtgatgtgaaagataaaaatgtagtattgatcgacgatatcgtagacacagccggaacaatcaccaaagctgccaacattatgctggaagccggcgcaaagtctgtacgtgctattgccagccactgcgtaatgtccgatcccgcttcattccgtgtacaggaatccggtctgacagaaatggtatttaccgacagcattccttacgctaagaagtgtgcgaaagtaaaacagttaagtatcgccgatatgtttgctgagacaatcaaacgagttatgaacaacgagtcaatcagctcacagtatatcatctagtcgaaacttcattttcaactaaataaaaaataatcgcaggtaaagtaaagaactaaacctgcgattatttttatttgataacgctgccttcattgcgcagccaactttcaacttccaactctcaattctcaactttattgaagtcttccgaatttgtatgttccctttctgattatcttcccgtctttatccgtttccacaaaaggaccattcttctttccttgtttgaagaaaccatcgaaacggttaccgtctttatcaatctgaaccccttggccttcttccaatccatcaacgaagccacctttatattgcatacccgcaacagtctttaaagtcccctcaccattcggacggttatctttccaatccccctcgtacacatcaccattactccatttatagatacccttaccctcacgtctgttatttttccagtcaccttcgtacacagcaccattcgaccaggtaaaagttcctttcccatcttgcataccatccttgaagttacctacatacttatcaccgttagcatgatagtaaattccctcacccgtacgttcacccaagagataagaaccctcgtaacgatctcccgtatggaaaaaataagtaccctttccatgctggatatcatctgcccagtcaccctcatatttatctccgttagtatattcaaatactccttttccatgacggacatcatctttccagtctccttcatatttacatccgtcatcccagttcatagtacccttaccgtttttcttgtcattcttccaatgaccggtatatttagcgccattcgcccaagtatacgtaccttcaccctcacgcttatcattcacccaaccacctacatacaagtcaccgttgtgataatacattgtccctttgccatgctggtagtcctgataccacataccgtcataacggttgttattcataaaataataaataccttttccgtgctgttggtcctgataccattgtccttcgtacttttctccgtcaggaaacatatagatgccatacccttcacgtttccccttcacatattcaccctcgtagacatccccatttttaaagaccgtctttcctttcccgtttggtttgcgtcctttcatttctcctgtatagacactgccatccttaaaagtatagttgccaatctttatttctgtagagaatgtatcctttatctttccgaagaatccgccctttttcccttcattttcttgtgccattaccccctcttgtgccaggagagccaataaaagtgtagtatatagatatttcttcatttattttagttgttactcatttttagaattacgatttggacaaagatacgatttctctcccaaaaagccccttaccggaaagcaaattatgacaactttttacctgcaatgacctcttttaatgtctctttgcataaataacgctgcgctaaatcctgtatttccgcaggagtaatctcgtttacggcttgcaaagaacgtgcgaagtaatcatccttcaaaccggaagtagctataaatatccacgcatccgagagagagaaaggcgattcataactgcggcacatttctcccaacatatagttgcgcactatcctcaactcttctgcagatacaggatccaggtgcaaccggtctatttcgtgatatacttcctgtattaacggctccacatattcattatccgtctccgtcgaaacaatcagcaagccgctatccggataaaatactactcctgccgatatgccataagtataccctttatcttcgcgaatgttggacatcagacggctaccgaaataacctccgaacaatgtcatcagcacacgcagcttcggatagtcgggatgttcgcgagtaatagtggtacatcccattttcactgcgctctgcatagcgtcttcacgttccgtaaaaatcctcttctcaggtatagccgcaaacgggaaactcgacttcggcatctgtaattgatattgcccgaacggaatcccgaaaatatccgttacacggctaatgatatcatccgtcaccttgccggataagaaaatggagcaactgccggaatggtaataccgctcataaaactcacgaagcacttctggagttatggtatgataatcctcctccatcactattttcccgcacggatgttgttcaccgtaaagagacttcagcaaactacgatgtgcaagaaaatcaaccttagaggtattgaccaaatattgctggatattggtatccagaatagtttgaagctccttttgtggaaacagtggttccttaatcatcgactctaccacttccaacgttttcgctaaatacttattcaatgaataaacagtgatataagcatactccgaagaactggagagttctagccacgaaccataataatccaatttctccgcaatggtggcagccgtatatttcgtcgtaccttcgcgcaacatacggttcgtaaacaaagcttgcaacttctgcgactgctgccagcgacctccggagaaaagcacatccatacgcaccacttcctgttcaccggcattaataacagtcagcggaatgccattcggcaacgttgtcctgacaggagtctgtatatggaaatttttcagaggttgtatctcaggctgtatcgtgcgatccataaacgttataatctatttttcaaaaattcttctgcacgcgccaagtcctgtggagtatcaattccaatcgtttccacttcactgatccccacttttattttatacccgttttccagccagcgcagttgctccaacgattccgctatctcaagtgatgattgcggtagtgcggttatctccctcagcacttccgtacggtaagcatacaaaccgatatgtttatagtaggtatgtcctttcagccaatccttcttctcggcattacgctgataagggatgatagaacgactgaaatacagggcattccaatttgcattgactaccactttgggagagttcacattctcaagtacggcaaacggctcatcagcagtaaaaggctttaccaatgtagcaatctgtgtagtaggatcttcaaaacaagctttcacggcattcaactgcgaaggctgtataaaaggctcgtccccttgtatattgactaccacatcaaagtcccctccaatcttgacgcaagcctcataacaacggtccgtaccgcttttatgatgaacagaagtcatcaccaccttaccgccgaaagctttcaccgccttctcaattcgttcgtcatcagtagccacatacgcatcatccaaaatgccggctacttgttcatacacacgctgtatcactgtttttccgcccaagatagccaacggtttcgcagggaaacgggtagaggcataacgggcaggtataattcccagaaatttcatttatttaatagataatgaagaataaagagcggataatgactgctgcacatattccctctcccaatcttccggttttattattttatcatcatacaaaagtatatcaatatccaaacagactttctcttccttcttatcctccggcagacgaccggaagccagttctatgtctttcagtatcctcttcacgagttcctcatccttatccgaaaagaacatgatcacttgattggaaaacaaagccggatttttgaagaacaaaggttccgtctccaactcaggtgcccggtagataggagaaaactgttccgccagtttctgcctggcaaaagtcagattctccgttctattgtagttgctccctatgcaaacaatgtatttgtgcatctttttagttgaaaagatcatccagtcccatttcctccacctcgccatccggagtctccgaaccggcacaaggatcgaatccttccggaagtttaaaagtttcctgctgatcgtatcccaaagtcgggtcatcaaatactttcttcatatattttgcccaaataggtaaagcagcggcagctccctgtccgtatgtcatcgatccgaagtggatatcacgttcgtcacctccaacccaacagccggacaccaacgaaggggtaaagcccataaaccaactatccgagttctcatttgtcgtccccgtctttccacccatatccgcagtaattccataacgtcggacacgtccgcccgttccttcatttataacggcacgcaacatgaccagcattttatatacacttgaagtactgatcacttcatccatttgtggcgcaaacgtagaaatcacattgccttcactgtcctcgatccgagtcacgaacaaaggagccacccgaatccccctattagcaaaagcagtatatgcactcaccatctctccgacagaaatctcacaaggtcccagacaaagtgaaacaaccgggtcgatggccttgttgcgcactccgaaactatggatcagccgcaccaattcatacggattcagtttgcccatcagataagccgaaatccagttatccgaattagccagtccccattttagagtaaccatctcaccataacgcttcttattggaattacgtggcgaccatggttccccagtttctgtaatcaacgtttgctctacgtggcgcacctggtcgcaaggagaaaaattattctccatagccagtgtatacaagtacggtttgatagtagaccctacctgacggcgtcctaccatcgccatgtcatattggaaatatgtataattaggtccgccaacataagctttcacatgcccgttcataggatccatcgacataaagccggtacgaaggaatgacttataatagcggattgaatccatcggagtcataatcgtgtccttgcttcccatccacgaaaagactgtcatttcctgcggtgtatcgaatgctttcctaatctcctgttcagaattccccgcctctttcatcagccggtaacgctctgtctgtttcatggccttcatcaacagttcttccacccgtttcgcaggcagcactcttgcgtatggcgcattcttacttcctactttttctttgaaaaacaaaggttgcaaataactcaaatgttcttctaccgcctcctccgcatattgttgcatccgcgagttgagagtcgtataaatcttcagtccgtccgtgtagacattataattcgaaccatccttctttttattcttcgcacaccagccatacagaggattcgtttcccaagaaagggagtcttcatagaatttctgcatttgccaaccacgataattactcttcaccggcttggttgctgtcatcacaccacgcaggtattcacggaaataagtagccaaaccttccttgtggtcaacacggttatacgacaatttcaaaggaagcgcttgcagagaatcacattcggattcagtaatatatcccgctttacgcatctgtccaagcaccacattacgacggccgcgagaacgctcattaaaacgaacaggattatagagtgacggatttttacacataccaaccaaggtagccgcttcctctattttcaagtccttcggttcacggttaaaataagtatgcgcagccgtcttaataccgacagcattattcaggaaatcaaacttattgaggtacatactcagaatttcctctttggtgtaataacgctcgagttttacggcaatcacccactcaatcggtttctggaaaagacgctggagagtatttctcgccacattctccgtaaacaactgcttggcaagctgctgtgataaagtacttcccccacccgcatttttctggaataacaaaccacgtttcacaaatgcacggaacaacgccttagcgtcaatccccgagtgttcggcaaaacgaacatcttctgtcgcaatcaacgcattaataatgttgggtgacaagtccttgtaggctgtatacacacgattttccttactataagaccaagtaccgagcactttctcatcctcagaaaagatctccgtcgcaaatttataacttggattctccagttcctccactggaggcatatagccgatccaacctttcgaaatagaaacaaaaataatgacgacagccactactgcgattgccaataaaatccaaagagcttttattatttttcgaatcatgttttttcttgcttataaaaaatgcacttaattaagttacaaaggtagataaaatccggtagccgaccaaacaaaaacaggcgggatttttattcccgcctgtcattcaccctaactctatctattcagagttaccaattatgaacgagtcgtatagtaactcaccatttatcaatagtctgtaatttccattctcctatcgtacagcgttcactatcaaagttgatcgccactttcactaccggtaatccgcataaagcgaagcgttcaggataattcttcagattgatctgttccatagcttcaccggcagtcttgtcaagcttcaactccatcacatagagcgtggttttcgtacgaagcaccacatccactcgaccacggggggtacggacttcaacatccacaaaagaacccaataagctgaaaataatgtagaacatctgctgatagtgaccttcatacctcgtattgtcacaataaggaatggtagacaagaaagtctgcagccgacgcaacgcagaatccatatcatcattacggatatcactcgaaagataagctaccatggtattcgttttttcagtaggtgtagacacataataaggcaacagagtcctcatcaagccgaccctaacttctttattaggaatatccaatgtgtacagtcccaactcgctatcgtaacccttgatggtgatataaccgctctgatataacagcggagtaatactggacattgtctccgtcggtgcatcaaaatcctccacagctgctgtttttcctccgacttcagaaggttcaacaccgaacttctccaacatctttatcaagtatgtaggagtgccgctaccgaaccagtaagaaccgaacttaccatccgcaaaagcattcaacagactgaacggattatagaggtcgggagacggataagtgaaatgataaccgtcataattccccttcaacttcagcaagacctcttcaggggaaatattcaatttcgcagccaatctctccatatcctctttcatctgcgttagcatctcatcctccgttattccgcaaattgcagcgtatggctcatccatgctgacattcttgatattattcaattcactaaagatactcaactgagagaacttggtgataccagtcagaaacacatacttcagataaggatcacaagctttcaagggactatagaaattacgcatgatattacgcaatacgcctaaattttccttttcatgcaccacatcaagcaaaggagcatcgtattcgtctataagaactacgacctttttccctgtcttttcataagcacacttgataagacgggttaatcgcagattagcatcaccggcagttgtatcgagaccgaaggtccgctcatagtctgaaagcataaagtcaagcaaacgctccaaacgctccttatccacatgcttcgccatactcatatcaaaatgaagaaccggatattctatccactctttctccaacctctccatagccaacccttgaaacaggtccttacgaccagagaaataactatgcaaagtagaagtaagcaaagatttaccaaaacggcgaggacgattcagaaacacatatttcgcaaaatgagtcatgcgataaacgtattccgtcttatcgatataaaggtaattcttctcacgaatttcagaaaaagtctgtatccctatgggatataatctttgcaaaacttccatatcaatcatatttttcacaaagctacaaaaaatatccgttcaaaaagaaagcaggcagaaaactttttcccgcctgctccttttactttatatgaacagctccacaggtacaaaaggtacagtaaatacaccccgcattttttccacacacacgtacgaacgcacctaactaatgcgcgcacgtgtgcgtgtgtatagagagccccgaaaaaagtgtacctgctgtacccgccataaccaccgcacctgataaactcatcatacccgccacacccatcgtcaaacaaacacagtgctatataagtcctaaagcagtgctttacgacctctaaagctatgctttagccttcgtaaagcactgctctaacaaatatatcaactatcttcacagacagttgatatatctcacatacaaatcatattagcttcatgctaatatgagggtataagtcaggaacataccactgtactcttcccgaccttttgtcaacgtcaaaccttgacgtatagttctgttatccgtactcttcccccatacctgatattaaattcgatttatatagggagctttgcgacttattcatattgccaaatgtcatccatagtaattggcacataggctccatctttcatttctataatgacagagggctcatgcacaataagagtatgccacattccggcaggtacttgtacgccataaataccacttgcaggattcaattcatgccgagcacattcaacacctttttcatcataaaaaagttccgttatatgacctctaagcagaatgacagtctcaattgttttagtatgacgatgaataggaacatgcgttcccggtagcaaggcattgagcatacgctgcgaagtgtcaccttcaccattacgcaaatcaagattaatgcgccgccgctcatttgttcccgcctgagctaacagttcatcaagcagtttatcatttatttccatatttttcattaacttttgcacgtagatattcttcgtgtaggtgataatattttctcttgaacaagacatagacgatacaaagtaataccagcactacaactaaatacaaatacttattcattggcaaataaatagcccccaaagagattattaattgcataaccatatagacggtcgacactaccacatgcttaatatgcaattcattggccatcaattgataaacatgtttacgatgaggtttgcctatattttcatgcaataatatccgatggagaatagtgagtacactatcaacgccatataccattagcagcagaatagcccaatagtttccgctttttaatatataagaacctaaaaagtaaagcaaaataaacgcaatggatacactgcccacatcacctgcaaaacatttagccttagtgcggaagttaaagaagcagaatatcagcacgctaagcaaagccacaataatgaaattccggtcgacaaactcctcccgcgaattgagaataagcaacggaacaagcacagccaacgagtaaccgccggtaataccatttattccatccataaagttatacgcattgataatgccggtgcatactatgagcgcaatgataaccacccaccaatactcgggcagcaaaataccccactggtagaacatgagtgtcatggcgacaaagtgcacaatcaagcgaaatttattggataccgaatgaatatcatccgcaaaactgataccacccaacatagtgagtcctaacaggaaccaaggacatgtaaaaccatagaaggcagcataaagccaggctccaaacaagaaaataatacctccgccacgcaacacaatagtactgtgcgatgaacgcaagttgggtttgtctataatgttaaacttgtcggcaatcttaaaatagacccattcaagaacaagcaataatactgctattaacagatatacaaccatacttattttgtatttgtaaatgatttaatggtttgtgtaagtccttcttcggcacgtatgggcattttatctatacccagtgccttttttattttagcattgctaaccacatagtcttcggttagctttgtcaaacgctccgagtttagtggcaggtgcaacccatctcccaccttcgccataccattcatcagccctttgggcagataccaaatacgtgctttcttacccaaagccttgcagataactgtaataagtccgttggtcgataacgcttcatcgtcacacatattataaatgcccgattccacttccttaacaagcagcccttttatgacaaaacaaaggttgtcaatagaggtaaagcagcggtgattttcaaaagcccccaaaggccagggtactccttttttcaccactccatagagcagattgagattccccttgtttccgggaccatgtatcatacagggacgcaggatatacacttgcttatctgcggccggatgagataggatatattcttcagctttgatcttcgattcaccataaggtcctaccggattgggaacaatatcttcagtcagaatatcaccggggacaaagtcagcagccgctttcaccgatgaaaagaaaatgaacttcccggccgatgatttaagaaaccagtcatacatcttttgagtgagccccgtatttaccttaaaatacacttccggcccaaaagttttcttcaaatcatgtgccttgccggcaagatggataacggcatctacttgtggaatcttattttcgtcaagatcatcccaggaaaaggtcttgaccacaccctccttttcaggcgctacgatatcaaggccgtaaatttcattactttgccccaaagcctttaccaaattcccccccacaaagccgtgaattccggttataagtatcttcataatattttatttaccaaatcaacgtattgttttgttaccttttcttttgtgtaatagcgctgtatcacatcatatccgttacgccccattttctgaagctcttcacgcgacaccgatgccagccattgtgccatttcatctaccttcttatcaaagtccttctcagtaataagctttgcacaattataatccttagtgaagtttacgataggtgttttgtctccagaacatataagcaacggtctttcacaagccataatggtatacaccttagacggaaatcccatcatttccatttcgggtgccataaagatgaactgcacgtcactgtatgccaatatactcggcatcagatggcgaggttgataatcgagtacatgcaacttgtccagtcccttctctgctttctgttgttccaagtatgatcgttgtacccccatacctatcacaaagtactcaacattcaaatcctttgttttgtcgaccaatgccaccagcggacgccagtcttgcgcatgtcctatattcccggcataaagcaatttcaaagaatcggttttaggaaagatattctcgtcaagaggttctacattagttgggttataaaggtcagtatctacgaagttgggaatgatgtgtagcttattcggatcttcaaaacgactcacaatcgtattatagaaaacatcgtcaatggtagtgattgcagcagacttgttgtaaatgcaacgttcgactttctttaaacaagcgattatcggtcctgtttttttctttaggatatcgggataaatttcctgtacattatatataactttgcagccttttaatttaccgaggatgagattaagcattcctatgctgagaggtggcgagggcgacactattacactaacattgcgtatgcacaaaccaaggagaaacgaaatgatgtgccaataaacaaaaccaagaatacgcaatgcagtgctcttgaacttcttttgtggcacatgcattacctttataccatgaaaattactttccttataaattccggggattttccactttagcggttgctttgccagttgttcctctactacattaaagtgcggtgttgtagaaagcactactacctcataaccttctttttgaaatctaagtgcgatatcgttataaagatatgcagtggaaacaccatctgggctgaagataagactgtgaattaagactttcttgctcatttatcaacgtttatattaaatcgttccttaaaatatgtccgcatctcttgcggtgtagggttctttcctatataatattccatctcctcaatcttggcatctataagatacctgtaccaatatgcctgcaatgtagcccaaataaaaccgggcttgccatcaagaaaaccaccaaagcagatgtagcgaacgaagaaatacatgaatgcacgcaagaatttgggcagtttataatacttccctttctccctgttacggctctccaatccattccctcccaatacaatgtcgttccaataaccttcataagcagccacaatctcacggttggcatagttgttgtgcttttgagtccattcagtgagtccattcaaattttcatcaataaatcgatgcttcatatctactgtatcaccttcggtaacataaatttgttcatccatccaacgctgttccatcattgcctttcctgtacgccataaacgcatcaaacggattgtacgtagtttcccatgctttaattcacgcccaaatagcactacattgcgcggtaacatgcaacctgcaacattagcaggcagcaaaggtaacttcttctctacctcttctataagttcatcagtaaggtattcgtcagcgtccaaacgcatggtccattccgttttaacaggacaattttccattgcccaaataaattgctgtgcctgattcacatacttgttttgtaacactaccgcaccatgctcacgcgcaatgtcacaagttttatcagttgagtaactatctactacatatacctgttttgctatacgtttaacattatcaatacttcgtgcaatgtgtctttcctcattatatgtgaggattattacagaaaggtctaacatttttatttgaagttattttaacttaatgtctactttatcaaatcaaaaaaaacaccccagtcactttctcgttcttgtggcaaaggtttatatcgtttatgatttatactaaacgctactatattctttgcccaagcttcataatcatacacatcagtataaactactccatcataaccattcaacacttcataagcataatctacatcagccgccaaaaccggaagtccaaaggctgccgcttcaagtaatggcaaaccgactgtctcaatcgaactcggaaaaactaaagctgcagcagatttatagtaactcaataaattatcatgctttataataccttcaaatacgaaatttttgtctacaccattcttaactacttcattgtacattataggagctttttctgcagaacttgttacatgaatttttatatcctccgccaatgccggattttgtttacttaatattcccatggcttttgccaaagtgcaaccattacgatatttagaatcatcaccaacaaatatgaaatgtttcttattatcttcccaattataggttttacactgtgtaacatccaccttctcaacatccggaaaacatacacgaacattttccgtaggaacattaaagtatgatacaaagcgtttcttcacaataggtgtttgtacaacaaactgtgtatttttaacccatgtacgctttactatgcgaggaaaaatatgcttataattaaacagcattctttctgtacatttgagaggattgtaagctcccggatataacggcaacgactgatgaaaataaacaatctgcttacctcccccgatcttcttatatccattattctgaagtgaaaccacaacatcgggctttactcccaattttacaatttcattttgtagcaatttaccttcaaacaaaatccgttttaacttggattgtagaggaaaagatatatatgttactccctctatcgccactttcggcagcacaggattaataaatatccaatacttattttgtcctatatactttggcagatgcgataagaactgcttatatattgttatacctcccccagcttgtaaggttgtggcaattacgaaaatattcataaatattatcctctccagtgcattttaacatatctattatgtatcatatcattaccaccatgcagtataagttttgcgtcattggcatcagcaaactgcaacaggttacgagtccgcaaaccatccgcatacagttggtcaaaataattacctggtatactagaatacatagtgttgtaaccataacgtttacactcatcaagtactaattgtgaaaaataacctattgggaaacatatctcatccactgttttacccagcaattccgtgagctcctttttcgattcacaaagttcgcgtaccaactcctctttagtgaatttagttaaatcactgtggctccaagcatgacactgaaatataaaacctgctttttgaagttcaagaatttcgtctttattaagataccccggttttcctattaagcttattgcaagaaatactgttggacacaaaccattatctataaaaaactgtctggtatcataaatgccacggaatccatcgtcaaagcatatcatcacctctttatcaggattctgtattttcgcttttatgataaatccctcatcatgtatcaccttaatatgttgtgcaaacgtactaagcgaagtacccatatctgtatattttttatcgccgtacacatcgtgataatacactattttactcttcttattatggtgcaatatgctcgaaaagcataacagagttttttttattatttttctcatcgtgtagttttgtttataaaatcttccaaacatttacggtagagcgaataattccagtgattgtgcataaagttatacgcattatcagaatacttcttgtatgtatctatatttgatatttgcctcatggcatccacaagtgactgctcactatatgcatcaaaaacaaagcctgtatcgttaccatctacaagatcgtaatgtgctcccacctcgttactcactaacactggcatacccgctgccatagcctcgttaacaaccaatccccaaggttcgtaagtagaaggtaatatcaacacatgattttgacgataaacattcaatagatcgtcaccatactttggtccatcgaaaaaaacagatccatatgactcatatttctttttaagtacctcaccaaaagccccttttcccacgatatgcagttcactattttcatatttttggtgataagccagaaatgaacgaatcataaagtctatattcttacactctatcaatcgccccacatatacaaaacacattatatctgttggcttctgtttgtacttcttattatcaaaatgtacattatccaccaccatcggcattaacagaattctctcctgggccataccaaacttacgaaacaggtctttatgtgtataattaccaccagcaagaccataggtatgtttgtttccaaacactatgcttaaatatatgcgctttccccatcgtttaaacagtcctaccggttcccgatactgagtatcagagtctattccaatggatttactataccacaaattcaaaacaaacaacatcaaaaacgacaagccagtgtatccgttaaatataatagtatcatacttcttaagtatacgcctcatataacaccattgttgccatttcgataggtctgcaaacacatcctttttaccctcaccccccgtgttttttgcctcgctatcgcccaataaataacagtaatctattcccattggcacatagactttaagatttcggtctactgtataactggctggttcagcaagaaaagcaaaaaccttcatcagcctttatatttttttaaagttttacgcatatgtgaagcagcaatcttaaacagcacataccaattcccccacttggttttagatgccataaagcgatagagattttctacttggggacggaaattttgcatcttataatcatagccaccgcgaccaaaatcaacaacagagctacctatttgagatttttcaacaatatacctcacattattccacaaattgaattgtcctgatttatacaatatcacccatctcatactataagttctctgctcattcacaaatacaaaacctaaagatatcggctcaccattgtcatataggacaggtaattctaccaacccattctcataaagtttacgcataaataacctcattgtatcgtttaaatacgatgacgaacgtaaaccagaatcaatcatcaattgtataattcgatttatcacatgttccggataaggttcattggcaatattaaagattttcatattacattgaaccgatttcttgtcaagcgtaaccaaacgttttcgttctttggcatttaagtgtcgaaactcactaaaaatgctctcagacttaggacagtttaaccatgagtgttctgtttgcgaaaaaacgaaagcattaccttgaaacactttccaatacgccaaaataggagaattggaaactacattatcaagtaacagaaaccttatcaacttatcttcctctacaaatttccagacatcgttcattaaattatatatagctacaacttcttttgatataataatattacaaaagtcggtatgtctatcattaataaactttaggaatccctttccatttatgtaaaaagggaatatagcctgtaattctttatcattagtacggtatattataatataaagtttatcatttggggttgcaaacgtctcccaagcaatccaattatacttaaatgtttggaaaaatgttacatcattagcattatgaaataatgaattccattcaatctctaaagtcttgaacttatcaatagtatctattatttctatcatatttactcttgtgttattttatatttattatccacgattacattagccaaagctattaatatccacacatgcaaaaaagaaaaatcacctgcagccataatatatccctccgcaaaaagatggatacttcgccataccaataaagttatcactaacagcaattgtaatggatacctttttgcattgaacatatactttattattggttttagtgctaatatggcaaagaataatgttcctaatagtccaacagatgacaacataaacaaccaactggtaccaggttcaataccaccattggcacgcacactatcagacgacttcttaaggtcgacactagaaaatcctattcccaaaactgggttcgattcaaactctgcttttctagcattccacatatcatccctactcgaaaactgccctcccattgcattacgcgcctctgttttttcacgcactttttcagtataaggataccacacgggagatgagataaccacaagaaataaagccacaattaaatatttcatgaatttacccacattgcccaaataaaaccataaataaaagaatagtgctacaaacgtagctcccaatgcagcacgagatgcacctaaaaaacaaacaagaacagatgcaacagatgcacccaagaagccccattttttccggaaagttgtatcagggttatttgtctcatcaagaaataacttaaagcaaagtaaagatgatataccaccaatactactcattgtcatactatgattagtaaatccattaaatccggaccatccatgaaataatggaatatgcaccaagtatccaccaaacgaaattaatgtaccgactataatgaccttgtttattaaaccatacaaattccatttaaatttattcaatgaatttccttcatttaatggtccaattgccaaaatcatcaaacaaaaagaaatcaacctatattcagcctgaaatatggatggaatatcattggcaagaatagacaaaacacatgctattataaataataccattgtaacattaatccttacaccattgataatacctattaaaccaataaaagcaaaccatccgtaataagcagcctgaggtataggaagcccaatacatagtgaatttgagaatgcaatgattacagataaaattaaaataatattgctattcatttttgtgttaagtaattcataaatggctgtataagcttatttatatctataggatatttaagtatttgcctttctctggttttaatgtagcgacctatatttcgagcaagtgccttatagtcgtgtggttcaattacccaattatcaaaatcttcttctcgtatatattcagtgataccagaacctttggccgtcataaaaggtactccacaagcataagcctcagtatatacacatccaaatgcgtcccaataagatggaagaacaaacaaatctaaagtattatagaaagcatttagctggcgatgatcaacttcatttttaaattcaaaataattattcaattcttgtctttgcacatactcctcacactctgttctagttacccccgtaccaataaatgtaacttttatgtcttcaaatccttccttaagcaatatttctacagcctttattaatgttatctggtctttaattggccagaaatttgccacacatccaatatgaaaaccggaatgtgatccatttgttgaataaaatttagttttatctaccccattgtataagacataagtatctttaagttttataccatcatactcagcaagatagcgtaatatctccttacttactcccacatgtaaatcaattctgttacacaacttcacgccataacttatacaacgcctcttatgccattgcctatcagcaaaacgtccatcggtaatgctaagtacgtcatatccatgatgttgcagaatcgtttttgtccggggattcttagattttacataatcagcatactttgctaaacttgttacatgagaatgcactacagctatgtcttcatatttaatattgatacgtttcaaagctttgctaaaagaatgtagactgaaataatcccccgcccccggccacgcatttgtcggcaagtcatactgcacaaaacgatgtacattaataccatcgtattcatactcccccactttgtgcatccaggagtcaggcatcatcacaattacccgataacgaccgtcacacattattgcctttacttgatcatacacgtaaggaccacgaaatgactgcgctgaagggaaaaacggcgtaataactaaatatataggtttataatcaattcgcattatcatttcttttatccgccactaataaattcgtacaatagttgcacattttattaaagctataagccaataaagcacttacaattatcaatgccaaaccttgaaagacactatcctttacaatatattttaccaaccaaatatgaatcagatagagttccaaacttatagtcccaaacatcactataacctgtgaatttaccatattcctcattaaatagagtaatgtcatgaaagatattcctaaaggcaattttattcccaattcacataacagaaaccaatgagtattcgataaatccctcataaaagagagttgtttaagcgcaagacaacctatacctagtaagagcaaaaaactattataaaagcacacttttctaaaaggcacgcaatctatcactctcttcctctccgatactataactcccaccaagaaactaaaagcttgttcagcacatagtgatgaaagacacgaaaatgaatagatcgcaaaaagtaaaagcaataataacttgtacttaccgttaagtaacttattactaatataaaaagctatataacaccttaccaaataatcaatataccaaaaagaagaatgtgaacaattgacgatagaaaaatatgcacttccatctaatatagaaccatctatcatcaaccatatcatcctaaatagcacatatggaaaaataacacgcagcacttttttcttccaaaacgattttagcccatttttcttccatgattcattaagtccataaccggataaaaaaagaaacattgctactcctatgccaccgaagggagtgaaccctacaaaattccaacaccctgcaatgtggcaaagcattattatcagtatagcgtaacccctatatactgaagtattagacaatgacaatacgtctttacataatatcaagttatcacaaataaaatatgacggtaatgaagttttcttattatcaacataagaacatagtctcaacactacaaacaatacaaaaaacagtaaaaatgaattcagcacttttatatactttttacaaaagtaattttattaacaatgtgtattatctaaccaaattttctattaccttctcccaatctttaataagcacccgccaatcaaatgattcagccaattttatagcttcgtccgcaagagtattgagtttccaaggactttgctgaagatctttgagtatcacctctatatcatctattttatcaaccacataaccatttttccctgtggtaatccattccgaggccccataatctgaataaacaatggacggtacccccatagctgccgtttcaagtgttacttttggaaagccttcagaacgagaaggaaaaatgtgcaaatcaatacctttgagaaactccgatatttgagtatggtccattaaaccatgatagacacagttcctcagtcctttggatccaatttcctcaactacatcataaccaataccaccaccaactatatgaaaagtgagctccggaaacttctctgctattgcatagaaatcatcaatacccttatagcgaatattattacctataaacgctatattatgtaacttatctctaggtctactttgaggttgaaatagctctgtgtcaatacctaaatacagcactccgtcagaattaatccccagcaattccttattcttctcagacatgtatttagtaatagcataggtcttcgttgtaaagctatagacgtttacaatagcttccttagagccataagatacaatagatttatctagatttgtacctgatatgaccccctcaacagtggtgaacgacttcttaccaaaccacttcagacacctactacagaactcccatatttcaccttttggcaaatatgccacgtcacaccacataatacctctcaaatatgtaagataacgaaaataacattgaggacgcaaacacttaaacaactttatgccaaccaaatcactatccacactcaaattaccatttggaaaaagcattgccgcacactcaatcttccccttattaagatatttcgccaaagcacgacaattcaaattttgcgcattagtgtaattaacgtatcctccaaggaacacttttatctttttagtcttcatttcctgtgagtatttttaatacctgctgtctgttaaacgaagcgtatgcactatcataccactcctttacaaccttacaatcttcttcatagacctgcttgtccgctatccgtgttcccacctctaataaactcatactttcataaagaggatagcgatattgttcataaaagattgttgtaccatgagacaacatctcatcaaccaagaaaaaagtaggaacaccaaaatttgcatattcgaaactagtagtagaactccatgtaatgtggaataaagctaaaggaaccaactctattaatgtttttgtggtaaactctacaaacggatattttgtagtgacatcactcaaatctacctcattattaaaacgaggatggtgcttcaacaacaccttataaccccatttatccaattgctccaagcactcatacaacatcttaggcgaatgcttataccacatttcaccatctgatgttatttgtaaagatattataacacactctcgtttttgatatacaatatcaatcacagaatttcgtattggataaccaaccacttttatcctcttatataattcatctttgaacaaagccccatcaaaagcgcgtcgataaagcgttccccataacatgacacgtctattggactttatatatgaaggtaccaaatagtctttttctacgaaatatcccggatgtccattaaatatgattccatgttggtaatcgtacactattccgtttggatttaactcagctaaaacatcaatcatagagtttgagattgtaatatacctctttgctctaaacttatgaaaggtaattgcatcccaaaaatgagctatattcgcatctatctctacaggtgcttttcctttatgaccaacacgcatcagcttacgcattatcgtcacaatccaaaagaaagcatctgctttcatacactgaggatcgcgaggattagaagtaccactatcaggttcttccattataagatattttactccattctctttgcaaatctcaactatcgaatcaaaataaggattcgtacctttagttgaacgattaaaatgttgcggataatatagaattacatctatatttttgccaaacaaaatgtgcttaatcaattgaacaaaagaatataagatatcgaaaaacatcatacattatttatttttccaataatctctaacgtgaatcattaaaaatctaaagtttttgtcgaaacacataaagaatatggtaaggagaaataaaattaaacatccaataataaaactatacataaaagcaccaatcattgaagttgaattaaccaaagaactaattcctccttccacatacaaaacaccacatattgttatacaaaggataacaacatattttaaaaacacaggtagatattctttaattatggacatttggaaaccatttttaaataaataatatggttgccaacaaatttttataagcagatctgctattgtaaaagcaaataagataccaggcaatccaaaatacttacctaatattaatgatagagacatgctaataaacacctctgctattggagcccacacatcttgaaacaatccataagcatctttaaaatttgtcacagtaagacgcgcttgaagtatgaaaatatgaatagacatcagtatgagaactaattgaggcataatatattcttcacctaaccatacaagaattaactttgggacagcaaaataaagcgttatactgcacagtcctgcaacaaaatatcttaaactcataagttcaaaaaatactttaagtaatttttctttattaccctctgctattaaatttcctatactagctcccataccaataaatagaccatcaaaaaaggctgttattttagacatcaacatattataattgccatatattgcaaccatagacaatgaagaaaaaatacttataaaaatgtttattgacccgttaaatattaaatgagataacttaaatgcaaaaacttgctttgtccttacccacaagtctttgtagtctttaaattttgctcttcccgatttaattgaagtatttagccatggataacgtttcttcactgaaaaatgaagaatgatcgagtttactgttcccgcaacaatctccaaacatatccaccaaatataacaaaatggcagtaatgatgacatcatctgtaacaccgtcttaacagcagtaataatgttatagcgatacattattacatagttgttctgcgatgcagaaagaataatctgcttataattaacaaaataactaagcagagcaccatataccattgagaagaacatgaaatacaccaaccataatggaatatttatatccttaaacattaacgggaaaaagcatgaaaatataaaactgacactacctattaatatacctatacgggaataaaggaatccatacaccgatataatatcacttattttctctctctcatcattaaacaaaggcttataaagagtaacaccaacagcagtgccaatccctagttctgtgatattcatcaaattgagtatatcgcctaacgttgatgacaatcccaagaactctgtgccaagattatctaaaaaaactttacgagagaagaaagccaaaactgccgtgataacataaaatatcacgttcactttggcattttttatagacttctgtattctgcttgtcattgattaatataactaatttttaattactcactatagtttgtttaattaattataccactgtaaacctataacgcatcaagtaatctatacttcttatctctataccaacaaatattgtttttaatcaacttcgttagagttcctacatatatagcattttcttcttcgagcactttggtaaccaatgatgcattgccaataatagatcccaaaagcatcactatacctttcattatttttgcattagcaccaatccaaacatgattactaatagaaatagaacctcccttatttaatcgcttaccattctgaaatatggcatgagtatcccctgtaatcaatttaatattctttacaaacatataaccttcacctactgtgatatcttttccttctgtaacccaaaattcagccccattgattgtagttttgtttcctatcgtcacactactcccatcatccattatcatgatattcaaattgctaacacaacacagaatataaatttctgatttactgtaatttacattaataatcgtatcctcaatcgtttggattgattctatatatattttattgctacttcctttgattcttatctttactctccgaagattcgctccatttagcctaacatcattatctccattaattctgtaaatacaaggataaagagtacaagcgattctttagaggtttaagaatatttttcattaatgctataaaactcatttgcattcttatttataaactataatatcctcatttcgaaaacttcataataattaaataagtcttcctattttagtacttgcttattttccaacaatattttagctaattggtagtcaatattatcatcaatatctatcgaatctattttattcatacaatatgcaatagtacgagaaccaaaaaaatgctttctctctaaatattcctttggtttagcaataaagatagctccattgggagaataatctttgaagttttggcgtcgataattagcgaaatccgtatcaaaatattttagactttcatcctcatcaatagggttcacaagcactcttgcatattcagagtccttcatagatacaagaaaatcaaactcttgataccttgattcgaacttttttatagcctcttcaatatgcgcagatgtacgaagaggagatgttggctggagaagtacaaaataatcaatagtttcagttaatctatttttaagtatgtctttcaaaaccatatatgttgtggctttatcatcagagagcctttcacctctcatcattgtctctgcgccatattggcgagagatgtctgcgtagtgttctgaatcagtagaaacaatgacatgctcaaataatccagtacctaatgcagcttctatcgaatacgccataagaggcttcccacatagctctatgatattcttatctttaagtcccttagaaccagaacgtgcaggaattattgctatccgtttcatatatttttaaaacttaatatcataaaattctttatactgttgtttactactacggaggatattcatagtagtttgataatacaactctgctgaatttttcttatagtaaggggtatctattattggggtatctttatgttcaataacatattgaatagccccatttatagcagttgcattacagcgaacatccaaaatactactactcttaacacgtcccgtttgacgatcacctatatttatagtataactgccaagagaaggaacttcaatgataccactacttgaatttcctataagagctattgactgttgaaccgcatagtgataactatccggatggagattagtataaaaaaagcaattaatatgagcattacaaaactccttaacccgacaagttatcagatctgcatatgtgtctgcatttgaacctataaaaatgaatttgtaaatctttatgtatgactctatagcttcaagaatttcttcaacttgctctaatggtgatacgctattaagagtctctggatggaaaagaacaacaaacgaattatataaaccatgtagttctgctaatacatttttcatattgatatgcatgcagttttctgctcccaaagctcctaaataataaacgttctctggcttctcacccaattgaattacacgattacgatattcttctgtactagtaatatgccatgtagccatcttagttatagagtgacgaataaactcatcataattggcaactgttaattctcctccatgaagatgtaaaataggaatcctatgcattgctgcagcaatagatacactatatatctcatagcgatcacctaaaataataagaagatcatatttatgttcagaaaaaaatagactgaaatcatcaagagttcgagccatgatatgacatgtatcatgaagagaacccatcttttgtggaattacatttctataatcaatacgaaagccatcttgttctataacattaactgcactaccaaattgagatatcaaaagagctcctgtagtaagaacacaaaaatccacttctgtatcagcattcaattttgcaatatagttacgtacaattccataatcagcccgtgatccagtagcaaaggcaactctatatttattcatatattatttcaattaattttacaaaatcaaaagaatatttactataactctatcaattcatcctcttcaaaatcacgaacagcaacagtaccaagaacattataccattccatgggactaacaccatttccaggacgtttacaagtaagattttgttctgtaagaagttcgcctttttttattgcagtacgagcaacgatcgacttacgagctatatttatattacgtctctccgattcagtaactttttttcccccttcaccagcaataatttcaatacgtcgaacattttgacatagctccttgagttcatttggtgttgcagacgctttatgatcaggacctggaaggttcttgtcaagtgtaaaatgcttttcaattagcacaatatctttcatacaagctccaattgccgctacgtaaccaacagaatgatcagagaaaccaattgctatacctgggaattctttatggagtgtatcaatagcactaagatttacatctttatccggtgtagggtactctgtattacaatgaaggatgattagattttcaggtttctcatatttgcaaatgatatctactgcctgatgaatttcttctactgtacacataccagttgaaaggattatcttcttacccgtaatcttaaacttagcaatgcgctctaaaaaaggaagattagtcacttctccagaaggaattttccaaataacttgtccctttttctccagaaagtcaatagaatccatatcaaatggagtagagaaagtatcaagaccgagactaatagcataatcacgaagcttaataaattcatcatatggaagttcaagtttacgtgtcatctcaagttggttctcttcattaccggttgttaccttttgatagtcggccttaggggcataacgggagataagttccgctgccttaaatgtctggaatttaacagcatccacaccacaagccttagcttcatcaaccattctttttgcaagttcaaaatcaccacaatgattacaaccgatttctgcaattatatatatatgtttcatcttcctattctcaattgtatttatgatttgttgatcgtatttctttggctggtacgcctacaactgttgtatgaggtttcacatctttgacaaccactgcccctgaacctactagtgcccaacttccaatagtcagttgaccattaataacagtcccactccctacaaaacttccctcttcgcaaataacatctccattaagagttgcgttcgttgaaacatttacatgatccattacatggcaaccatgttcaataagggcacgagtattaataacacagttatcacctaccgaactaccatgattgagaatagcaagtttgccaataaagcaaccttccccaatagatgctgcatgagatacaagtgcagacttgtcaattacattaataagtgaaagattacgttttttgagtttatcgaaccaaactttacgcttagcattatttccaatagcgacaaagtaaacatactcattaatattctcaatacaatctatactattcccaagaaccggaaatccctgatgatcaattcctcttggtttcacatcatcaatgtatcccatcattctgaaattcatatgatcaagagaatcaagaacagactttgcatatccgcccgctcccactattataagatttttcatacattttttttagtattcaaattagtccccctttttaggaactttataagtgactataaactgaaatatattaagaataaaaaacgttatcaactattggatgttagcaatcagatttgaatatgtttcagttttgtcattccccctctgtcttccctttactcatgctatgctcctgactccaaaatgattcttgttggctaactagagttttaaactaacaatccactaacaaaatcaattattcatccaaacttttcttcaaacggttgaccataggtttaaaagtccaataagttaatcctgtagatataggaactccaattaatggtattactttagaaactcctctcgcaaatgtatcttttgttaattttattccaatccattttgctacttgtttagaggtattataaatagcatatctagttaatgtttgtctagggagcctaatcgccacttgctcagcaaaagccttagaaattttcatagtttccaatgccacttaagaccccatcattcctccagtaaacagtgttaaaatatacgctgcctcatcattcaacttcccttcttcaccctgcaaatcaggccaaccataaagataaagcagtttttacatcaacgcaaagatatgtccatagaactgagcaatatccgcaggaatagtcccattcaaaacccatccaccgggtaatcctgctgaagcagatgtaccacaaaccaacatcaaatgatactttatacatccgctagcaattcttgatatttgtttttaatgcaatactttcaatggagattccttaatgccaatatccaacatatcatgattgcaataaagagctaattctttacgtaaaaaagactccctatctactttcacaaaaggaagagctattgccctcgatagtattttattccacaattcactttcgtttcccatatcatttcatttttaaatattatgttgagaaatcacagtttctgattttcctacttttttctccacaccattttgtttaccacccccgtataactctgaataatcttcaccaccttgttggcaacatcctcaacatacacaggtacaggtatcccgttatccccttcagcattcatagcaatggcagtatcaacagcctgaagaagggatttttcatcaataccggcaaggataaatcctgccttgtccaacgattcgggacgctcggtactggtacggatacagactgccgggaaaggatgtcccacactggtaaagaagctgctttcctcaggcagagtgcctgaatcactgattacagcggctgcattcatttgcagacaattgtaatcatggaaaccgagaggttcgtgacgaattacacgcttatccaattggaaaccactcttctctattcggttacgtgagcgaggatgacaactgtaaagaataggcatatcgtacctctcagctatggcattgatagcattaaacagggaaaggaaattctcttctgtgtcaatattctcctcgcgatgagcactaagtaggatatactttcccttctccaaaccaagacgacggtgaatgtcgctagcctctatatcagcaagattggcatgcaatacctcagccatgggactaccggtcacataagtacgttctttagggagaccgcattcgtgaaggtatctccttgcgtgctcgctatatgccagatttacgtcactgataatatcaacaatgcgccggttggtctcctcaggcaggcactcatctttacaacggtttcctgcctccatatggaaaatagggatgtgcaaacgctttgccgcaatggcactcaagcaagagttggtatcacctaatatgagcaatgcatcaggcttgattgcattcattaatttgtaggagcagttgatgatattgccgaccgttgagccgaggtcatcacccacagcatccatataaacctccggagcggctaatttcaaatccttgaaaaataccccgttgagattgtaatcatagttctgaccggtatgcgccaatactgtatcaaaatacttgcgacacttggtaataactgccgcaagacgaataatctcaggccttgtacctactatgataagaagtttcagtttgccgttatctgcaaactttacgtcgctataatctgtcttaatatctgccataattgtatttattctacgggtaagaaataagtgtccggacaattgggatcaaatgcctcattcgcccacatgagggttaccaaatcgcaagtatcagagaggtttatgatattgtgagtatagccgggcaacatgtgtacagcctctatcttatcaccgctaacctcaaaattcagtacttcatccgtatctatcctacgttgctgaatgagagccttacccgacacaacaataaagaactcccatttcgtatgatgccaatgctgccccttggtaacccctggcttacttatattcacactaaactgaccgcaatttaccgtcttcagcagttctgtgaaactgccgcgctcatctacgttcatcttcaacggaaagacagccttctccttgggcaaatagctaagaaaagtactgtaaagcttcttggcgaatgaattttccggtatctcgggcattagcaatgtttggggctgtgctttaaaagattcaagcaacgaaactatttcacccaaagttgctttatgggtaacaggtacggcgcaataacggccattggcggtaagaacagtcttcacaccgtcaaattcacagtgatgttcattaccctgcaaggcacttatcatttcttttacaagatcatcgatataaagaagttcaagttccacacaggaatcattcacctgtatgtcaaggttgttggcaatgttgttacagaatgtggcaaccgcgctgttataatttggacgacaccatttgccgaaaagattcggaaaacgatataccaatactttagcacctgtttctctaccgtactcaaagaacagctcctcacccgctaacttgctcttgccgtaatcgctcgtaccataacggccgatcagggttgcctgaatactacttgacagcatcacggggcaagtgttcttatgagctttcaaacagtcgagcaatattgatgcaaagccgaagttgccgctcataaactcgctattctctttgggacggtttacacctgccaagttgaagacgaagtcacagtcagaacagtaaacatccaattcctccggattactgtctatatcatattcataaacagcatcaataacaaggccgccataacagcgggcctttccttcctttatattgttgagctcggcacaaagattttttcctacgaaacctttggcgcctgttacaagtatcttcattattcggaacggatttcttttgatttggcacgctctatcaaaccgagatcctcctgaataaagcgcaaacgcataagctgttccttcatcccctcaacatctagacgtgcggtgttgtgagagtgataatcctcaattgctgaaaccttctcattaccttccacaaagaacttgtcatagttgaggtcacgactgtcgcaaggaatacggtagtagttgccgcaatcaatagcttttgccatttcttcacgagtgacaagagtctcataaagtttttcaccgtgacgggtaccgataaccttgacttcggtttcaccgtatttgggatcaatcttagaataaatctgcttcaaggcttcagcaagcacatccaaggtcgcggcaggagctttctgtacgaagagatcaccattgtgaccatgggtaaaggcatagataacaagatccaccgcatcatccaatgtcatcatgaaacgggtcatattaggatctgtaatagtaatggatttgcctaacatgatctgctccacccacaaaggaataaccgaaccacgtgatgccattacattaccataacgggtacaacagatagttgtctgcgcaccttcaccaagttcacgccctttcgcaatagccaccttttccatcagagccttagaaatacccatggcattgatgggataggcagccttgtcagtagaaagaacaaccacattcttcacacgatgatcaatagctgaaagcaatacattgcttgtgcccatcacattagtcatggccgcttccatagggaaaaactcacaggaaggtacctgcttcaaagcagcagccgcaaacacataatccactccacgcatcgcaacatccacagattcacggttacgaacattaccgatataaaacttcacctttgacgcttgttcaggatactgtgcctgaagatgatgacgcatatcatcctgcttcttttcatcccgtgaaaatatacggatttccttgatatcacttgtgagaaaacgacggagtacggcattaccgaatgaacctgtaccgcctgtgatcaacaggactttgtctttaaacactgacatatctttgatattattattgattaattagccttgtattttatcttatactccccataaccataatgtttaccatagccataatacttgccatatttgccataaccatagtaataaccatatttcttcttctgaagatccaagccattgataacaatacagagattaggcagtttattattctcggcaagttcattgatcagggtaaactccgttttacgggtgtaatcagcacggcatacataaacagataagtccgctacacgtcctataagcaaagtatcagttaccatacccacaggtgccgtatccaatatcacgtaatcaaaattcttcctcaagatttcaacagctttctccaaaccgtcacgagccaacaactctgttggattagggggaactgttccacctggaagaatatataaattcttgtttatatcagaatgatgcaccaaatccatcagatttacagtggaattggtaaggaattgagtgataccatactctttcttaggtaggttgaaaactttgttcaatccgggcttacgaatgtcaaggcctactatcacgacttttttccctaacaaagaaaggctgatagccagattggcggatataaaagattttccttcaccactaactgtagaagttaccaaaattacattcttaccattttcaagcataaactgaagattggtacggacattacggaaggtttcgctcatcaaattgttctgattctcaaatacggcaatagctcccatcttttcatctgccaatggaatatcaccaacaacagggagcgaagtcaatttttcaacatcagcacgaccttctatcttaaatttggtcagaccgatcaaataaataacacctaccggaatacctattccaaataccaaagccgccaaataaatcgtcatccgtttcggggaaatcggagtactgtccgcctgtgcctcgtcaataatcttggcattattggctatggcagccaagacaatggcattctcctcacgcttctgaagtagcatcagatacaaaccggacttgatttcttgctgacgggcaatactcacaaactgacgttcctgagtcggagcatcactgatacgacgggaataacgactcgcttcacgaatcaaatcagctttcgttatttcaagtcctttcaacgtggcatccagagtggtctgtatattactgcgcatcgcacggatactggtagtaagattcacaattgccggattgctttccgttgatgtacgtaacaggcgtttacgttcggccaccatctcattataccggtcaatcgcccccgctaccccggcatcctgcaaaccgacattcgcaggcagcacttcgtattcactaccctgcaaatattttttcaaatccattacaagattaatctgtgtctgattttccacccgcttcttttcatattcggcattaccagttaaggcaatctgagcctcacttgttaaatcagtgatacccgcactacgcttgaaattctccagatcgcgttccgtgctacccaattcttttgagatgatatcaatacgctcatcaatgaactcgcccgttctctgggctacctcattcttgtcattgttagcattgatattatacatctcaagcagtttgtctatatagtccttgccacgctgggtattagaattcttaagtgaaacggtcacgacggaagtcgccttcgaggtaggggttatcaacagggaaccggcataacctttcgctacagcaaaaggcctgttaatataagccgtaatatgacgttctgttgttacactttccggacgaagtgatgacaaagtatcattgttcgcaaaaaaagcaaccgtaccttcatcggtaggaaatacggcaggcaatttctcaagatgtttccggtactccttttttcccaccttgacctgcacatccattgcaccggcaggttgcagaagcatatctatctccattgtctgcggaagcctgtccgcttcctgaggggtcagactgaccaaaaccggagaagtacgatacaattccttgtttggaaacttatcttcgtccatataggtcacaaacaagcctaaagaactgactacctcccttgccaatgttctggattttagcacttcaatttcattctctatattacttgatgaagagacaaaaccgtttagccccatcttttccagttcggaagacatattcgcaccgccacccttcttttcatccttaatcagaacagtggcagaaatattatatacaggtgttgtcagacgtagatatccccatgctaaagcaacacaaactattaccgaaactacgaaccatggccaatgaatcagatagcggaaaaggatttcctgaatattgatctgttcttcggattgtacccccgttttttcttttctttcctcaaccatacgatgttattatctgaagattgttactaataaacttgccaatgaaattaaaatagaagtagccgaaaaccatatacttgtactattactgatatccgaattgcgagcctttgccttattcggagtcacataaacaatatcattctgctgcaaccaatagtaaggagaaagaagagtttcagccttattaagatccagtgttatgatttgttgtttaccattggcatcttcacgaatcaactttacattgtcacggattccataaatggtcatatcacctgccatggccaaagcttccaataaattcactttctcattgctgatagtaaatgtaccgggactagcgacttctcctaatacggagattttgtaattgaccatgcgtgcagtaacaatcggagtttcttttatgtagggtttcaacttttccactatcatttgctctacctcctttttggtcagtcccccgactttcaatgtccccaatacaggaaaattgatattcccctcgttatccaccagataagtctgttgggaggattgggaagcgccctgtgaatttccggcagtcaaaccagcagaaccagtcattccgaggttgaaaggagccgccaattcagggttcgtacatgataccatgatagtaagttgatccttaggcattattctggcatcatacagggtttcctgttgggtaacctgtcccacaatttcagaatcctgcaggtagggaactttcttgtatgactggcaggaagcaagcaaaaagagtgcaaacaagcagggaagtatcccaccgacttttttctgtatacttgtagcaatgcaaaatgaattgttcataatatattctagtttattattctttatccaacacctcaaacctcggagaattcttcgatttgaactcgggcaccaccttcttcatcaaccggacggtatccatgatcttgacggcacgggacaacctctcgaactcagaataagtgtcaaggatatcggaatattcataccggcgaaccttagcgatcatgatctttttattttcagtcggaatcgtattctccttatcgctcaggacctcttcgtaaagcttctcaccgggacgtaaacccgtgaactcgatctttatgtcttcaccgggacgatagccagccaattcaatcatacgggtggccagatcgacgatcttgactgccttgcccatctcaaagacaaagatctcattgccctcccccatagtggcggcctccatcaccagacggcaggcctcgggaatcgtcataaagaaacggatgatatcaggatgggtgacggtgaccggaccgccattctctatctgttccttgaaacggggaatgacggaaccgttactgcccaatacatttccgaaacgcgttgtgatgaatttggtacgcccttgcactttcccctcacggatggcacaacccagactctgcacgtagatctcggcaaggcgcttggagcagcccatcacattcgttgggttaacagccttgtcagtagaaaccattatcatcttctccgcaccgtattcaacggccatgtccgcaacctggcgggagccggtgacattcaccaaaaccgcctcacaggggttttcctccatcaaaggaacatgcttgtaggcggcggcgtggaagaccacctggggatggtaattttcgaataccatacgcacgcgctctttaacacggacgtcaccgatgacaggaatgaaatctatatcgggataattcttctcgaattcaagacgcacattatgcaaaggggtctcagcggaatcaaacatgacaagtttacggatgcccagaccgacaagctggcggcaaagttcgctgcctatgctgcctgctgcaccggtcaccaaaacgactttaccacggaattccgcagccacctggcgaaggttgatattgatttccgcacggcccaaaaggtcctcgatcttgatgggacggacccactggtggaagttaccgtcagaatcggcctcactgatcgtcggggctatcagggtcttgagatcattgctcttgcagtattccaaaagacggttttcctcaagacgggtatcctcataacgggaaaacaaaatacctttaatgccacgcttacggatgatgtaatccacatcggaatcgttttcaaaataataaatgggaagatcggccaaacggcggcggctgttgttcctgccataaacataaaagcctgccaccttgtaatgggaactgtccctgagacgaagcttcagcgccacactctcctcgtcggtgccatagataaggatacgggtgttcttcttgttcacccagtccagcaatagatcgtacgtgatgatgagtgaaacacgaaagactgtcagcgcaaccagggtcagaagaccgtcgagaagaaggcaggaaaaacggtatttatcgaacgcggacgtttcggggataacccagaaagaaacggcaagcaggcagacagacttgaacaatacggcacacatgacacgccagagctcacgggcctgggaaaaacggatcgtgttacgatacgtgtggaacaacaaagagccgacaacactacccagcaaagaaacgagaacaaactgacaaaaaacccagtcactcacaggtatatgtgccatataatgaatgacagcataagcgatcaatgaacatactactgatattgtcgtgtcaatacccaaaataatccaatagctcaaatagttcttacgagcgtattgagctatcccccttaatgtcttttccattatagtataaacgataaattgtgtatcagagatacaaagaaatataatcagatactaaaatcaagatttcaccgattctacataaccgataggcatatccacacatgcacagcctaacagattcagtcgcacggcaatcttagtcttaccatctacattgaccagttcacccaccagtccggtcagaggtcccttgatgacacgtactttttcaccacgcgccaaaggggagctgttcatgcaaacagcttcttcggaataatcaagcataaaacggaaacgagccatctgctcatcgggaatcactgccggtgtgctctcaccccgcatcaccatgtagcgactaactgtagaaaaactaaggacttccatacgctctttcggatcaacatggacaaataccatcataggaagaagaacggcctctacttttttacgccggtcgctccattgatgaatctcctgttggacaggaacaaaattttcaatccccattttgtccaaacgctcggcaactttcttctcatgatgcatacgcaccatagctacataccagcgtttagagtgtgctacgccttcccctgtcccattactaggcccagcatttactgatttttggcttgttaaaatcatgtttttttaccccatatacatccgttactttttaggtaacggatgtaaaatttgttgcaaagatagccaaaaacataaatagcaaacaagcaattctacattttttttcgttttatttaaattttagtataagaaaatcccggagcatgaaaagaactcattttcatgccctatactttttattgtccgattttaaattcattttgctgaacatcaagcaaatttccggttggcccctccttatacttgtattctttccgttttcgttatagagtatgttctgatgcattttatccgttacctaaaaagtaatggatatagtttatcactgattaacagttgattatctttaattatcctttcacattacaatttctgatgtaagataaatttcctttattcacttctgtcctttcttccagtccgaagcctttcaaataagtctgtgtggtttttatggatttatgtcccaacgcctcgctaatcatttcgatggacactccccgatacttggcaatagtagcccacgaatggcgtaatgtataagaggtgaccggagatttcagatgcaacgccctcgccagctccttcaggctgttgttaaaccagcgaagggcagactgatattcccggtaagccttttcatccttccgtgacttatcaccacaaagaatatcaagcaaataatccggacaaccgggttgggacttccgaacgctccgaagtcggtcgatcttcaccatagcactatccaacacttctacactcatcggcgttttcgtcttgatacgattatagcgaagtatattattttcaagagccgatttttccaaatgtgccagatcggcaaacgacattccacaaagttggaacagcagggaagcaatgtcctgaatgcgacgcaaacgttccgatcggggatcgtcaaacaaaagcctatgcagttcagcagcagtcaaagccctcttctgacaaacatcgattcccgtataagcctcatgaaacaaccgcggcacaaaaggggcattacccgcttccaccccacgattgtaaatgctacgaagcatacgcatatacgtagaaatcgtattaagcttcaatccattctcgtaaagatactgcccgtaaagccgcaggctctcacgggtgatttgcctgaacgacacattacacgtaccacaaaacacactgaaagaaaaaagagcattcttatagacatgcgctgtagaatatctgccttcttcacgtaaacgatcgatgtagagctcgccacaccgactaaaaccttttttgttcgtcatttgcaccattagttatttgattattataccattattggcaagcaacaaaagaacgaatcttttcgaagatagatcgcactctacagagaaaaaagatataatgtattttaatacattctttatttattatatatattagttgccggatggggtgccggaacgcatttcgggtatcttccgtatcccccatcaatagggcatttcaggaggtatgaaggggtgccgcgtggggtgccgctcaaaagtgcggtcgattcaatataaacgaccgtatattttgtaccaaacgaccgcccgtttacactcgtcagaccgttcgatcggttcaaaacgagcggtcgtattaatcaaaagatacgctcgtttcatccaacaggaacggctgaaacaaaaatcatccggctgaacctaaaaaaaacgaaataattctgtgcttctcacaaattcttcgtacctttacactccggtaaaacaagttctatccacataaaagataacaaaatggaaaacagaagtttagtaaccattgccgaacattctaaagaaaaaatcctctatatgctcgaaatggcgaagcagtttgaaatgaatcccaaccgccggttattgcaaggaaaggtagtagcaaccttgttcttcgaaccttccacacgtacccgcctgagttttgaaacagccgccaaccgtctcggtgcacgtgttatcggattttccgacccgaaagcgaccagttcttccaaaggggagacactaaaagacacgattatgatggtgagcaattatgcggacattatcgtcatgcgccactatctcgaaggggccgcacggtatgccagcgaggtagctccggtgcctatcgtcaatgcaggagacggtgccaaccaacatccgtcacaaaccatgctcgacctctattccatctacaaaacacagggaacactggaaaacttgaatatttatctggtaggagatttgaagtacggacgtaccgtgcactcgctgctgatggccatgcgccacttcaaccctactttccattttatcgctcccgaagagttgaaaatgccggaagagtacaagctctattgcaagactcaccagataaagtatgttgagcacacagatttcaccgaagagattatcgctgatgcggacattctgtacatgacccgcgtgcaacgggagcgtttcaccgatctgatggaatacgaacgtgtaaagaacgtatatatcctgcgcaacaaaatgctggagaacacccgtcccaatctgcgtatcctgcatccgctgccccgtgtcaacgagattgcgtatgatgtggatgacaacccgaaagcatactatttccaacaggcgcaaaatggtctgtatgcccgcgaagcaattctttgcgatgtgttaggtatcacattagatgatgttaaaaacgatattttattatgagcgaaaataaacaagcattgcaagtagctgccctgaaaaacgggacagtgattgaccatatcccttccgaaaagctctttaccgtagtacaactgctcggagtggagcaaatgaccagcaatatcacgatcggattcaacctcgacagtaagaagctgggtaaaaaaggtatcattaagattgcagacaagtttttctgcgacgaggaaataaaccgtatatcggtggtggctccgcacgtcaagctgaatattatccgcgattatgaggtggtggaaaagagggaagtgaaaatgccggatgagcttcatggaatcgtaaaatgcgccaatccgaaatgtatcacgaacaatgaaccgatggctacgttattccatgtgatagacaaagataactgtatcgtaaaatgtcattattgcgaaaaagaacaaaagcgtgaagagatcagtatcctatgaaacaagattggaaacctggaacgatgatttatccgctaccggctgtattggtcagttgcggaaaagaagaaagtgaatataatattatcacagtggcatggacgggcacgatttgcaccaacccgcccatgtgctatatatccgtacgtccggaacgatactcccatgagattattaaaaagaacatggagttcgttatcaatctgacaacaaaagacatggctttcgccacagactggtgcggagtacgttcggggcgcaattatcacaaattcgaagaaatgaagctgactccgggacattgcactgtggtcagcgctcccttgattgaagagtcgcctctctgcattgaatgccgtgtgaaagaaatcgtctctctaggctcgcatgatatgtttattgcagacgtggtgaatgttcgggcagacgagcggaatctgaatccggaaaccggaaaacttgagttggcggaaaccaacccattggtatatgtacacggcggatattatgagcttggtgagaaaatcggaaaatttggttggagtgtagagaaaaagaaaaactgaccccagataatacgaccatgaatatgctgcgtacaattttccttttaggtttgctgaccgtaggctgtatggctttcggtcagaactacaacgcagagaaggtggaccgtcccaataccaagaaaataaactttggtattaaggccggattcaactcttccatgttcctggtgtccaaactaaaaatcaaggatgtgactatcgatgaggtgcagaataattataaaatcggttatttcggcgccctcttcatgcgcatcaacatgaagaaacatttcatccagccggaagtatcctataatgtgaccaaatgtgagatcagcttcgataagctgggctcacagcaccctgctatcgaaccggattatgcgtccgtacaatctgtattgcacagtatcgacttccctattctatacggttataatgttgtgaaaaaaggaccttacgggatgtctattttcgtagggcccaaactccgttatttatgggggaaacataatgaaatcactttccgcaacttcgaccagaaagggattcacgaagaactttatccgttcaatgccagtgtggtgatcggtgtaggggtcaatatttcgcgcatcttctttgatttccgttatgagcaaggagtgggaaacatatccaagtcgattgtttatgacaatatcaattccgatggcagcacgggcgtgagcaacattactttccatcgtcgcgacagcgcgttaagtttttcgcttggcttcatcctttaagaataaaatatcattaaatcccactttttactaacatttttcttgtacttccttcattctttatttattttcattaactttgtgcgcttaaaaataggtatctcgaattaaaaatttaatcttactttataaaagaatgaaaagagacgacttaattttcgatattatcgaaaaagagcatcaacgtcagctaaaaggtattgagctgattgcatcagaaaacttcgtgagcgaccaggtaatgcaggcaatgggttcttgcctgaccaacaagtacgcagaaggttatccgggcaaacgctattacggaggctgtgaagtagtagaccagagcgagcaaatcgctatcgaccgcttgaaagagattttcggtgctgaatgggcaaacgtacagccgcactccggagcacaggccaatgcagcagttttcctggctgtactgaatccgggcgacaaattcatgggactgaacttagctcacggcggacatctctctcatggttcattggtgaatacttccggtatcatttatactccttgcgaatacaatctgaataaagaaacaggacgggtggactacgaccagatggaagaagtcgctttacgtgagaaaccgaaaatgattatcggtggcggttccgcttactctcgcgaatgggactacaagcgtatgcgcgaaatcgctgacaaagtaggcgctatcctgatgatcgatatggcacaccctgccggtctgattgctgccggaatacttgaaaatccggttaaatatgcacacattgtcacttcgactacacataagacacttcgcggacctcgcggcggtgttatcatgatgggtaaagatttccctaacccatggggtaagaaaactccgaagggagaaatcaagatgatgtctcaattgctggattctgccgttttcccgggtattcagggcggaccattggaacacgttattgctgccaaagcggtagctttcggtgaaatcctacaacctgagttcaaggaatatgcaaaacaggtacagaagaacgctgccgtacttgcacaggctttgatcgatcgtggctttacaattgtttccggcggtacggacaatcactccatgctggtagacctgcgcagcaaatatcctgatttgacaggtaaagtagcggaaaaggcattggtttctgccgacattaccgttaacaagaacatggttccgttcgacagccgttccgcattccagacttccggtatccgtttgggtactcctgctatcacgactcgtggtgctaaagaagacttaatgcttgaaattgctgaaatgatcgagactgttttgtctaacgtagaaaatgaagaggtgatcgcacaagtccgcgcacgtgtgaacgaaacgatgaagaaatatcctcttttcgcatactaaatcagaacttttcataatataatattcagagtttgtcctttatgaaagggcaaactctttttttatttattgacgttcttctccgaaccatccacacccaaatttgtttttcttttctccccctctatatacaatcatccccgtctttccgtactttcacactaactaagtccttctatttctccatcgacaatatcaatatgcaatgcctgcggttctttgggcagtcccggcatacgaaggatttctccggcaatggctacaatcatttcagctccgttattgataactatatctttgatgtggaactcgaagttattcaccgcaccgtatattttcggatcggcggagaacgaatactgagtctttgcaatacaaaccggataatgagtgattcccatcttctcaatcagtttgatacggttgcgtgcgatactgctgtacgtgatcacactggccccataaatatgggtagccactttttcgatcttctgctgtatactgtcttcctccttatacgtaaaagtcaatggctcggaaggattgttttcaatcatatccaccaccagacgcgccatatccactgctccctctcctccttcactgaacgcattgttgatggcaaagcccactcctaactgttcacagtgctcacgcagcagttccatctcttcttccgtgtcggatgcgaacttattgaaagctacgacaaccgtctgaccgaacgagcgaagattgcgtacatgtttatccaaattgcgcaagccttctttcagcccatccatattcggttccttgatacggtcaagactgacacctccgtgcatcttcaatccttgcgccgtagcgacaataacagtgagacgcggctggagtccgctctttcgacacttgatattgtagaacttctccgcaccaagatcggcaccgaatcctgcttctgtaatcacatagtcaccgaaagtcatcgccaatttggtggccagaatggagttgcaaccatgagcgatattcgcaaacggaccgccatgcacaaaagcggcagttccttcggttgtctgcaccaggttaggatggatggcatctttcagtaatacggtaatagcacccgccactcccaagtctttgactgtaaaaggctggtcatcataagtgaacccgagcaggatattttcgatacggcgacgcaaatcattcacatcttgagcaagacacagaatagccataatctccgaagccggtgtaatatcaaacccggactcttgggtgataccgtttgacttcggaccgagccccacgacaatgctgcgcaacgaacggtcgttcacgtccaacacccgacgccagagtatttctttgagcccgaaaccttttgcctgattctgatagaggtagttatccaacaaagcagaaatcatgttatgagccgaagtgatggcatgaaagtctccggtaaaatgaagattgatcttatccatcgggagcacttgggcatatcctcctccggcagctccccctttcattccgaagcacggaccgagagacggctcacgcagggcgacaatcgccttcttccctattttattaagtcccaatgcaagaccgatagacacggtagttttgccgatacccgcttttgtagctgtaatggcagtgaccagtataagattgcttttctttaccttctcttcatcaatcaactgttcgggtatctttgcaatgtagcgaccgtaattttccacttcatcacgagggattccgatactttcggcaacctgcttcactttcttcagctcaatgctgcgagctatttctatgtctgatttcatacagaatatgattagttttagttgaaaatgcaaaagtaacaaatctatgtaaagctgcaaaactctttccgcataataactgttgtatgtaacataacctaaacaacaacttaattatggaatggattattaatcaactaagggtacaccctgagcttgctatctttctcacgcttttcgcgggattctggttgggcagactcaaaatagggaagttctctctaggtacagtgaccagtgttctgctagtcggagtattggtaggacaactgaacatcaccgtagacggtccgatgaaggccgtattttttctgttatttttattcgccgttggctataaggtagggccgcagttctttcggggattgaaaaaagacggtttgccacaggtaggattcgccgtattgatgtgtatcgtcagcctggtagccccgtggatacttgccaaaatcatgggatatcacgtaggagaagccgccggattactggcaggatcacaaactatctcagccgttatcggtgtggcaagtgataccattaatcagttgggtatcagcgaggcacagaaagctacgtatatcaatgccattccggtagcatacgccgtgacttatatcttcggtacggcgggatcggcctggcttctggcttctctcgggccgaaaatattaggagggctggataaggtgaaagcagactgcaaggcattggaagtgcaaatgggaacatcggaagtagacgaaccgggattctcacccgcactccgcccggttgtattccgcgcttataaaattaccaacgaatggtttggaaaaggaaaaaaggtaagcgagctggaaacgtatctggcggaaaaagataaacggctgtttgtagagcgggtccgccaacggggaattgtaaaagaggtcagtccggatctgattctccaaccggaggatgaagtcgttctaagcgggcgacgtgaatttgtgattggtgaagaagattggatcggtccggaagtgattgacgcccaattgctcgatttcccggcggagactctcccggtaatggttactcaccgcactttcgcaggagagaaagtcgcaacgatcagatcacagaagttcatgcacggtgtcagcatccgtagtatcaagcgtgcaggtatcaacgtgccagtgctcgctcagaccgtagtcgattcgggagatatcctcgaacttacgggcatgaagcacgaagtggaagccgccgccaaacaaatgggttatgtagaccggccgaccaatcagactgacatgattttcgtaggactgggaatcttggtcggtggccttatcggggctctttccattcatctgggaggtatccccatcagtctatccaccagtggaggcgcattaatcgcagggcttgtattcggctggctgcgcagtaaacaccctactttcggcggtatccccgaaccctcactatgggtattgaataacgtaggactgaatatgtttatcgcagtggtgggcattgccgccggtcccagctttgtagccggattcaaggatgtaggtttcagcctgtttattgtcggtgcactggctacggctattccattggtcagcggattactgatggcaaaatatctgttcaagttccaccctgccctatccttgggttgcacggcgggagcacgaacgacaaccgctgcactgggagccattcaggatgcagtggaaagcgatactccggctttgggatatactgtgacgtatgccgtaggcaatacgctgctgattatctggggagtggtcatcgtactgctgatgtaaaccggaagcacttactgtttcagacaaattatttactattctaacaaatataaatttcattatggagaaaaaagacaatagcccggctatcactaaaagctatgctaaaaagatggaaaccatcagccctttcgaacttaaaaacaagcttatcgaaatggcggatgaaagtatcaagaaaatggcgcacaccatgctaaatgccggtagaggaaatccgaactggattgctaccgaaccccgtgaggcgtttttcctgttaggacaattcggcctttgcgaatgccgccgtgtattctcgtcggaagaagggatagcgggtatcccgcagaaaacaggaatagccgcacgtttcgaggctttcttgaaagataacgaaaagacaccgggagccgacttgctgaaaaagggatataactatatgttgatggagcacgcagccgacccggacacgctcgttcatgaatgggcggaagctgtaatcggtgaccaatatcccgtgcccgaccgtattctgcattttacggaactaatcgtacaggattatctggcgcaggagatgtgcgaccgccgtccgccgaaaggaactttcgacctgttcgccactgaagggggaacggcagccatgtgttatctgttcgattcactgcaagagaatttcctattgaaccagggggacgccattgcattgatgattccggtgtttactccttatattgagattccgcaattacgacgttaccaatttgaggtcactgaaatttccgctgaccagatgacggctgacgggctgcacacctggcaatacaaggatgaggatatcgacaagttaaggaacccgaaaatcaaggctttattcatcaccaatccgagtaacccgcccagctacgcactgagcgctgagactgcggcacgcattgtcaacattgtaaagaatgacaatccgaatctgatgattattacggatgacgtgtacgggacatttatccctcacttccgttcattgatggctgaattgccacataatacgctttgcgtctattctttctccaaatatttcggagctacgggatggagaaatgcagtgatcgccttacacgaagacaatatctacgacaaaatgattgcccgcctgtcggagaagcagaaagaaatattgaacaaacgttattcgagccttgacctgcatccggagaagatgaagtttatcgaccgtatggtagctgacagccgccagatcgctttgaatcatacggcagggctctctctccctcagcaaatgcagatgagcttgttttctcttttcgctcttctggataaagaggaccgctataagatcaagatgcaggatatcatccatcgccgtttgcacgcattatgggacaataccggatttacactggtggaggatccgctgcgcgccggttattattcggaaatcgatatgctggtgtgggcgaagaaattttatggggatgatttcgtcgcttatctccaaaagacatataatccgctggatgtggtgttccgtctcgccaatgagacttcactcgtactgctgaacggcggtggctttgccggccccaaatggagtgtccgtgtatcgcttgccaatctgaatgaggccgattatgtgaaaatcgggaaaagtatcaaacgggtgctggacgagtatgccaaagtatggcagtcataaacagataattcctaaagcgcagatgaacacagatgaacgtaaattatcgcagataatatttaatctttgcgtaaatctgcgttaatctgcgcttgtttcatagatagtcagactgaaattttctatctttgtgatgaattaacctgtacaaagatgaaaaaactgattctatttctttcgctgatattatctgccggaatcgtatccgcacaatcggaaataccttccgacagtatccgccgtgccccgtcagctaatgtaaaagagttcggcggtttcttgctggatatggggataatgaatatcactaccccccaacttcccaaaacagatctgagtataccgaatgtaaccaaggactataatcagctattccgcatgaatacggatgctatctattctcaaggattcacagacaccttctctccttcatattccggcttcggacacggatacaattggggattttactcttcaccgcagtttatgcagatgggatctttcaaactgaaaaacggaatgcaaatcaatacatacggagattatgataaagacggatggagggttcccaatcgaagcgctatgccttgggaaaagaataattttcggggagcattcgaactaaaatcagccaatggtaatttcggaatacgaattgaagtgcaacaggggcgcaatgtcccctactaattaccggatatttgcccggtgatattagaatttctaactaaaaaagtgtttaataaaagggacattggaatatcaaaatcttaatatatgttatgaaacatactttttcccttggattatttgcagatatcacaaaagtccgtacctttgcaatgtgtttttcatagtattagatttaaggttaacaaaggttggagcaaggcgttgctcctttttttatgtctgtacgttacgttttacatatttatttggaaaatatacaataaagctgtatctttgcagcaaaatagaaaaaccaacgatgaacccaatattacaattacataacatttctccaactcctgcagggatatcctctttctgcaattcaagttgcgtacatgtacattggttcagcggattcatctaaattcacccattcttttttacagaaactgcttatcaaattctttttatttataagtagtatttctaattgattttcaataagatatattatctttttgaaaacaggtattcagtgtgtaattgaattattcgtataaccgaatcaccccaatatatcataatatgttctctattatatccactatgttcttaggaatcggcattggttatgcattgcgtaattggagcattctgcaaaagacagaaaagacaatttctcttacaatattcttgttactctttatcttgggagtatctattggttctaacagtctgattgtaaacaatctcggaaaattcggatggcaagctatcatcctttccacatccggtgtattgggaagtctgattgccgcccgcttagtattacaactgtttttcaagaaaggaggtaaacaatgaaaggaagtctgattgttatattattcttttgcataggttgtatcatgggattttttaataagttcgagttcgacacacatgctgtctccatgtatatactttacggattaatgttgcaagtaggaatcagtatcggctctaataagaatttgaaaactattgtttcacatctgcatcccaaaatgctattgattccgttaggaacaattatcggcacactattgttctcggctctggcaagtctgttgctacaccaatggagtgtattcgactgcatggcagtaggaagcggctttgcatattactcactgtcctccattcttatcactcagtttaaagaaccatctatcggacttcaactggcaacggaactaggcactattgccctgctaaccaatatcttccgtgaaatgacagcattgattggtaccccgatcatcaagaaatatttcggagagttagcgcctatttctgtagccggagtcaattcgatggatgtgctgttaccgtctatcagtagatattcaggaaaagaaatgattcctatcgccattctacacggtatcctgattgacatcagtgttccggtcttcgtttcttttttctgtaatctctgaatccttaactcttagcatttttcagatattcgcgaataatccccaaaatttcaagcccgtatttctgtactcccttcgcaccgaaatagggtatggcctccaaagcttccggagtatcgggcaacaagtttacgatccccatcagggctttctgttgcattatgatataagccgggagacttacttcgcgtgcttttgccgctctccattcggacaaggtacgataaagctccgggtacagaatatctgtaggaacctcaacctttgctttcgaagaactacgtgtacgttctttacgtcctttccgttctctcttctctttcggagctttgggtgaagaaccggaagaagaatcgtcttcaaggcttaacgtcactttagcttttaacttcaaatatcccgtaacagtaaagggttgccccatcatcgcttccaataaagattccttaatccacaacgcatcatccaacgcttgcaggcgttcattcaactgcttcctaagttctttattatcaaggggcatattcgttttttcaaacaacgcgcgtacaggttcgagttccttacgaaagtatcctgcaccggaacgaacccgctcctgcaatccctggtccgccgcataatcatcgctcccatttatcaatcgggtatattgattgcggaaacgttgagacacttccactatcttttctttgatatgaggagccaattctttatactcggcaagttgtttcggataaagcttatagaggtcttcatctatcaggcgaagcagccgcttataagcttggtcgagcgaataaaagttgaataaatcactcagtaaatcaaagaaataggccttctgcatatcgtgtaactgccggttgcccggtttgtttctttctacttctttggtgaagtcatctacagtactatcactgatgatagcttctctgcgcagaggggattccagcaccatgccttccaaagttttgcaacggcttaaggctacgtaggtctgcccatgcgcaaaggaattgcgcgcatcaataatggcacgctcaaacgtcagtccctgactcttatgtatcgtaatagcccaagctaaccggataggatactgacggaaggttccttctatctcttcggtgatttccttcgtttcttcattcagcacatatttataattgccccactcttccggcaataactgaaattcatctccattatcttttccccgcacaatcatccccgcatcattaacggctgccacttctccaatcatgccattataataccgcttttccgacgaggggtcatttttaaggaacataatctgtgcccccgcttttatggtgagaacttcgtctgccggatataaatattccggaaaagttccgtctatctctgcacgaaaactataagtctgcccgggcagagaggccaattcattatcgttcaccttctgcgcctgataattatgcgttgtcagacggatgtagccttcttccttgcgaggacgaaaacccggctgataccgacggttcaactcattcaatacttcatcgtccgcctgattctcacgtatcctattcaacaaggaaagaaaaaaggtatcactctgacgatagactgttttcagttcaattgtcatatataccgtctcacgcaaagcacggctggcaaagaagtaaggggtttcataatagttcttcaacatttcccattcattctctttcaccacaggggctaactgctgcaaatctccaatcatcagcaattggactccaccgaaaggcttttccctatcccggtatctccgcagagccgaatctatcgcatccaacaaatcggcacgcaccatactgatctcatctatgaccagcaagtccatgctacgaataatattccgcttttctttactgaaacgatagtgtgtctgggaagagttgaacgtggtctccggaacaaaaggtgcaaaagataactggaaaaaagaatgaatggtaactcctcccgcattgatagcggcaatacctgtcggcgccaagataaccatacgtttaggagtctgttccttcaatcttctcagaaatgtagtttttccggttccggcctttccggtaagaaataaatgtgtgcctgtattttcaatgaactgccacgctagttgcagttcgggattattctccatgggattcaaattttcaacaaaggtaactattattctttttctttcgtcttgatacgaaagaaaaagaaccaaaaagaaagaataagaatattatttcatagagccccccacaatatccaacagctcatttgtaatagcctgctgacgactcttgttatattgcttcgtcaaatcctgaatcagctcgttcgcattatccgtagctacctgcatagctaacgtacgggcagcgtgttccgatgtgttcgagtcaacggctgctgtaaatagtttctggcttaatacagttgggattaggttggcaatcagttcttcagcgttgggttcgatgatgtagtcgttggcgacttcacgtttttccgccttccctttgtccttttgctcctcattcatctgctccttgttttgttcttcttcatctatgatatgtgtcagatcgatgggaagatacgtttcacgaaggaggatttgcgtacccatagacttaaaatgatgatagataatttccacacggtctatttcgccggatacaaacatccccatcagacgatgagccaagtcggcagcttcctgataagtcggtttgtcagataaggtgggcgaagtttcctgcggttggaatcccatgcgttttacagcttcatctactttcttgcctattggaaatatcaagatattgtcttgcccgagagtgcgatattcacctaccgtttgcaataacatttttatcacattggcattgaaagcaccacaaagagacgtattcgaagagaaggcgacaattgccacacgcttcacttcgcgctccttcacgtagggagattcgataggaaggtccgcactcagaaagttagtcagaatcttgttcaacttcttctgataaggcaacatattctcaatggctccttgtgccttatgtaatttggcagaagccaccatcttcattgctgaagtgatttttcgggtactctttaccgaatttattctggtttttacttctttcagtgaagccataatttttttaattaagaatgaaaaattaagaatgaagaatttactatgcagtatagtcaaatagttaataataagaattcttcattctttattcctatatttctataagtattgtttggcaaccatagcggcggtttcctcgatggcattggttacactatcatcgataacgcctgtctttaagacatccaacacatcctgctggtgattcagttgcagagattcgatgaagctacgttcaaagtcctgtaccttatccaatgggacatcatgaagaagtccgtgcgtaccgcaatagagaatagcaatctgctgttctacgggcattgggctgtattgaggttgaatcaaaagttgggcgttcttacgtcccttatcgatcgtcaaggcggtaatcggatccatatcactgctgaacttagagaaagcttccagctcacgatattgggcttggtcaatcttcaatgttccggctaccttcttcatggccttaatctgtgcgttaccacctacacgggatacggagatacccacattgatagccggacggacaccctgattaaagagatcggtttcgaggaagatctgtccatcagtaatggaaatcacattcgtcgggatataggccgaaacgtctcctgcctgtgtctcgatgataggcaatgcggtaagggaacctcctcctttgactatatccttcaagctgtccggcaagtcattcatttcgcgcgccacttcttcctgactgataatcttcgccgcgcgttccaacaaacgggaatgcagatagaagatgtcacccggatacgcttcacgtcccgatggacggcggagaatcagagatacctcacgataagctaccgcctgcttggaaaggtcatcatacacaaccagcgcatgacggccggtatcacggaaatactcaccgatggctgcacccgcaaatggcgcatagtattgtagcgcggccgggtcaccggctgtagcggctactacaatcgtatagtccaacgctccattctcacgaagtgtatttacgatagaagcgactgtagaacctttctgtccgattgccacatagatgcagtatacaggatcgcctgccagaaaattgctacgctgattgatgatcgcatcaatcgcaatagccgtctttcccgtctgacggtcaccgataatcaactcacgttgaccacgcccgataggaatcatggcatcaactgccttcaatccggtctgtaatggctgattgacaggctgacggtaaattactcccggagctttccgttccaacggcatatcataaagttcaccgccaaccagccctttgccgtcgagcggttcacccaacgggtcgatgacacgtcccaacatcccctcgcctacacgaatggaggcgatgcgttttgtacgtttcacaataaacccttctttgattctgtccgtcggacccagtaatacagcacccacgttgtcctcttcgaggttcatcacgattgctttgataccattgtcgaactccagcaattcattcgcttcggcgttccgcagtccatagatacggactacaccgtcgctcacctgaagcaccgtaccgatttcgtcaagctgcacattggcattaatcccttcgagctgcttgcgcaatatatcggatacttcgcttactcttatattttcagacattatacaattctcctattcttatcaataaattgttgtttcactcgctttaactgcgtagcaacgctcgcatccaaacggtaatcgttgatatcgaaaataaatccaccctcaatggacgggtctactaccgtttccaactccatctgcgcatgcaggatatgcgctgccgcagaacgaatccgatccgatgtcgctttatcaacgtcaacagccgtaatcagtttaccgactccgatatgtttcaacttccgatacaggtccagatacatcaggccgataaattgcagataaccttcacgcctgttttttaataccaaagtgataaaacggataaactctctggttgatgtaccttcaccatcggcagccgtacaaaccaacgctaatttctccttaatcgcaatgaccggattatcaagtgcctcacgcagtccgggttgtgcacaaaaactgtgagacagagtgaggaattcctgatataccctgtcttccactcctttttcctgcgcgtattcaatcatcgcttttgcataacgcattgagagtattccgacttccattttccttagttcttattcggggttaatacttcatccagcatacggtcgatcatccccatctgtgcttccttatctgcaagattcttgcggagcactttctcggcaatgtccaccgaaaggacagccacctgacgacggatgtcgcggatagcctcgtctttctctatctggatttgttgcttcaccgcatcaagttctttttgtgcggctatctcggcttgcttacgggcctcgtgaacaattttgtcacgttcttccattgcttccctcaagatgcgtccttgttccttgttggcagcagccaccaacgcgtcaccctcttctttcagtctggacaactgtgcattggcttccctcgccacctccaaagactggtcgatataggttttacggccttccaccatttttataatgacggggaagccgtatttcgccaatatcacgaacacaatcccgaatgagaggaacatccagaacaacaggccactatcaggtaatagtaatgacataagcttagaggaagaataccaatagacaaacaactaccgccaacagtgccacaccttcaatcaaagcggcggcgataatcatattcatacgaatgtcacctgaggcttccggctggcgtgcgatagcttccattgccgaaccaccaattttaccaatacccaaaccagctccgattactgcaagacctgcaccgatagctgcacctaatttacttactcctactgctgctgcagtggcttgtaacaatactgatagtaacataattttcagttttaaaatggtttatattttctctcgtttaattatttatttctcttccgcttttactttggctccttcctgcgccaacccgataaacacagccgacaacatggtgaatacgtatgcctggatgaaagcgaccaacaattcaagcgcattcataaagatgttgaacaatacggaggctactgtcagcgtgccgttcaaggcaggtcccatacttgccgagataaatatcaagcaagtaagcaccaacattgccatgtgtcccgccagcatattggcaaaaagacggatcatcaaagcaaacggttttgtaaagatcccgaagaactcgataaacggcatcatcggcacaggcactttcagccaccaaggaacatcaggccaaaaaatatctttccaataatgcttcgttccgaaaatgttgaccgccagaaacgtgcatacggcaagtaccattgtgatagcaatatttcccgtcacattcgcacctccgggaaagaacgggatcagtcccatcatattattgataaagatgaaaaagaatgccgtcagcagatagggggcaaatttccggtaattaggaccgacacagcttttaataatgtcgtcattcaccatcataatgaacatttccatgaatccgataaatcctcccggagctttggctccctgcggacgttttctgtaccagtgcgccacactcaggacgattaccaacaacaatacactattgaacagtaaggcgaatgtaactttcgtaatggatatatccaaaggacggacttgttcgcccgccgcattgtattccaccagtttgccctcgtacttacttccttccggagctatcgaaagcccctcatacgtgcctccgttctcttcgagacgagaagaaaggaacacatgccagcctgtactattactataaacaataataggtaatggtatagtaatgtgcgttttaccccacgtggtaatatgccattcgtaagagtcgccgatatgtccgaatacgatttccttcacgtccaccgtattctcctgttcctctttcggagtaatcacatcctgcacctgtgaagtcgcttctccctgctcttgtgcaaagccgggcagaccggacaccatcatcagacagaacaatatcaacggagccattatgttatgcaactgtttcatttttcttcttattttgctttttccgtttctgattcacctcaaaagagaaaaagaaccaggtttcgaatatcagatatatcaaatagaatgagataaacgtcagcaaaaaagccttagcctcttcgcgcacggttatacaataaatcaggactaaaatgatagaaagaatcatctttaccatctttattgccagatacaacagtaacattttctggggagcgtgcagccgacacgcatcgaacatatagatactaaacaaaccgaatagataaaaatagaccggaataaacgggtatcctccgaaatagtgtcccggcagagcgatatgcaaaataaccgctcccaatcctgcacctatgattgcaaacagcgtatgcaacccgataaaatttcgtttcgttttcgtaatgttcaccatgtcactgtgtttttcttaatatattgtcttccgtcagccgactgtcacccgtctgtcaggagatgcaagcggaaaccgtaccgtcactcagttcgacaaaaccaccctgaatatctatcgtacgctcctcgccttccatcgtcgtgtaactcaacgtacccgcttgcaatgacgagacgataggcgcatgtccgggaagaatagaaaacgaaccaaccgtccccggcaatgtgacaatcttcacatctccgtcgaatatgctcttttcgggcgatactatactcaaatgcagttctttcatccttcttgtgtttttatttctttgcctgttccagcagtttcttacctttctctatcgcttcctcgattgttccgacattcaagaatgcctgttcagggagataatcaacctcgccatccaaaatcatcttaaagcctttaatcgtatcttcgatcgtcaccattacgcccggtacacccgtaaactgctcggctacggcaaacggctgcgacaggaagcgctgcacacggcgggcacggttcacgaccgtcttgtcctcttccgacagttcttccataccaagtatggagataatatcctgtagttccttattacgctggagaatctgctttacctgttgcgctacatcgtaatgttcctgaccgacaatatgcggatcgaggatacgggatgtagaagccaatgggtctacagccgggtaaataccaagctctgtaatcttacggtcgagcacggtcgtcgcgtccaaatggctgaaagtagttgcaggagccgggtctgtcaagtcatcggcaggcacatatacagcctgtacagaagtaatagaacctttacgggtagaagtgatacgttcttgcatggcgcccatttccgtagccaatgtcggttggtaaccaacggcggaaggcatacgtcccaaaagagcggatacttccgaaccggcctgcgtaaaacggaaaatattatctataaagaacaggatatcacgcttctcgccttcttttccggcatcacggaatgattccgctaccgtcagtccggacaatgcaacggaagcacgtgcgcccggcggttcattcatctgaccgaataccaaagatacctgcgatttctccaactcgttataatcgacttttgaaagatcccagtgacctttctccataccttccttaaacgcttcaccatagcggataacgcccgattcgatcatctcgcgcagcaagtcattaccttcacgggtacgttcacctactccggcaaatacagaaaagccgttgtgctttttggctatgttattgataagttcctgaatcaatacagtttttcctacaccggccccgccaaacaaaccgatcttaccacctttggcatacggttcgagcaggtcgattaccttgatacctgtgaagagtacttcctgcacagttgtcaaatcttcaaacttaggggggtcgcggtgaatggaatatgcaccttcacggtcgagtcctttcataccatcaatagaatcaccgactacattcatcaatcgtcctttaatctgttcgccaatcggcattgtgatgggacctccggtgggatatacctttaagccgcgttgaagcccatcggtactgtccattgctacggtacgtaccgtattttcaccgatatgctgctgaacctctacaatcagtattttgccgtttggcctctttatctccaatgcatcatgaatgcttggtaacaccatttctgcatccgtaccttcaaagtacacatcgaccacagggccgatcacctgcgagatatgtccgataatctgtgacataagcaatcttttatttatattattcttctctattcctattgaaaaaatagtatgacaaggaacgtttcgcgttttacctgtttcactattataataacagctaagttcagcttttgttcaactattttctatatcagataaacttctgcccttagaaatagttaaataaacaactgcgcaaatgtagaaacaattctgtgtcattgttcttcctttttcattatttgttgttcgataacacttattagacctacaataactacaaattgaccaatttagacaaaatccaactacaaatcaataccaaaataagcttgaagataataattcatcaataaactaaaaacactcattcagtttcctatctctttgttaaaaatcaacggattagcaattttacaaaatagtggcaagaacaactagttttgtgctcgagcactataaattccatttttcggatattccttaataaagtttaaaggtgggggctctatttttcaattatccatttctccatattctgcatttccacactaaagttcacatcatatttataaaacaaaaatttaaatacgccgataatatgtatattatccattttttactgtaattttgcactactaatataaaacactcaaaatgatgaagaaaatactgttactcggttccggcgaactaggaaaagaatttgtaatttcagctcaacgtaaaggccagcacatcattgcttgcgactcctatgcaggagcaccggctatgcaagtggccgatgaatttgaaatattcgatatgctgaacggtgaagaattggaacgcgtggtgaagaagcatcgtccggacattatcgttccggagattgaagcaattcgcacagaacgtttatacgacttcgaaaaagaaggcattcaggtagttcccagtgctcgtgccgtgaacttcaccatgaaccgtaaagccattcgcgaccttgccgcccaagaactcggactgaaaacagccaaatacttctatgccaaaaccctggaagaactgaaagaagctgccgataaaatcggcttcccttgtgtcgttaaaccgttgatgtcttcttccggcaaaggacaatcgcttgtgaagagtgccgatgaactcgaacacgcctgggaatacggatgcagtggcagtcgtggcgatatccgtgagcttatcattgaagaatttatcaagttcgacagcgaaatcaccctgctcaccgttacccaaaagaacggtcctaccctcttctgccctcccatcggacacgtgcagaaaggtggcgattatcgtgaaagtttccagcccgcacatattgatcccgcccatttgaaagaagcggaagagatggccgaaaaagtaacccgtgcattgacaggcgcaggactttggggagttgagttcttcctaagccacgagaacggagtttatttctccgaactttctcctcgtccgcatgatactggtatggtgacattggcgggtacacaaaacctgaatgaattcgagctacatttacgtgccgtactcggtctgcctattcccggcatcaaacaagaacggataggcgcaagcgctgtgatcctttccccgattgccagccaggaacgcccgcaatatcgtggcatggaagaagtgacgaaagaagaagatacctacctccgcatattcggcaaaccgtttacccgcgtcaaccgccgcatgggagtagtgctttgctatgctccgctgaatgccgatttggatgccctgcgtaataaggccaagagaattgccgagaaagtagaggtttattaaaaccggaaggaaaataaggaatcatggagaattagaagaataatagagaaaataaaaagagggtgtcaacggataccctctttttattttctctataaaaaactaccgcctatcgtttcttgctcaaaaaacgctttgccaaatacttacgtaaaggttcgtcatagaatttcaagcttagataagctagtacaatacacaatgcataaacacataaagctacctgccaagtctcacccagcgtatagagttgattcttaatcagccatgcatagaacagatacatcaacggatagtgtatcacgtagatcggataagatatatctcccaagaacttacatatctgcgttgactgcttatccgtcgtacttcccgacgcacccagccacacaaggatagggaaagcaacgacaatgcaaaacgcttcatacacaccgttcgtacaaaccggctctgcaccctccaaataaggaacggaaaacagggcaatcaatgcaagggtacatatccagaaagcgcctttcactttcacaggtttgaagttgcgggataaaagcatacctaaagagaaagggaaaagcattctcaatgatccgcccagaaagttcacgccatccaacgtccatcctaccccaatgtttccataagtggagacatcaaagatggcgaacaacgtcaacgccacccccagcaataccaccatcacagccaacgccttattagacagacggcgaatgaataacgcataaaggatattgcctatatactcgaaaaacaacgaccagcacggcccgttcaacggaaacatctcgccattgccacgaacctcatagcccgcacccggcatggcaggaatgaaaaatatcgtgcaaagaagagacaacatcaccatggatatggcaacgtgcgttccatcccattgcacagaaccctgaatgcagaacgtgatagctcccagaacagcccccagaacaaccataggatgaagacgtatcaaccggcgtttaaagaaatctttcatggtgagactcttaccccaacggtcgtcgtaagcgtaaccgatcacaaaacccgaaaggataaaaaagaaatccacggctaaatatccgtgattcagagtttcaatagcactattaccggcaaaagcgaagccctcgaatacgtgataccatatcaccataagagctgccacaccgcgaagtccgtcaagaagttcataatgagccttggtatctgaaaaggctgaagcagaaatgttcgacatttgtttttctattagtaagttagtattttcagagggcaaagatacggtttgcgctacgaagtttctttgctctaaagcaaaaaagcccggctaatcgctattttttagcacgtacccggctaagggtatagatggaaatgcccagaaaggcagccacatatttcagtttcactcggtttatcagtccgggatagcgacggttgaactgttcgtaacgttctttgggcgaaagttgaaggcgctccacaaacatatggctaagctccttattcacattctgatgcaggattcttccccagttggctatgtcgatatatgtttcgtaaagggcattcagcttgtcgatgtggatgacgtagattttgcaatcggaaagcgtttcaacgctttctaccgatggttgctgatagtagagcgaatccatgccgaacgtaacgtcgccctcctgactgaaccacgtagtggtgtcctctccgttgtggtggaatacggaacgggtgataccctcttcaataaaataaaccagatggtctgtgacacctgactgaacgatacgggtatctttgggataataccttaattccatattcgcctgaagcgcttgaagtgcttcatcggaaaccggatagatttgcttgattttacgaatgatattttccatttgggggaatggtgtattgggagttaatgacgtactttaggatatttattattaaaacggaaaccaagaccgagcatcagataattaggggtctggaaattctggagattgtagccaatgtgaaggaatgaattccggatgacgttgatcttcaacgcaaagacctgatacagtccgcgtaaatcgccacgccccagcacattcgttcccaagcctacaccgatggtaaaaaacggcatcacgtattcggcccgtccggaaagtcccaacgcaagctgatgccggatgcccggcacaagaaatttacgacgggaggaaccgctgtctgcatcgtactccaccagcgcatcttcggtgtatacattggcactaccgtcatagacaccatccagcgaaatcccgaaacgcagcttatagttgaggttatacatcggagcaaagttgaatcccgctacaggataactgcccggtgatgcaatctgtttctcacctacatagacacctttgcggcgccacgagccgaacaacacaaggtcataactgatgtgtcgcggaaaacggggaacgtagggatgaaccaatgatttagtgaggtcggcttcttcctggttgaagttgtacaccagtccgattttcgctccggtggtgttgacacctgcattaggaaacttggtgttgccgttggagaaatgcgtgaagtctccgccgatgataaagtcgaaataacgggaaagcgaccagttaaggtagatacctgcgttgaggtaggcattcacccgtgagcctacggctccgttgtaggaattgtaatcgttgtcataaggctgccatctggcagagataccgaagttccattcgtaattgagtgaaaggcggggatggaaacgggcaatgcgtgcaccttgaaagacgtagaacgtcatcggatcacccaactgctttttatcgccaaaagtggtgaaggccaagccaaaaccttgataggctccgccatagatgcggtcagcacaggtgttgggacgatacttgaaagaatatttcagatgagcggcaaatgaattccggatgggtttccaccgttcgttctcaccttgcaggaaaggattggtggggaatacgtattgtggccgcgcctctatccccaaccggtgaatgaaaggttggtctgcctcctgcgcacaaagcgaagtgaaggggaaaagcaaggcggaacagattacaacgattttccgtccgggtatctttactctcataaatagtctggttagtcttttctgaacggaagttacaaatggagcttctcaataaactgtgccacatgatagccgtccatcaatccatgatggcaagttacggaaacgggcatcatcagtctttctccgttgcggaaatactttccggtggagattttggggacactgtcgcccgagcgcatattggtggggtgcttcatgtcggtaaatgagagccacggcactgccgaataatgtatggcattgggatggaaagtatctcccttgttgagtcccgtagtggcttgcaaacgttccatctctgcttttgcccggcggataaagacgagttcgtccggatcgtattcaaaggcggcaaaagaaaaagtatggtcggcacgacctacagtggcttcgggcagaaggctgtcatagcacaccactttatcgccttcgatgcggtaacggaattcttctaccgcagcagcggcagtcgttatccggtggaggactaacagggaaaaggatatgcctttggctttggcttcctgatacgtgcgcgtacagtctacccgaacggtcactccgaaaaacggatcgtcaaaagcactgaaatgttcgtaatgttctcttctgttccaagtagcaatatcgatgatcttctctatttgattcattctaaacactcttttttaagtttcaccacagagggcacagaggacactgagattttatagaaattttatagaactttttcaccggattaatgcaattgattccattgcttccggtcttaccttaccgaaaaaactcagtgtcctttgtgtcctctatgtgaataaattactgatgttgctcacgcaacaggtcgttcactgtttttaccgggttgaaagtggaaagcggcacttctacaaaaacagtattccaatcactcatcgcaccattccacaaaccgggaagttcaagagctttcagctccttgccgtttttcgacttgtaagaaataaagccggtcgccttgtctacgtatttcaccaaatcgaacttatgacctttataatcacgcacggcacataccaagtccaccggattgaagtgcgtacccttctcgaacatttcctttttctgcggatcgttcatgtcgatctgcgagctctcaagaatttgaagagagatcgttccgtcactgttgtatgccaggaacggaccgccacccggttcacccacattcttcaccattccgcaaacgcgcattggacggttcaatttgttcttcaagtaaatagcaagcactgaatcttcgagatctttcgtttccggattcttgcagaaaagtttcttttgcaggaattgcagcatttccatcatctgttcgtgcgtatattttccgctgtcgagcagttcgagatattcgaatgcctgtttctgtaaggtaacgagtacaccggcaatcagttttttataagtaacggtgtccgctttcagtttatcgggaactacattgtcgatgttcttgatgaagataacatccgcatcgagatcgttcagattctcgatcaatgctccatgaccacccggacggaacaagagtttgccgttatcacggaacggctggttgtccatatcagcggcaatcgtatcggtactcggcttctgttcggagaaggtgatattataatccactccataacgtttggcaaactcaccggctttctcttccaccagtttcttgaaaagttcgcggtgttcggcagacacggtaaaatgtacgttcactttgccactctttccggctgcatacatggcgccttcagccaaatgttcctctaatggagtgcgtgcgccttcgggatatttatggaatttgagcagacctttcggcagtgcaccataattcaagccggcagtttcgagcaatgcggataccacagctttataattgccttcttccatcaacccagcgatattcttcccggtaatgcgtcggcaagctgcatcgagatcgtcataaaaagcaaaatccttgataccggcaaagaatgcttgttcaaacttggttgtcggtttgtcataatcagcagaaaggaactcgaataagttcttgaacatacgacttgcagcacccgaagccggtacgaacttcacaattgtcttatccgtgtttgtatatgcgtcccacgctgccagataagctttctgttcttctgcattgggagccaatatacctctttcaatggaagcagccgcatccagtttcagataagggaaacctgtctggaagcaagccagttgctctgctatttgcgcttccgtaatgcctttcttggcaagcaactctttgtcctgtgtcgttatcataatatctaattttattaattgatgcccaaaaatacaaaatgttatttacttcttgccgaataaccaataaaaaaagtaattttccttccatatttcattatcagtcacttacgaagaagtgttattcatttatgtacttttcagcgttatttgaacacaacaaagatagataaatatccgatgttatcacagaatttgtagaataaatagagttaaccgattacaataatattacagactttttggatatttgaaatcttaccagccgtggaaagttggggagcgtgtggtttaaagcactttcctgataaaatttcaccccccatacccctactgttgagatgaactgtaaaccagctagcaacaaagcaaacaaaaaagccagctaacattacgctagctggcaaataacatcaacggataaagattaactattttattttctcatttaatatttccataaagttatgcttctgtgcttctttcataatactgttcgtagtcttttttttattttctttaacattccaagcgattttgtaaagctagttccttgattgttcttcttaataacccagtcgatgaagaatcctttagccaaaaaacggtaagtaaatcctgcatccacaccagctttaataattttctctgccctttcaaccagcttgtttgcttcatcacccacatatttagcaagaatatactctccatatttacacgtctctgccaataccgattcttttatgtcagcagaataagtcagatacttgctaagcgttgtcaatttgaatccaccattcggtaacatatcatctgcttcacctttctttgctttttgatgttgcatatccatatatttggcaataaacttcaaaacttcattatcaggatacatagcaaaagcctgtcttgcaaaatcacctttatcccatttaacggatgtattatttacttctgtaataagagtctgtatgagtatctcattattcaatggatacctagcttttatgtgtgcaggggctttaggagtgtattcttctggcttatcttttggtttattaccgtccttctgccatttcctcgcagcttcttcataattcttcttgccacgtctgtcctcttctcgaagtgccattatagccatatacctgtgctgtccatcaataatagccagatagtcctttgccttttcatcttctattggaagccctgacatagggtctttcaaactcagaccttcatttactacatcttctccatcgacaacttccaactccgatagttgaccacattccttaatggacttcattttagctttcacattcgctttgttgatgtcccgattaataccaccagcaataaaagcaactttctttccttcgttcaattctcttgattccagagtaaagatttcattcttacattcttttgtagtcataatacctttgcagtttttagactggtgcgctccagctttaattaattttatactacaaagattgcccttttcttgagaagctaacgggaataaaaaaacactgctttcttattcccccacttcacaagttgtagaatgaagtatttagagaataagaaagcagaaataaacaataaaataagtctcaatcaataataaaatgcgttcaaactccttatgtccttgtctttatattgtttcaacaaagacttcaagtagtcattatcaaccaacacactttcgttgctcacgataccagtgaagtatagtagatgagaaatcagcgtcttttccttgtcagacatattagctcccttctttctcttttcttttacctgttcttgataattcaaggcagtgataatcatttgtgaaaaataataagcgaatacggagaatgattcagtatgtggattactcaaatcaacgttaccagtattcatttggtctgaatttactgtttccaatccgtctgcacaaaactttgctatactagcaatagccgtcttattatctatcacgatattcttcctacctattttcaaggtaatacaaattgggcttttaaagactgcaccaaacggagtatctcttttatagtcctcactgatagcattaacaagtttttctatctgttctttaggagattcttttatttctataccctccatacatttaccccaactgcaatcataacagaaaagcaatagataccagaacttttcagcgtctaaatctaatgtagtaagtaaatcctgcaattcacgattctgcaaataagcatcaatggagaatctacctttcaatattcctctgttgtatcttcctttaaaagtatctggtgtttgtgacggcaacatatatgtctgccctgtctcttcatcataatcgaagtctgggaaatattcttgtgtcactggatatatatactctagcaactcgctatactggattgagaacttatctactggcttcatagtgtttttgtttgcaatgataataaaaaaacagcaaatgaattgcttcaaatgctgctctttatctatacgctacgactattcttaatacccgtatttaactatcacgtttttattatcatacaaatattggcataataccacatttcccaattcatcaaaagagtatgagaaattatatgattcgttattgtatacattatcatatctataggattcagacatcgactttactaacttttgagctggctttcccaataatcctgcatagtaaataaactcgtgcccaaaacatcctaatgattcagaaataagttcaggtagtactccatttttattttcatctgtagaagcagtgaaagtatatatagtctgctcgttaccatttgtctctactattttatcatagcaaccatttgaatatgtaataatagctgtatttacataatctctccctttatcagtacctctctctgttactgattttagataaccatcagcagtatattcataattaatttcagtatcatcagttgtttttatgaatgtgatatatccatttttatctgtttcaattttgctaatttcatctgcataatcaccagtaaattgaatacctccttgataactaattccataattttccttatcatctgactgtccaaaataaataagttgaccttgagccgatgttaatttcccatcagagtaaataaaatgccaatccatttcttctgggacattacctgttctaacaatagaaacaactggcgccccctttgatattatattccctccatcattatcattatcatcatcgttaccacaagaagtaaaacctgcacataaagtaataaccaataaagtcgcaaaaaatctaaatgttttcatattctgtaaataatcttttcgttaataatttaatttgtagtataagctgctcaaaattgagttggctacttaaaagatagtagcaaaagttgtttcttaatgtctgattcgtagttatatatcgttttatctaccctgttccctttggatagtattacacaatgagaaaagcgtgggaactatcgaatattatcatcatgaggctctggactgcccttgcacaataataaacaatagcccacgccaaacgatatatagactatcttaacaagataggtatataacattgacgtgagcgttcttgcctactatcccgtgcaagtgaaattgtccagatttcatgataggataatatttaaaacgctcttcgttaactaatatgtcctttcagtcccaactcattaggtatctgaaattgccacaaagttacgaaaagcgtttgtaatagcaagaactattgtttattaaaagttgagagctatcccttctttataaatccatggtagtggaaaaattcaagaccacccatataaaaactaaatctctgaatttttccaccccaccgatatttcatgtttatggctttataaactgattttttatccgttgaacggtggaaataccaatactttgtagcttagctatatttctgattgaatagccttttcttagtaaagcaatgacttctttatattcttccttcttcttatcatccgttttggtcgaacctgtctttctaccaagtttaccacctttggcaatataatttgccctaccactattcaaacggtattggatattgcttctttcgatatttgccatttctgcaagtactgtcaccatgatagacgctattggattaacttccccatttggttgcaaagtatataagcccaagttctgtatgtaaaccgatactttcgattcatgcaatatatctaaagagcgaagaacctgtaatgtacttcttcccaatcttgacaattcagacaaaagtaggatattcacagattcacgtttacagtactccaaacattctcctaaaatctgtctttcctctattttctttgcacctgaaatatgctcctggaatatgtttactatttctatatcctgtgaaatagcatatttctttaaatcctctatttgtctgctcgtgtcctgtctgtcattacttgacgaaacacgagcatatattacagctgttttcattttattctttgattaaattgataacatgaaagaatgtgttcaaaccacctttgcagatttatttgaacacattccagttttgaacactaacgaggtttattcgcttcctcaatatcccataagccaactaaaagaataagcaagattaacggaacacaacctgttataaaagacaataccacccaaaagagccaaacaagtatcctataataaaacatgattctttgttttacgtagttaataaaataggagaatacccatttctgaatattcccctgtttaatcaatcaataaaccacttatatttagtgtctccatgcaaagcggcatttattcccgttgctatttcggttgcatttaccgctctatccaaaaagctatctatataactgctcttgtttgctcctgtcaataaattatacaatttccacatactaatatcattccccaagctcccaaaattcttatcattaatatatgcttttgcgactgtatttatctgcgaatcagtgataagcattttaggaatatctttctgataaccttgtggtaatgattgaccaagtctcatcctcccaagtagttggcaaaattgatgttctgtgagatatgagctaccaagtgtttgcaacaaatgtagatgttttgcaggttgataactctgaaacatttccaatactgctcgatataaatctttagtattagtaacttccaagcaactaagaaaaccgtctgttgatacacacaagtttgtacaaactttacaagtaaagccaataaatactttaaacctttcagctcctttctttgaatacagatttgtgtgattataagctctcacaccaccaatagtaagagttaacttattcccgttcaccgtttcgtaaatcgtaggaatctgaataataaaagcacatctttcgtagtagatagtcttatcactttctaataactgattggctggcttatggatagcacccgaaatacgacccttaataacatgacttacacgaatatcgggcttatcaatactttcaccactgaaaaacgtatttgcagcgtcataaactgtatcaataaatgcagggtgaggaattgtaagctcattatctttggcaaatacgggtataatacaatcttctttcaaatgttgcattgttacttccattgtattggcttccaagaaatgaggattttcttttttaactttgggttgttcttcgattattaccgcttcttctgcatactcaccaaagttgttttctcttcttacctgtggcacattgccaataatttgtagatttctcataacaaataaaattttaaatgatttataaattgattacgtggattgaaatatatttcgttttctatccaactaccctcgggggacgttagatgtcctcttttcacccgtacgtaactttcaattcagtaaatcataggagaagtaagctgatatatatttgagctcctatttttataggtagggggggattatatataagtacctatactttattgcacgcatatctttctactctccacaaatggaactactttagaccattacagaatgtggcataaccatacaaccaatgtttgaagaatgagtatcattcattttttagcttccccaattattcgtaaatttgtgtattccatgaaggaaggattaccgtattgcattgagggctttttatctccatttcccaattactaccaatacggtaatttacctttttcacaatctcccatagataaagccatgtttaatagattaaattgcagtcgcctatatactagtattagacgacctttttcatttttgtagtataaccataaaaagtagggcaatttgacgtctgccctaccgcttgtggttatgaaaatttcttcttattacctaccatgtcagaagtatatacctatcaagaattacgtgaattagccttgaaacacggaatcagagataataaagtccatatcggtgtatggttacaaacacaaggctatcagaaacaaagaatacagattaaccacattagaaaaacattttatttaaaatcccatgattgaaacaagaatcccaatagcacctgacacaagtaccacccttacagatgaaacaacagaacacattgttaatcgcaaggtaacaatcaaaatagacagagattatttaaaaaagaagtatgcagaactatacgagcgactggcaaaactaaagctgccaccctcttacaagaagaaataatatcaacccaaaaaagccgcagttgagcacatttgtaagtgtactcgcttgcggctatttttgtacttactgtattaactgataaaaactaacttaccaatgcagcatattggggcaacatacatttgattttccactcattcggtttcttcttattttgtggtgttgcttcaaaatattcacaaatagtttgctgatttacctttgctgtgatgcctgtctcattatgaagtatataatgcctactgtaaatatctgtaaacatctttttagtttcttccttagctatattatctcctatgtatggtctaaaagatgattctatatcccgtagaacttctggagaaaaacgtttattctcattcttttggtctctcaatgctatttccaatttctttttatcgcaacagttccataccgcttgttttttcaattcaaacggtataacttcgtatgcttcaatgattaaatctgcaaaatcacatgaatcatgaagtagctttagaaaaaactgcttgtcaatacttggattctccttgcattgttcattcaactggattagttttgtggcaaatatacgaatacgctctttctcatttggagctttctttattctaaatatatcatcttctccaattatttcttgtctttcttcgtaattaactcgaaagaacttagttgcttcataagcagcatacaacttctctcctgattgataatagcttttaacccgttcctcattatacttattatctataccaaaataatcaatatttaatcgttcatccaataagtaatccttacagatttgtttaagttgttgttttagagatgttttacgggctgaatttgttgttttatcatatctttcaatgagagactgataagtagttttatactcctctatttgtctatccagttcttcacgtgataaagctcccaaatcacgggtatttgttatatgcgtcaaactattaaatgtctgtttatcctcaaacattcttctgaatcgtccttgaatctgtattgcttcggtatatgggtcaacggttgtatatacagcattattcagattagtaagtatcagaatatcgggttttacattcaattcaatatcaactgctgaataaaatcttgatgtgaagaaattgtattttgccaatggataatctattgacgatacggcattagtaaagcctgcgtctttcaacttgccaaccccttcttctgaacaaaagatacggctttccccttctaaatgcagagaattaaccaattcattaattccagttacggagttgaggaatatacagacacaggaactgtctttcagtcgctgaaattcttctcgaactgttctttcataacttgaagttacaatcaaatgtaaatctttcctataatcatattgaggaacaatttccagcttcttaaacccttgcccttcaaatgcagggtgtgacacttccaatggagttgcagatacaaacgctttctctttaaagtcgaaaaaatcgtagactggctgtaaaatacttgctcgatagtcacaatcttgcgtcaacttctcacactcatcaaataagcagaaatatgtttcttgaattagactgtaagacttgtctgctgctttcctaactttcttaaatccttcgggagtagttagaatcttcttgtacttgacatcagttcctttcagatacttttttatttgtgccactgtcgtattactgtaaacagccaaccaatcactattctttgcagctttacccacaataactggaacattgggttcaataatgattgaattacggtatgaatgtaactctgcataagtagcacctatccctgttagtgtcttgtcaagaataacgttacttggtatatctttatatccccttgatttaagcgcatcaatcagacgttcgtcaccattgagttttatttgttctatttccatgtttatcttatatttctatggtagtggaaaaatctgaccatatcgggctgaatatggggacatcgaattttttccactacccatcaacattttactttataactatctgaatataatattttcaactatgttatcagtcgagattgtttctcatgaacaaaagtagcaagttccttaataaatacaatataatctatttaagtcgcaccactattcccagttccagcaatctattcagtatttttcttacttttaaagttggtgttccaactccaaactcatcactcgttttattaagaaagtctagttcattcttatttaaatcgaattggcttatatccacatctctatctattccgtaagattcaatattactttcctgactattaaataacaagtcataagctatatcatttttatgtttcaaaccagcttcaatacctttacttattgcttctgctatattctcattactagaaggtataatgtcattggattgtttgactttattagcttgattaatcttgctagcttctgtttctagcatcaagttagctgcatcttctgaacttattttagcatatttcttaaatgccatttctgtagtatgccctgttattctcataagtatatgactatcatagccacgtttcagcatattactaatgaacgaacgtcttcctgtatgtgtacctatcaattcatatctacaataagtagtattagttatttttgaacctctatcttctgtaacaatatgtttgcctattatacctgccttttttcctgcttcctttatgtatttcaacatagtattctcacgtactttgggtacttgaaaattatacttttccagtatttctaaagcaataggaaacaatggtatcgaaactttatgtgttcttttcttttgcactatttccaatatcttcccattattaaagtctttaatagtaccattatttaacaattgcatatcactgaacctctgccctgtccaacattgtaatacaaaaacatctctagccttttcttctaagcctttgagttccaaagcatacattctgcttacttcttcttctgacagatatatttcattatcaccaccttccctacttttgggcttcttatacaggttcagcttcgctgctgaagtgtctattaagccgtatggttctgctctctttataattgaaatcaaagcggttactttataaccaacagtacttgtcttagtagtcttacctttacctatctgtctattaaacagataagtctcataatctttgattaaagccaaatttatatctgcaaacgttataccctctctatttgttgcttttagaaattcttcaaaaacctttaaatgtcccaaataaatagccaatgtatttctttgtccatctgattttatcgttttatcttggctaatagctctacgaagccactgaacaggcttctgcaattcttgttgtttcaccattctatctttgtaaatatatttctttagtaaaaataagctattatcaatctcatttggattatcgcaaatataacgcttaaattcaataaaatctgctttgagtttatttatctcatcgtttactattgcgttatttatattatccaactccgttaaccgtgggcttacatacgcttcctgcttttttgtgttccattggtcgggatacacccttactcctgtagataactttacctgctttttatttattcggcataccatatatattcgttggtctgtcacttttcggcttcctcaaattaaaactagccctaacttcattgaaaaaaatctgccctatcataatcggttctttaaaatggttcttttttatggttcttcactttggttcttttagggttgaaaagtgacatattgataaccaaaccatatttataagttactgataacaaataattgttacttccttttgaatgtgcgggaaaaaaagtaattttacatcgaattaacaagattgaatatgaacgacttttttacatcagaggaaaaaaaggagcttttttcactctatcggcacttgatgcaatctgccggagacagtatttcctggaaggattgccaaaaattaaagaatcatcttatcaaagctgcccaatataatgggctgcaacgcaataacttcgggatgaatcccgttatcaaagatctgcaaacggcagtcatcgtagccgaagaaatcggaatgaaaggttcgtgccttatcggtatcatgctgcacgagattgtaaaaacgcatattctgtctatcgacgaggtaagcgtggaatacggagaggatgtggcaagtatcatcaagggattggtgaaaacgaatgaattgtatgcgaagagcccggcaatagagtcggagaatttccgtaaccttctgctctcctttgccgaagatatgcgtgtgatcctgattatgatagccgaccgtgtgaatgtaatgcgccaaatcaaggatacgggaaacgaggaagaccggataaaggtagccaacgaggctgcttatctgtatgctccgttggcacataagctggggctctataagctgaaatcggaattggaagacttatcgctgaaatacacacaacgggatacttattattttataaaggataagttgaacgagacgaaggcgtcacgcgacaagtatatcgctgcctttatcgaaccaatcaagaagaaagtgacggaagcgggcttgaagttcgacatcaagggacgtaccaaatccattcattcgatatggaacaagatacagaagcagaaaaccccgtttgagggtatttatgatctgttcgctatccgcattatcctggattcggaacctgacccggcaaaagaaaagcaggaatgctggcaggtatattctatcgtgacggatatgtatcagcctaacccgaagcgtctgcgcgactggctgtcgattccgaaaagcaacggttacgagtcattgcatatcaccgtaatgggaccggaagggaaatgggtggaagtgcagatacgtacccgccgcatggatgagattgccgaacggggactggccgcgcactggagatataaaggtatcaaaggagaaacgggcctggacgaatggctgacttcggtacgggaggcgttggagaatgcagacaacgactcaatgaagatgatggatcagttcaagatggatctttacgaggacgaggttttcgtgttcactcctaaaggggatttgttcaagttggcaaaaggggctacggtactcgactttgcctttcatatccatagcaaactgggatgcaaatgtatcggcgctaaagtaaacggcaagaatgtccaactgaagcagaagttgaacagtggcgaccaggtggaaatcatgacttcaaatacccaaactccgaaacaggactggctgaacatcgtaactacctccaaagcccgcacgaagatacggcaggtgctcaaagaaatggtggcacgccaacatgactttgcaaaggaaacacttgaacgaaaattcaaaaaccgcaaactggaatatgatgaagcgaccatgatgcgcctcatcaagcgtttgggctttaaaaacgtgacggagttctatcaaaagatcgctgatggtgcgctggatgtaaacgagattctggacaaatatgtggagcagcagaaacgggacaacgacacgcgcgacgaaatagtctaccgcagtgctgaaggatacaacctgcaagcggtacaggaagagactacctccaaagaggatgtgctcgtaatcgaccagaatctaaaaggattagaattcaaattggcgaaatgttgtaatcctatctatggtgatgatgtattcggtttcgtaacggtaagcggcgggataaagattcaccgggcagactgcccgaacgccaatcagatgcgtgaacgttttggttatcgaattgtgaaagcccgttgggcaggcaaatcggaagggacacagtatcccattacgctgcgcgtcgtagggcacgatgatatcggcattgtgacgaatattacttctatcatatctaaggaaaatggaatcacactacgctccataggaatcgattcaaacgacggactgttctccggtacactaacggtcatggttggagatacaggtcgcctggaagcgctaatcaaaaagctaagaaccataaaaggagtgaaacaagtgagccggaactaatttttttcaccacagattaacacagattctcacagattaaaaagacaagatacagtatagccgctccgaagggactgagttcaaaataaattgcattaatttcacaatcctgcattttgccttttctttctttaatttgtgaaaatctgtgttaatctgtggtgaagaattctatcgcactttcttccttttataataaggataagtcaccaaaacaaaaaatatcaaagctatcgaaaccactatctgaccgatatgaagcattttgtctgtatccaactccatacagcaggcagctgcgatacctaaagaaatccccatttcactagccaataaatgagtggtatttgcagttccccgttgacaatgatgggatagcttcacgaacataatcaggaactccggcatgacaaaacctaatccaagtcccaggagcatggaagaaacgcctatcggagtactattcaacaatgatatggcaagaatctctagtccaagccccataattacctgtctcaatgttttttctttcagaaaaaagagacgagcaagcaagagagataccaagtaaccgccccccactcctacaaagaaaggcactgaaacacctgtgtttcccaatatggaatcattcaggaaaggatgtacaagaggcatcagcaatcccggaacaaacgtaaccagaatcatattgatagccggaatccaactacgcaacagtagaaaacggtcaaaagaataaagtctagtgacaatcggtgcacggaaaggtacatatattcccgatacgacaagaatccctaacactccggcaataacggatacatacagcaaattccggattggataactctgataaagccaaactccgagaacgatacctagaatcattcccaaacgggctacccacgaaaaactgacattccctgcgctacggagcgtagagttggtgatgtcaatagccaacgtgatacccgcagtagtggctacaccgaacgccaatccttgtacagtgcttagcaggataagttccgtaaggttcgtcacaaacgcatagcctaccgccgccaccaccataagagcgaaagcatatatatatacgtgcttccgtttgtaagcgtccaccaaataggcatggaaaggaccaatcaggaacattcccaatgtaaaaaaaagaaagattactcctgtctgtgccaccggcactccgagacggtctgccatctcaacggagagtaccggaaataacacatacaaggacacaaacaacagcaaattagctatacatatccgtataaaatgtgctgtccacaatgtaactgccatatattgctttaatattgttccttctcgttggggaagtagcagttcttaacgtcggacacataacgactgatagcatcggtcatcactgtgtacaaatcggcataacgacgcaagaaacggggacggaaaccattattcatgcccaacatatcctgaatcaccaacacctgaccatctacatgtccaccggcaccgataccaataataggtatagtcaactcaccggctacacgttctgcaaggattgcgggaatcttttcaagaacaatagcgaaacaacctgcttcttccagcaaatgagcgtcacgaatcaatttctccgcttcggcatcatctttggcgcgcacggtataggttccgtatttgttgatagactgcggcattaatcccaaatgtcccatcaccggaatacctgcaccgacaatgcgtctcaccgtatcgatgatttcttctccgccttccatcttcaaagcgtcagcatgactttctttcatgatgcggatagcggaagcaagaccttccatctcattaccttgataggaaccgaaaggcatatccaccaccaccatagcacgttttacaccacgcaccacagattttgcatggtagatcatctggtcaagcgtgataggcaatgtggtcacgttacctgccattacattggaagcggaatcgcctacaaggattacgtctatccccgcaccgtccacaatctgcgccatcgtgtaatcgtaggaagtaagcattgaaatcttttcgcctctctgtttcatttcaaccaagcgatgtgtcgtcacctttcttgtgtcatctgatatataaccagccatttctttctaattaaaaattataaattaaaaattaaaatcgaggcagcattggcgctacccgaaaatcgagggcaaagttataacatttaattcataacagagaaggaaatgcaaaaaatcctctcaatcccttgtcagagacagcaatttctcataactcattccggtaaagtcatccattatataatgtgcttttccagtaatggcttcgcgggaattggttgtagcgagaccgatcacggttgcaccggaagtcattcccgcctgcagaccatgaaaagaatcttcaaagacgtatgtgctttctggagtagctccaaatacttccatccctagaaggaaacaatcgggagctggtttggaacgggcaaacatctctccggtaagaatacggtctaccattgccggaaactcgggatgagcattgtagacgttctgcatcttctcttcattagagctggttactacggctatcttcacaccatgatggcggagttcggcgataaaagcttctactccgggaatatattcataggacatctgtttctcaaaaacattgaggtctgccgtgattttctgccgggcttccggaaaagctgaaaagtatttctcgtagatttgcgtcagcgtctgccctttgatacggcgtccgaaatcttcctcattcagatatttacgtccctgctcgtcccaaaagacggtgtactgtgtttccgtatccataataacaccgtcaaagtcgaacaacgctgcaattgttttcgttgtattcatatgaaactttctttttacctaaaacgttaaaccttgtgtatctatgcctgcaaagttccgaataatcatcgaatcagacaaataatttgtacctttgcaatgctaaaaaaaacgtaacggacatttttatccaacaaatcgacttttatttatccaacgaatcgactaacgtatgagcaagaacgacccacatatcttaggaaaggaaagcatcggcaagttactgctacaatattccattcctgccattatcggaatgacaattacttctatctacaacattattgacagtatcttcatcggacatggtgtgggggcaatggccattgcaggactggctatcagttttcctctgatgaatctcgtagtcgctttctgtacattggtatcggcaggcggatcaacccttgcctctatccgattgggacaaaaggatctgaaaggtgctacggaaattctgtcacacacgcttatgctttgtatcaccaattctgtcttcttcggaatattgtcctttatctttctcgatgatatcctgctgtttttcggtgccagtcacgacacacttccatacgcacgcagtttcatgcaggtaatcttgttgggaactcctattacttatacaatgataggattgaacaatgtgatgcgcgctaccgggtatccgaagaaagcaatgcttacatcgatggtgacggtagttgccaatatcatcctcgctcctatctttatcttccactttgaatggggaatgcggggagctgctacggcaacggttatttcacagctcatcggcatgatatgggtggtaagtcacttcatgcagaaagagagtacagtgcacttcgaaggaacaatctggaagatgaaagggagaatcgtagagagcattttcgctatcggcatgtcacccttcctaatgaatgtttgcgcttgcattattgtcattattatcaataatagtctacaggaacacggaggagatatggctatcggcgcgtatggtatcatcaaccggctgctgactctttacgtaatgattgtattaggattgacgatgggaatgcagccgattgtcggctataacttcggagcacagaaacttaatcgcgtcaaacagactttacgactgggaattctttcaggagtggttatcactagtagcggatttctgatttgcgaactattccctcatgccgtatcagctctcttcacagacagtgacgaattgattgatctggcagtagaagggcttcgcttggcagtacttatgttcccattcgtaggagcacagattgttatcgggaacttcttccaaagtatcggaaaagcgaaaataagcattttcttatccctgacgcgacagttgctttatcttctgccctgcctgttgcttttcccgaattggtggggattgaaaggtatttggatcagtatgccggtgtcggatgcattagcctttatcacagcagtaatcagcttgatgatatatattaaaaaagtatcgaaacaacagccgatagctgaataaagaatagttactgttcattttctcatttttattgttcaatcagtcctaattagggatttatcaattgcccatccgattgtaaactctatatttgcataaagttttcaaaactacaaacgattaaactatgttgagaaagaatttatattggcttttattgtgcctgtttctcgcaggatgcggtatgatagattaccatccgtacgatgtccacatcagtggtgagacaaatgtcaatgcacataatatagaaaagatagaagcaaattgcaaaggcaaaaccacaatccgttttgctgtaatgggagattcacaacgctggtatgacgcaacggaggacttcgtaaaagagatcaataaacgggataatattgactttgtaattcatggaggagatatgagtgattttggagtgaccaaagagtttctctggcaacgagatatcatgaacgggttaaaagtaccttatgtagcccttatcggaaatcatgattgtctgggaacaggagaagaaacttataaaacagtgttcggtcctaccaacttctcttttatagcaggcaacgtgaagttcgtctgtctcaatacaaacgctttagagtatgactactccgagcccattccaaacttcacctttatggaagaagagataacaaacagaagtgatgaatttgaaaaaagcgtagtatgtatgcacgcacgcccatttacaggcgtattcaatgataatgtggcaaaggttttccagcactatgtcactcagtataagggcctacagttttgcacggctgcacatacccatcattttcgggatgacatactctttgatgatggaatacattatataaccagtgattgtatggattaccgtacttatctggtattcactatagctccggaaagcacctctgaaaatcctgattatgaattggttgaatactaaatatattttatggacgggagtattatcaatacttctctctatctccggtccggtctcggctacttacagaacagatacaattatcaacacgtataaagccgattcactgcgcttcatcatcaaggctgactcaattatcgccttccaaaccggagattctttatttacgattattaaagcagactccgtattgcccgctgcatcgaaaaaagttaaacatacccgttacgataaacgggttcaccgtttccgcagaaattgggaacgaatcattcctacccactctaagatacagtttgccggcaacatgggattactttcttttggtacgggatgggattacggaaaacataatcaatgggagactgatttattgcttggatttatcccgaagtattcttcaaaaaaggctaaaataaccatgactcttaaacaaaactacatgccgtggagtattaatataggaaaaggattctctacagaaccctttacttgtggcctatacatgaataccgtatttggggatcagttctgggtaaatgaaccggaccgctatccaaaaggttattatggtttttcaagcaaagtacgttttcacattttcatgggacaacgcctgacttacgatattgacccgcaacgcaggtttctagccaagtctgtaacatttttctatgagatcagtacttgtgatctttatgtggtcagtgctgctactaacagctatctgcgtcctcgcgattatctcagcttgtctttcggactaaagttccaatggttataaaccaaattacaatgacttataatgatgatacataccctcaccaacaatccgctatttcggggaattactccggaaaagctctctgccaacctggaagaagttaattttcacgcccgttcatataagaaaggggaaatcttcgcttttatgcaacacgcattagccgaattaacccgcaacgacatcacagtagaagaattagttcaattgactttggaaacaggcaaacatggaatatccgctatggcacaactggataaagccaatactagcagctacggtaactccgaaaactgccgaacgacacggttatattgaccgttggctgtgcaaaataccgatacaatatgaagttcttgtcataagtattttatcctgaatattcatcaatcaggctcgaatcatgcagatcgcatcattcgagcctgttttcatattctcacaattagctatttccgagtatcagattgacttttttagacaatttaactaccatttttgacaaaaatacatcaaaacaggtatttcatttgttgctaaatatatgtaacttcgcacagtgaaaaataatgcggcattcttataactttataatatatagcatatgatatttacagcagaaaacaccttacttattggttctatcttacttttcgtcagcattgttgttggaaaaaccggataccgtttcggcgtacctactttgttactgttcctcgttgtaggaatggcattcggaagtgacggactcggtctccaattccataatgccaaagaagcccaatttatcggtatggttgccttgagtatcatccttttctcagggggtatggacacgaaattcaaagaaatcaaacctattttaggaccgggtatcgtcttatccactgtcggagtattgctcacagctctttttacggggctcttcatttggtggctatccggtatgagttggacgaacatttatttgcctatcaccacttccctattgttggcctctaccatgtcttccacagattcggcttcggtcttcgctattctccgttcgcaaaagatgaatctgaagcacaacctacgtcctatgctggagttggaaagtggaagtaatgacccgatggcttatatgcttaccattgttctgatacagtttatccaatcagcgggtatgggagtcggcgctattgccgcttcttttatcattcagtttatcgtaggtgctgctgcaggatatatactcgggaaactggctatccgaatgctgaacaagcttaatatcgataaccaggcattatatcctatcctgctattggcattcgttttcttcactttctccatcaccgatttaatgaaaggtaatggatatctggctgtatacatcgccggtatgatggtaggtaataataaaattatgcaccgtaaggagatttatacgttcatggacgggcttacctggctgttccagatcattatgttcctctgcctgggattgctagtcaatcctcacgaaatgctagaagtagccgctgtcgctctgctgatcggtatattcatgattcttatcggtcgcccgttaagcgtattcctctgcctgctcccattccggaaaatcacaatgaagtcacgcgtttttgtatcttgggtaggattacgcggcgcagttcctatcatctttgctacttatccggtagtggcaggagtagagggttcgaatattatattcaatatcgtattcttcattaccatcgtttcattggtcgtacaaggaaccacaatttcctttgtagcccgcatattacacctctccgaacctttggcaaagacaggaaacgatttcggggtggaactgcctgaggagattgactctgatctcagtgatatgactgtcacccgcgaaatgctggaagaggcagatacattgaaagatatgaacctgccaaaaggtacactagtcatgattgtgaaacgcaaagatgaattcctgatccctaacggaacattgaaattgcacgaaggagataagttgctgcttatttccgagaaatccaaagaagagtctgattctgaataacatttgaaaagaaatgtaaaattatatcagaattccttcgttaattaaccgtaaaacttgattttaaaattcggtttacgttaatgatatattaattttgcgcagttttaaactaaatgtgcaaaaacaaaatggaacaagaacatcagttcattgattatattgagcaaagtatcatcaaaaactgggacagagatgccctgaccgactataaaggaattaccctccaatataaggatgtagcacgtaaaattgctaaatttcacattgttttggaaagtgccggaatccagccgggagataagatagcggtttgcggacgtaacagtgctcattgggcagttactttcttggccaccatcacttatggagctgtgattgttcctattttgcatgaattcaaagcagacaatattcataatatcgtcaaccattctgaagccaaactactttttgtaggcgatcaagcttgggagaacctgaatgaggatgcaatgcctttattagaaggtattgcatcattggcagatttctcctctttagtgtcgcgcaacgaaaagctcacatacgctttcgaacaccggaatgccatttatggacaacgttatccaaagaacttccgtcctgaacatatctgttaccgaaaagacagaccggaagaattggcaatcatcaattatacatccggcactacagggtattctaaaggagtaatgctcccctatcgcagtatctggtcaaatgttgcctactgttttgaaatgcttcccgttaaaccgggagatcatatcgtttccatgcttcctatgggacatgtatttggaatggtatacgacttcctatacggattctcggcaggcgcacacatctatttcctgacacgtatgccgtctcctaagattatctcccaatcgttttcggagataaaacccagagtcatctcctgcgtaccattgattgtagaaaagattataaaaaaggatattcttcccaaagtagacagcaaaatcggtaaactactgcttaaagtacccatcgtaaacgataagatcaaatcgttggcacgacaagctgctatggagatattcggcggtaattttgatgaaatcattatcggcggcgctcctttcaatgctgaagtagaagccttcctcaagaaaataggtttcccctacaccatcgcttacggtatgacagaatgtggtccgatcatttgctccagccgctgggaaaacctgaaacttgcttcgtgcgggaaagcgacgacgcgaatggaagtaaaaatcgattccccggaccctaagactcatgcaggagaaatcatctgtaaaggagccaatcttatgttgggctattataaaaatcaagaagctactgcgcaaatcattgacgtaaatggctggttgcatacaggtgatctcggcactatagacgaagaagggaatgtaaccgttcgcggacgtagcaaaaacctgctcctcacctccagcggacagaatatctatcccgaagaaattgaaagcaagttgaacaacatgccgtatgttgccgaatcactgatcgtcctgcaacatgataagttggtagccttgatctacccggatttcgacgatgctttcgctcatggattgcagcagacggatattcagaaagtaatggagcaaaaccgtattgaattgaatcaacagcttcctaactattcccaaataagcaagattaaaatccattttgaagaatttgaaaagactgcgaaaaagtcaatcaaacgctttatgtatcaggaagcaaaagggtaatcaagaacctttgactaattaagagtacatacttataacaaataataagataagtattctcgtaaataaaaacggtggacagcctcaacactgtccaccgtttttttctaacctctaacaaactttattaaagtgcgataaatgaaatagcctgtccgcctccggcagccattcgtatgttcaacgtattttcagaagtaaccgtttgttccgttatccggtaatccgtaggatttgatttccaatccgcattctctccatccgcatagatgacagctttatactgtttgcccggttccaggaaatccagttttatttccagtgtacggggtttctcgttcgttgccgctcccaagaaatagttaccttttgctttacgcacgatggctacaaattcacccggttctcctgccaatgctttcgattcgtcgcaatccggatcgaaatcgcggaagaactggaaagccggatgtccctcataatgttcaatcatatcggaagccatttgcaaaggggaatacaaaatcacccagttagcaagctgtttcgccaatgtcgtgttcacacggctgtttcctttatcctgatcgttccatttccggcgacggggagaatcctttgtctgtaaaaacaaaatatcaaaagttccaggagtgtaatccatcggaccggataacaggcgggtaaacggcaacatcacatgatgggaaggaggattaccttcgctccatgcattccattccatacctcttgcaccttcacgagtcatcatgttaggccatgtacggcgaataccggtatctttaatcggctcgtgtgcatccactgtcattttgtgacgggcagctgcctccaccactttctgataatgattaaccccatactgtccatggtgcgaaagtccattcgggaaagcacccgcataaccggttttcaggatatgaataccatgttctgtgtaccattgcatggcatgatccatctgacgttcatagttggggatattgcctccagtctcatgatgtccgatgatttcaacacctttctctttggcataatgcacaatctcgtcaatgtcaaaatcagcatacggtttcgtaaagtcaaaattctgcataccaccccagctttcccatccttcgttccatccctcaaacaaaacaccctctatatcattggcggcagcgaaatcaatatacttcttggcattggcggtagtggctccatgacgttcgtccatcttccaagtctccacacccaaatgcattccccaccacactccgacatatttcaagggacgaatccaatcggtagtttccagtacacaaggttcgttcagattcaaaatcaaggaagaattaatcagcccgacagcttccggagcaatctggatggtacgccaggaagtagtaaaatgattgcctttacgcactttgataccatccggccaaggagttagctcagctttcaatgtatatcttccggtctgcttcaaagtcatttcggagaaatcatacaaagccgcttcatgaatactgccataaataccgtccgccgttttgaatgtgaaaggagtattggcagtttccacttcggaaataggctgttgcttatatagtaattcataagtctccgcactggcgggaattgaccatgaagttccgtcctgacgaaaacgaaaagttgtcagttcatcggttatcatcaacgaatccactgcgggaacactgtactcataacggaaccctactccatcatcaaacacacggaaacgaagtgtcaactccacctgatctttattggtcaggctcaccgccatctcattataatgatccctgttctttttattctctccccaagcctgtgtccaaatctcgtccttatgatcgaaagtcgtactctttatctgaaagccttctcctaaagcaactccattcccttctgtaaaccccattgcagagttctcaatcaatagtgaatcgcctaccgagacattataaaacggagtaccgttctcgtccagcgtgaaagccatcttaatatggccgtccggtgatttgacttctgttttcggactgctacacgcataacatcccagcatacacagaaaagctccgattgcataatttattttcatagcactatatctgttatttatatacagtacaattcagaagagaaaaacacttatataatcaaggtgaatttctttctaataaggagaatctctttctccggtatgatttctattcttatttatgcaacagaatatcagttcccggaacaatctttcccatcgaccacacacatcgcacattcagttccttatcaagaatcacaatatcagcatccttaccctttgccaacgcccctttccggtcatccactccgatcaaacgggcaggagtctcggaagccatgcgcacggcatcttccaaaggtatgttcgctttcttcaccatagtacgcaccaagatatccatcgtagccaagctaccggccagtgctgaatggtctgccatcttacacactccatcctctattatgtagcgtggatcaataggcacagtaccgtcacaagcagcataagccagagcatccgtgacaaggcaagtattttctgcccctttcaatttataaactaatttcaagatagtagccggcaagtgtatgccgtccgcaatgacttccaccgtcattccttctgtcagatatacactttctaccgtaccttcgtacttatattcacgacgtttatgaaaacccggcatagcattatagaaatgagcggcatgagagaatcccactgcatatgcagcctttatctcatcatattcggcttcggtatgagtcaccgccgtcataatcccctttgaacgggtgtatctggcaaaatcatgcgcaccgggcaactccgggctgatatcccaacgtctgatgcaagacgtatgttccagcaaaggaatatattcattttcatccggtgttttcagaaatccgtcatattgtgttcccgccatcttcgggttcagataaggcccctcgatatgcagaccgagaatcggagagtctttctccttcatcagattctcgcatacatcgaccgcctgataaagcctttcgaaggaagtagacgacaaagtaggaaacataccggtagctccatgtttcaagtgtgccatagtagcagcacggaaagcctcctccgtcgtttccgtaaaatcatgaccaccacctccgtgcgcatgcatactcacgaatcccggtacgattgtcatcccacgagcatcaatcaccgttgcaccgataaccgccaaatcactgttggtcacctctaatatttttccatcacaaatcaatacggaaccgtctttcaaccatccttgcggagtcaatatccgtccgttaattatctgagtcaacatagtcttcttatttataggatttaaaacagtttattggttccctctaccaattgtcccattgcccacacggctcttacattcaagtccttgtccaaagcaatgatatcggcatccttaccacgttcgagcgtgcccttacgatccagcactcccatgatgcgggcaggcgtttcagaaatcattctaatcacatccgccaatgggatttccgctttctgcaccatcgtacgtatcagacgatccatcgtcgccacacttcccgccaaagcggaacggtcggctagtttacaaaccccgtcttcgataatgacacgggggtcaaaagccgtttgactgtcgctcgccgcacaagctaacgcatccgttatcagacaagtacgctccactcctttgatcttgtaaacaaggcgcagaatcgtcggcggcacgtggataccatcggccactacttccactgtcatatcgtcaatcagataaatactctccaccgtaccttcatatttgtactctttccgtttatggaatcccggcatggcattatagaaatgagtagcatgggtatatccggcttcgtatgccgtctgtatatcttcaaactcagcctgcgtatgacctactgaagccagcacccctttcgccgtgatatatttgccgaactgcatggctccgggaagttccggcgcagcgtcccaacgcttgatgcagtgtgtttcctccaacaagggaatatattcttccgggtccggatctttgatattctccggaatctgtccgcccgccattgccatattgaaataatggccttcaagatgaagtccgagtacaggactgtccggttccgccatcattttctcagtggtctccgcagcagcacggatcatcggaatggtagaagaagaaagagtaggaaaaatactggtagtaccatgctgcatgtgggctttgattgccgtacggaaagcgtcttccgtaccttccataaagtctcttccaccgccaccgtgaacgtggatttccacgccgcccggaacgatatacattcctttggcatcaatcagtttggctccgataatggcaaggtcacaattggttacttccagaattttattgtcgcgaataagaactgacccatcctttagccagccttgtggtgtcaggatgcgtgcattaatgatttgtgttaacatatcatttttattaaattaattataggtctacataaaccgatgactctctttcggggggaagtacatcgatttctcacttgcaaaattacgcttttctatccaaattattgataaaatcgtccgctaaacgtccaataaggtacaaaaaaagaggttatcagtcttattgaccgacaacctctataatttatctggagcggaaaacgagactcgaactcgcgaccctaaccttggcaaggttatgctctaccaactgagctatttccgcaaactaaatttcgtcattcagaaatctgaaagattggtgcccagaacaggactcgaacctgcatgcctctcgacacacgcacctgaaacgtgcgcgtctaccaattccgccacctgggcaaaacttagttccatcatttcaaagaaacaagagcggaaaacgagactcgaactcgcgaccctaaccttggcaaggttatgctctaccaactgagctatttccgcatttcactttaacgaaccgtgaagagaaggagactcgaactcccacgacataactgtcactaccccctcaaagtagcgcgtctaccaattccgccacctctccataattttaaagtttaacctttgtgcccagaacaggactcgaacctgcatgcctctcgacacacgcacctgaaacgtgcgcgtctaccaattccgccacctgggcaaagattattgttccaacatttcaaagaaacatgagcggaaaacgagactcgaactcgcgaccctaaccttggcaaggttatgctctaccaactgagctatttccgcattttttcgtttgcggttgcaaaggtaggcattttccgtaaacctgcaaacattctgcacacttttttcaaagaaatctgctcaccttgcacccgatgcaaaacaatcaatttgattatcaactcattcggtcacgataatcttcataagaaaattgcttgtatatttcagctttcccctctttggtccagatagcaatggcaggatgatgaattccgttaaacatattcgttttcaccatcgtatagtgaatcatatcttcaaacacgatacgctctccgatttgcaactcgtgatcgaaactccacagtcccatatagtcaccactcaaacaggaatttcctccaagacgatagatgtatttcccctcatttcccatctctgcaccacgcacggcaggctgatatggcatttccagacagtccggcatatggcaggtgaaactgacgttcagaatagctgtcttgattccacgactttccacaatatccacaacctcggaagccagtacccctgtctgccaagtaaaagccgatccgggctccaggattatctgcaagtgtggataacgcgttctcaattccttcaacagttttatcaaatgctcagtgtcataatctttgcgtgtcatcagatgtccgccccccagattcaaccatttaatctgcggaaaccaacgggaaaacttgctttccagatgttccaatgtacgttccagctcatacgaggaggactcgcaatgacaatggcaatgaaaaccttcaattccctgcggcaatgtctccggcagcaagtctgccgttattccaaaacgggtacctggcgcacatggattataaagttctgtttccacttccgagtattcgggatttacacgaataccacatgagataccgcttccttcggcaaccgtcatcgaatagaaacgttcgaattgggccatcgagttgaatgtgatatgactactacaacgcatgatttcaggaaaatcctgctccgtataggcaggagaatacgtatgtgccttgctcccgaactcttccagcgccaaacgagcttcatacaccgaactggctgttgaatgacgtatgtattcacggaatataggaaaagaacgccacatggcaaacgacttgaaagcaaggataatctccactcccgccctgtcggctacgcttttgatcaatgtaaggttctttcttaagagttcttcttccataatataacaaggagaagggaactgtgcaaaatctatcatcatactatttaaattttatctaaaattccaaagtaacgcctcaatgacgcggatgcaaaaatacaaattcaaaagcaaagagagattgttttatttttaattaagatattgcttttcgagaactttttcctatttttaagccttatattatttataagtagttgtatcatcctaaataactgattgaatatgaataaagatttaagaaaagtagtgattctgctggcacatcccaacattaaagcctcacaagcgaacaaggcattaattgacgctgtcagtgacatcgagggagtagcggttttcaacctttacgaattgtcggaagatatcgctttcaatgtcgacgaatggagtaaaatcatctccgacacttcggccgttatctaccagtttcctttctattggatgagcgcaccgtcattattaaaaaaatggcaggacgaggttttcacattcttatccaaaactccggccgttgccggaaagccattgatggtagtgacaactaccggttcggaatacgaggcctatcgcagtggtggacgaaaccgattcactacggacgaacttttgcgcccttatcagggaagtgcaattcactcgggcatggtatggcagacccccattgtgatatatggaatgggaaccgcggatgcgggaaagaacattgccgaaggagcgaacttgtacaaacaaagagtagaaatgcttattaacagcagtaatgcgggaaataattggtaaaaacaaaagcgtagctttatccagtctaaagctatgctttagcatacctaaagcacagctttagaggaggtaaagctacgcttcttcttcagtgtcagtacgggaaaaaaaacactccgacactgacattatcaacccgccaatagtgcctgccgccaacgggaaccagaattcctccttttccgctcctaccataaaaggaataaatcccaaaacgatagaagcaactgtgaggaagataggtattatctttgtattccatgccttcacataggtccgtaacggtgcaagacacggaaaacgcttacgaactgcattatattcattcaatatataaatgcttgcattcaccgtgatgccacaaagcaggacaaaggaagcaaaacctccctggtcaaaattcagtttgaaccaatagaacgtcaggaacacgccaatataagataccggaatcacaaaaataatagccaacggctgtttcaacgaattaaaaagaatactcgtaataaagaatataatgccaattacgatcagaagcagaagatattgtttattatcctttccaccccacgaccagttgttatcttctgatttcgcagtatatcccatcggaaggacttcattaaacttctccaaatccttcttcagcaatttatgctcctgttccgaagaacctatatactcgtattgcaggcacaagcggtattgctggttttcctttgccacctcttgcggcatctgtcctttttcgaatccctttcttctgattgtcgggaagaaagccttatcttttccgttccttcctccgtcagtactgagccgatttccatatttcgcccatatatcggacggataacggaaaacaaccctccggctccaattccttcttcaaccatccgccgtttgttcagattgaagtagaactccatataatcatctttccaccacgagacaccagaacctatcgtcacttctctaatccgccgatgctccaatagctttactttcagtttctccgcccaatcgtaaagttcgtcataattgtacccgtacatcttcactcggaaagaacccgcattctcacgcacactattactaaatccctgatcctgcaacccatagatactccaatctccatcacccaattaaagagccttacttatcatattagctttcaacgtataagagaacccgcttttctggtattctttggtgaaatagatatggatagatgccttacgggcactctctacggacgcttgaaactgtttgatttccttaaatccactcagataggtttccatccgttttatctgtgtattcatctgctcaagcgtgctcccattcggtagattcgcattggcgtggagcaccacttcttcattgcgtgagaaatagctcccctcatacaccttttgtatgaacagccgcaagcttccgcccaacgccttatccacaatcggtttcaccttttccttataagtagaagtacccaacgtttaaaaaatagcgtagttctctttaactttttgagtttcaaaagataagcggagcatagaaaacagacaggtaacgatttggcgatgaaatagggtatggaaagggcagatttcccgtatatgcgtctctttattcctgaactatgggtgtaagtcacatggttatggaaagatatccaccttttaatggggtgagctgctggtaaatatctgatggaaatgtcccgtaaatcacaggagaatagccatacaacaggcttgtacacaataattattggataaacgtggtccgctcctgcggacagcagggtgtgttttcgttaaacgaaaaccggacggtttaacggcggaaacgtcgccaaaccgtatccccccccaaaaaagctccggagtcgcttttccgtactggtatcagaaaaggagccgacaaatcacataaagaaggaaagtgaacagttttccaatattttagtcagaaatcatatcggaaattttgagcgatacatgtatttttgcaaaataaacagtactccttgctgcttatccgaaaacattgcctatctttgtaaagtcgtgcaaacgactgacatatatagttgatgtgtttcgctaacaccttgtattagaaatctggtaaatttcaaaatggaagcagggctgagcagtaacacttgtcacatgtatccgtatgcgaatgacatgcgatataggtgtggggtactgttttcatttatttgcttccgggttttaccagaacctctaatacaaataagtaaaccggctccacactttcttgttagatagtgtggcattcaagtccggtggcgaaaatggggtcagtccgaaatgttgattttcaataatggaatccatgtgtgttggataattgtcggataattggtcatgaatgaatagaaatccgtaaaacttatcagcattcataagaaaccatgtgtaggatttggctatttttacgcagaaaaaacggataagattatgaaaaacgtaattgctataataaaaaacgcttggggtgacagtctgccaccgaaagtcaaaaccggctttattcccaacccctgtgattgggagaagaaaaattatctgacgagccccggctcttactaccggcaaaaggcatcggtcggattcatagccatgaaaggatggcttttcactattttgcgtttgccgagctgtacctttgctaaccaagcgttttcctactttccttttctattctctatcctgaataatcagattctcgcaatatataaattatacaattacttttggaatgatatgaaggtgtcttatcctgtaaaagctgctatgaaaaaaatagcattcatagctttgtttgcaggcatggtattgtcagccggagctcaaaatacaaaccggataaccgaagaggagcctgatataaaggtgacaaaggatacggtatggaatatggctattgaaaagaaagcggcacccaaggtacaatttccccaaccgggagacaaaattgatgtactggatcctatcgtgtacagtttatgctataccaccgcctatgataggcttgcccggaaatccgtcaaggtgaaaacttacaggaaagagtacgctccgtatatccacgccggctatgactttggcgtaaagcattggaaagaaatcgtactaaaagactattcctcgctctggaaacaattgaaggacattgcagagagtaccggaatggaaaggacctgcttccgcaacggagcccttatgggagcatactcaacaaatccctatccggaactagattatatcgacgccgcaatttccgatgtgctgaaacaggtaaggaagcatatcgcttctgaaaatgagatgtcccggcattatgacaccttatccgataaatggttttcttttttcaataaagagaaagaacgctattacgacatcgcaaatcacaacagaccttatttcctgtgtcaagagcatgccgacgatgcccttattcttccagagtggatagataccgtcacagcaagcaatgacatcacccaagcggaagccctggcttcggcaattgcaaaatttgactcccctgccgttccggacggaatccgcaaactgaaagacaacaggaggctcactcctgatgaacgaaatgcattgctggcacctaacgatatgatttcatatgcagtgggagtagcacaggctggctggatcatggaatataaatggtttataggggaagcccacagagaggagtttgatgcaatgctactttcccgtgggaacagtcctgccatcatggccgcttttgaagacggactgaggagtgccatgactataacagaatgttttaaaaatgcgattctgtgtcaggactgcgactcgatatgtcttatgaacaaagccatcaaagcagaattgaacaaagcatacagacaaggcgtagtttatggttatgtctttatgaacggaatggatgccgtcgaaatatacagggccggtgccgagtgggatattcctgaaaaacaaacggccagcggattgcggcttgataaggaccgggtgcttgaaggtttcagggattatctggagggacatttgaaaatgggagtcgaatatgcccggacactgaccaagggacgcaatgccattgactggcatttatatgaaaaagacacggagacaatagacctgtctgaaaacggattccagcctgccgttccgctacatatcacgacaggcacatcaagcgagtggagcgccgaactgtcgcagatgattacacttccacaggaagttgtcgggcagaacattacgggcaaggtgatggctacggtggtaattgaggccgatggtgctgtcagcaaagtggaaattacaagctcgccgcatccggttttgagcgaaactgtaacggattgcatctaccgcatgaggttcatgccggcaaaatatgacggcgaatgcgttgcatctgttgccattattcctgtattattctaatgaaaacacaatacaaccattcatcatgaaaagattattatcaaccgtcctgcttgcatatctcgtactgggagcatgggcacaaaacaagacgaaaatgacagaagaagagaaaaaagaggccatggagcaacttgaagtgctctatcagttcgagactggagcagcattcggcgaacttgattcattgacagagaaccaagagttcaaacaggagaggctcccttgggaaaaatgggcggacaaattcaagcacaagagctttaaaaacggcctgtcaagattgttcatgtgctttgacaaggcattcatagagccgaacaaggattcttctatctttttcaacctcatgctaagaggcaaagaagaagatgtatcttcatatttcggcggtcggcaaggatccggcctgtgggaaaagtattatcacgaggatgagaacgggaacttcacggggttctgcaaagaacttttcttcgacctggagactgatttgcagcttcatttgactgacaagcagggtaaaccggtctatatacacccggaagaagacatctatttgcttgagggcggcgactatgccaagaacaaagacatgttgaatatatggttcggattacagataccactgactgttccttatcaggaaattgcaggcggacacatctccttgtctttctatatgcctcaggaatatgaccgcatcacagtacccataaaggattttggagacaaaccggtgcaggtgacttggggcagcaagactttttccatagaaaaggttgacaacaacggcttcatcatttccgcagacgcagagactctcgacaaactgaaaggcatgaagcgcctttatcacagggacgggaactggtacgagccgtcctcttcaacagccacaacaggagatttggacaagattctgaaaaatagtacaaggaaaatcacgtttgaagagtggttgaaagaaaatggcatcgaccctaacaacctggaagagaccttgaaacactttatggaagatgaagattcagagggaaatgacgatacagacgctatcggagtgatgggaaagcactacacggttgccttgcagggggacagcctgctgctctacatgccggtcgaaaagagacggaaaattgccgagataactgtatttgccccatcggaaggagaagcatcccggttaataatcaaccgcgaacgatgcaacgaacttatcgaatggttgtgcaccgaaaaatcaccggacaataaaaagcaggccgaaccggaagagatggaggaagtggattatttcagtcctgatttccagccagccaagcccatcaacccgcagacaggaatgccggacgaatggaacatggtcttggcacaattgctcaggaagccggaagaggcagtcgagcaaggaattacaggaagaatgacggcggaaataaccatcggggctgacggcgttgccagcaacgtgaaaataaacggagacccccatccgctattggaaaaagcggtctgcgactgcctctacggcataaagtatgtcccggcaaaatggaagggaaaagcaatctcctttgtcgccactctccccgtcatttttaactgaccgagcctatggaaggatatatcctgattgtactacagattctgataaccgtactgattatctggagaaggaagcaagactccaaagagccgttaggctgtctggcggcgggttttattttcatgattgtatttgctctgaccaccgtactgttcagtctggggcatcttatcatcaatgaaggactgtttgccaatatctttgcagagaacagagggtcgctcgccgccgcttctcctgtggaatggctgatggctggatttatctgtctgataatgatactggtatctgctaccgtttgctctttggctggctatgctgtcataggccgtcaccccaaattctgcaaactgatatggaaaacactggcagtaatcctgctgtttcccatcatggcattgggaatattggttgcggcatttgggtttgcctatattatctgcatgaggtttgcctcacccatgtttgactatatcagctggggctggatgcttctgctcttatttttctgcgtgatgtgcttgcttggattttccggattcgtcatttacctgttggaaatgaacagcgagaaattaaaagaatacgatgaaaaggacagcagacgttctttcagaccagtcgatatgaataatcatgagaaaggaggcactatatgatacgaaaacttataatctgcatagccgttctggtgggtttctgcccgatggcatggggaacggtcgatgatgtacctaatcccaagacatacaatgcggacaattgggtatccgaccctgaccatatattggacagtgaaacgaaaaataaaatcaacaatatattgcaacaactggaagactccctgaccatagaagtggcagttgtcgccttgaacagcatcggagaagaggatccgcatgaatttgccgttacgctgttcaaccggtggggtgtcggcaaggcggaagatgacaacggactgctgattctgctgacccgggatattcgtgatatcaccttcaagaccgggtatggcctggaaggtgtattgccggatgccatttgcaaaagaatacagatggaaaccatggtgccgcatcttcgggaaaatgactggaatacaggaatgcttgaaggtgtcaaggcggtggcggcagttctgtacggaagtgactatcaggcagcaccgccggaagcatggataaaaaagttccggcgtaccaccccttccctggtctttatcgtgtttgccctgatgctgatacttataaactggcttgtctggaaatcagcggtaagcaggatgacacccaaagacgaagggacggaagccgcattggccttgctggcgacccgaaaaccctttactgtacgcaccctgctcggactgtgctggctggtaccggtgtggcccgccattcttggtattgcctgctggtatttcggcatacagaaacaaaagaccctcaggcgcagccggacatgcccgaaatgcaatcgggaaaccctccgggagattcctttgcacgagttgataaaggatacgaaccggctgactgaaagcgaacgcaaagaaacagaactgaagacggcctatatccgcatctaccggtgctccgcttgcagcgaagaggtgaaaatccggataccgcttgaaaaggacggctatgaatgctgcccctcctgcggacaaatgacgctgcacaaagaagaaaaatatcggactattattaaagccaccactttatcagaaggactgatggaggctcgccatcgatgtatgtattgcgatgccgaatacatggtaggctatacaataccgaaaatcaacacctcttccagacgttcgggaggctcaggcggtggcggaggcggcagtttcggaggaggatcgtccggaggcggaggttcatccagccgtttctaatacagtatatcaatattaacaaaaacatgcaaatcatgaaaactatttttatcatgggaatcttgagtttcttttgcggcatcagtgccgcacagcctcaatactggggtgagggtgcatacgatttggaaaatgtggagttcggaatgaaggtggacaagtattattccaaggcaaagccatacgacggggattatgacgaatcattccgctatttcatgaaggaagaagtgaaatgtaaaacccaggaaggcaaaaaggcggttattcaggaatacagctcggtagaaacaaactacggagaagtgcttgcccacttcgggaactttgaattcccgtataccggcatgctagcggacaaatcaggaaaactgatcggcattctagcacagggaaggctggacggagcggcaaatgtagattccctgctatatgccattgcagaaaagtacggcccccaatgctttgtcacagaagagtatttcggacatcggaattatggatggcatgtgaatgaccgaactatccaactatatgtacgcaagccgaatccggagcacaaggatgccgtgatttatcttgaagagaacgaaaagggagaacggaaaattgttggcggaggcagccaacctcatacctggtatgaagtgtgcctaatggtgacaaaaacgaaatatgattcgttcatcgactgcatcagcgtcggtaactggtgcaatttcaatgatctctcatcagatgtccgaagcatggaaatcaatccggcagcaggcatatacgacaccggcgagctatttacagaggaagaccttgtcccggacaccgccaagggatatatgaacatcccggacggagaacttcccaagttcaaggaaggaccgttcgcgaaattcccggatttcaggcttgccgtgcgccattggatggcctataatgccggcctcggaaaccagggaaatgccgaagggaatgtaagtgtatccttcacagtgggaaaggacggcaaagcgaaggatgccaaggtggaaaaccgggagagcacatcgtccgaattggaagttgcagcactatataccatccaacggcttcccgaatttatacctgccacccaaaacggaaaacccgtagcattccgcatgacggtggccctcaggtttgaaaaccgataaattttctctgctatggacaaaagcttttcaataagcggttatctcctttcacgcctgcaaccggacgatccccaggaagcacgtttgcgtgtgctttgtgtgaccatatccaaggatatgccggaggagagaagagagcggcaactgcgtccctttgcatcggacatggaattcatgaatatgattgccggatggatgaacgggcttcccgaagcaattagccatgaacagccggactttgagagatggctggagctgttcatgactgccggtgaagcagaatccacccgctatgtcatgcgtttgcaaatatggtacacgcattattgctgcgtaaaagagttactgactttatgccgattgctacaaaggcatcgtgaagaacatctggaagccatctatcacagaatgctctactacttccgcgaagcgagaatacaatgcggaatgccttccacttccgaaccgacagaaggcattgaggtatcattcaaactgctcgacgcctcctacgaacatatcaaccgtaaaatcattttgcaagcggaagaactgctcggtatccataccgaccattctttcattcagaaagtgatggaatgccataatgaagcgaagacagcagaagaattggcggaactatgcggagcaaacagcaccgttaccttccgtcggacattcctgagattgtttaactgtccggtagcccagtggcttcggcaaaaacgtgccgagcaggtgctgaaactgttgaggactacacaccttcccttaccggagattgccgaagaatgtggatttgcgaaccagtcttacctgtctgatttctgcaagcggaatctcggtgatacaccggtaaatatccgaagaaacaggagctgaccatttattataaaatgaacgaatatgaaaattaaaacacttatcatcattggattgacagcatttttatgcttatccggtgcaacagcccatgcacaatcagacaaacagattatcaacatggataacccggactatgacatcgatgtggaacgtttatgttctccatatattgatttcgataatcccaaagagaccagcaaagaagtaaactatcactatgtgaaatacacacaaaacatgaacgtttctttttctgagagatatccgattttaatacattatataagtatggatagtctcgttaccaagaaaaacacattccggtgaaaaaaatccatctataagcatactaaagaatcattttctatatttgctgtattacaaatagataacaagccattaaaaaaacatgcctatggaacaacaaacaataaccggttcgggactctatatccttatagctgtccagctgctgttctccatgctgatactgttgcggatacgccagtaccgcaaaaagccgacaggctgcctgccgtccgttctcgtcatcctctccacagcagtcttcacctctgtgctgtattacatatggcaaatcgtgtgtgatgagaacagccgttggacagacctcggcggaatgcttaccgcaggatcctggcaggagtgggtggcatgggcattttttggactgttcgttgtgctgttcaccgctgcaggctgctccctcttcgggtttgccctcaccggtcatcaccccaagttctgcaaagaaatgtggcggagcctcataggaatgatgctcatcccattcctcacactcgccctgctggctgcatccatgctgtgcatcagcctttcagggatgacacttttcacttggctgttttccgaagcagcgttcagcgacgtggcgatgctggtactgagtgccgccctattcaccttcggatatataggacttctggccttcctgttcaagttcaacggcagtaagctggacgcatacattttagaagacatagagcgttcttacagacgtatcgaagaaaccaacgagaaaggaggcaaacaatgaccacactaccttttcttatattgggaagcctttcccttcttctcctcaactggctgacgtggaaaggactgaaaaattacctgcagcccaaaggcaagacggcagccactgctttggaacagcaactcacggagcaggcatttgcctggcgcaccctcatcggcctgctgtggctggttcccgtatggcctgccattgcagctgtgatgctatggtacagactgagattacgcaagcagatactcagccagagccgcacttgcccgaaatgcggaaaagagaccctccgcaagatgtcggcacaggagataaagaaagacgcccggctcttcaccccacaggaacgaatggaactcaatctgcagaccgtctgcatccatgtgtacacctgcaccgcctgcggagaaaaggtgaaagtgcgcatccctcttgcgacaggtctctatgaatattgtccggattgccatggtatcaccttacatcggaaagaagcatacactgtggtggaatctcctactgaattctccgaaggactgaaggaagcgcgtcatgaatgtaaatactgcggtgctaaatacatcgtagggcataagattcaccgtacacatacatcttcctgtcacaactcttttgatttttgaacaatacccttacagcctgtttccggcaaaccatgaaactatacgcagatatgatgaacaagcatccattcctccccgctccggcagccgttgccctatggttcgggctgctttgcctgtccgcactcagctcctgtacaggatgcagttacaaccacgaaaaggcgatgggaagcatagataacattctgggcaaagtagatgccctgatggccaagacagacagttttttggaagaacatctgccggaagaaccgcctatagactacgaaaaagagggagtgaacagggaacacctgtttgtatttacagatacgacaataacctacaacggcaagccgttcatgccgggaatgacaataggagaacagtgtgagatattcggacattacgaacgtcttgcggaacccggaatatttatatgggattctttgggaatcattatggtatcacacgatgaaagcggaaaagacagtgtccctgtaagcaaaataatgattaactggaatatagaattagatgattttctatccgaagaaaacctaaaatggctaaagaaccactgcccacgtcagtattttacgggtaaaatgattgtcggaggagcagttttaggcaaaggtatgcacattgataattttctgaaaaaaacaaatctgaaattcaataacaatccgttccctctgctttactattgtcatctgcatgactgggattacaccaaagcgcctatacacagcagagaaaaatattatacctatagaatcaggaagtctgaagacggtaatgatattgaaaactttgatattgccattaactcacgaggttttggtgaccctccgtacgaaggtcctgaatatgaaaagtatataaatgtagaaaacgaataatatacataatatgaaatcaatgattattgcgcttctcgttgctacattaagtctcaacggctatgcacaaacagatacaaaaaaatagaataataaaaacgaatttgaatatgaaactgaaaacacttttaattcttgtattaataactttgccaggaatgttcaatagtttcaaagcccaatttgtctattcaaataagtataataattttgttatggctgcttataatgaagaaatcttcgacagacaataccgcgacttggagagcaggataattacctatgatttgtctgaaaagctgatgtttttatcttcattttcgccgtgtgcagtcaggagtaagatagacacgttgtattataaaaatgacaccatatctcaagaactcataatcagaaaaattgatgacagaagaatatattttgccttgtcctcgcaaaagattcaccaaaagcaaaaagaaaaatgtgaaggttacgcttctatatctgattatattgaccttgcttcagaaacagatttcgctgaggatgggtcgttgtatccagtcattgaatattggtgtgaagatttccctttgtcaatgtcaataagaatcagtcatgattatagtatagcgacaatttcattcgcaaaagaactgtctttaccgtttatttatcctctaaagaaaggaaaatatataagatgaaaaatattcttgccatactggtagctcttctgcaactcctactgtctgatgtgataattcaaatcgtatttggttcttcacttttgtgggagacatcaggctctgccggatcagacataatactgttcgttatagaagcatatatgggaggtctgtttttgctgacaaacttattcatattgtatgaaagcaaaattataagtaccattctgatactttggctatgggggctgcttatgcttatcgtattaagcgcgtctatcctgctggcatttattccaggatatgctatcggaatttttattgaatatagagttaaacgaaaaatataggattatattgctgtaattcaatgtaatttgatacctttatccggtaaattatcaagaaataacactaaataacatagcgtatgaacaacaagattttaacattaggactgttatcactggctttcgaagtgtctggatgtaagaatacaagcagacaagcccttctgttgcaaaatgtcggatttcctgttcatagaatccatcgtaatcccggacaatacggtattgaccgactgttttctatgcgacagtgaaacggatgaagtaaaatatatcaattgaattaacgaaatgataaaagccggttcattaatactgatatattttgaaaattcctcagaaaataaaacgaactaaaacaggcacaaccatgaaattcggaaataataaaaacagacaacatcgcaagaatatcataggagataccgagtgtcaggaaaccgaaatgagaaaagggaaatggcataaaagaaagtgttggactataatattggggagtgctttcttatggccactaactactttttttatagtgttctttaatcaacatagagacgttacatttactaatctggcacttggattgttagccattaatatagtattttgtctgtgttattatataggactaagagctatttggaatctttaccctaaaatatctttgaataataaagaaacattgaaaaatgtaaccttaccatatcattggaaagatttacttggtgacagattcaaatttgacagaattgataacaagcaaattatcattaataatgatggaatagcagtaagagtcttttttttactaattttccttgtcccgttcttagctcttttatattggggagtaatcactccatcagaaattacatctgaaagttacgttaatgcattattattccttgaacctttattctttataatagttattggactaaaagcgtttttacagccttggagacgaatagtttttgaccgtgattccaaaacaatcactatacccggtcgtttcatgtttcaaaaaaaagagacactaccttatgaacaggttgtaatcacactatttagtaatcatcatgcgaagactttcaatggaaaaggagaagaagaaatagtaatagccaaccctcaacgtacattaggcagaatacctttagggattgcaggtggtataaacgccgccagacaattcgcacgcttcatccaactatatatggaggaggaagaagtgcagagcataccggagtttgaggaatacagtcatattatagaatcataaaaaagagtcaaacattatcaaccttacttgtagaatagaacaattttcatatatttgtaaagttgtgtaaaacagaaactttaagagcgtgttgactaataccttgtattagaaatctggtaaatttcaaaggaagtaaggagaaaaaaggcaacacttgtggcttatacattatataggccacaaagtgtatattgcaaatcttaatcccaattatcccagattttcatgcaggagttattcactttacgtactttatgtgtttttgtacacatggttagttgataccacaaaaacatagaatggaagaatattggattgaaattcaaaataatcttaggttatggcattctaatagtcctgcttgccgtaaccatttatctgttccgtagcggacaggtaaagagaaacacccttcttcgcaatgaaaggaaactggttgctacctggcaacttacagagtattgtttggaacataaagtcagctttaacaagatgtatcagatagttagggaagagtttccaaacatgagttctattcccggttatagaaaacttacccatttgggttttctttactctaaggtttatggaagaatacaagaatctttgtttgtacaaccgtccggtgaagcatcccttctttttagttggccaggcggaacattccgctgatcttctcacgcatcctgtccgtgtcctcaccgatttttggattgatcagcccggtgtagacctgcgtggagatgatggtcttgtgcccgaggactttctgcaggggttcaagcggcatgcccttgctcagggctagggtcgcaaaggtatgacgtgcaaggtgggggctgagcctgatgctgcattctgccttttcaccgatacgtttcagactgtcttccatgcattccaaattcccgaccggaaagaccttgtcgggagaatccttgaacttgtcgtctcccttgtacctttctatcagctcaacggctatcggcagaagtttgatgacataggcggctttggtctttaccctgttaccgataagccatacgcctccatccgaatcggtatacacattcttatagcttaacgccttcagatcggcatgggccagaccgctgaaacacataaagacaaacatatcccggatagcctgctgacgtttgtagttcagctttacatgtatcacacgctgaagatcatcctctgaaagaaacgggcgtttcctgtattccggcttgcattcgaacttcttgaacggatgtttgtggatccatccttcatccatagccagatacatgagccactttaaggtgttgatacgttcaaatgccgttgactttgccaacccccttaccgaaagcatccagttgtagtagttctttataaaatcgatgtccaacgacatcagggggacatcatccgttcccatcttatccttcaaataacattgcagacatctgctttcacatacaagaccttcgtatgtacccttggctttggtttttccgatctgattcctgtaatcctgaatcttgatattgaagatttccaccagggaatgaatctcctctccaagaccggtataacagtcatatactttctttgccgtgacaaatgtatcgtggtcgcaaatatactgatagtgttttcctatccgaaccttgatattctccaactccctgttcaagcgtcttgcctcttccgatttccccttcgcacagtttccctttgcatcccatagggagagaggtatatcacacttacaactgaaacttgcagtcgtaccattgattgttattcgtcccataaccggaacacgaccatttttaattgactggttcttggtgtagaacagaactttaaaagtacttctcataactcaattatttttgttacaaaattaataatcattgagttatctgaggttatgcaaaacagtgcaagggattgaaaaatagtcctttatatattgtttaaaggcacattggtcgaggtaacgattaagtaacgaaactcacgaccaaatgtgcttttttagcatcgtttttcctgtcgttaaaaagaaagcctgtaataataagctgatttcaagcaatattgcgcttatatgttaccttttcaaaaaatccttgctgttacttgtcaaactcgtcctcttgattgctttcactttccaacaacttctgaatgactatcttttcatttagaagagtggtaagaaagccctcgagaactgcaaaattggctttattacgcaataagcgtttcatagcccaatcgaaacgaatataattacttcccataagttcgtctcctttcccgttttcttttttcataccaacaaaggtaagcagaaaatgtttgatttcaaatatatatccttctatttctttctgtctaagaatattctatcacccactctcccaaagtccgtgttgtactatcaaaattcactccaaccttaacaaccttgcgatgatctatcttgtaaggaatagcatattgtttactattaatttgagccaatgcttcttcgggagctccatctatcttaaatcaaatacataaattgcatcgggcatctttattaccacgtcagccctgccaatggcattctttacttctacatctacgtgttgacccattaaacggaataataaaatcttcgtctttcacttccatcttttccaatagattaagactgaaatccattcgctgtaacatttcaatcaagaaagtgggtgtaccggtaaagaaccaaaagctcttataatctttttacgaaaaggcattgaaaaggctgaacgaattgtaactatcttcacaattcttgctgaaatgataaccgtcatactgccgtttcaaatgccgacaagcttcttcataggtttcatcgcttgagctatcctctcaatatccgattacatctgacttagcaactcttgctctgtaataccacaaatagcactataatcatcgctcatactgatattctgtaagttattcagctcactaaaaaatcaatatgcaacacaggataaacagtccattctttctctaactgttccatagccaatccttcgaacaactctttctttccggaaaaataagcttcaagagtagagactagaagactttttccaaaacggcggggacggctaagaaaataaactttatcagtatgagtcaattgataaattaacgctgttttatcaatatacacacaattattattgcgcaaatcctcgaaattctgtatcccgatagggtatcttctaaatatctctttcatataaacctaatacattagttgaaacatgaacaaagataatgtttttacacgtatcttacacagatagaggctgaacttgttatttctaaccgtatcattattgcattgaaagtgaaagttgctatctattattcattatcaacgagaagtattatcatttttcactcattcacaatgagcaatttcagcattatatattcgtttataatgagaagttttatatctctgcaatcaaatgctattaagatagtgacgctattccaggcatatactgtcactatgtttaaaccggattattcgggctattatttctaatttcaacgctgtgtaggcagagtaaactcctgcgagtcgcagatcaccccattttcatctgccactgctacacggaacgttacttcgccgtctttcaatctattaccggcatgtatggaagccgtataacgaatgccttcgcccggcaaaatttcttcgaccattaccgaaggagaaatgccgatatgcttcaccttgcctacggtttccaccaccggaactacgttataaacaggcttccggtcttcattcataatctcaaagataatcttactgttctctcccgcatcaatcacatgactgcgattatcatctataaaacggattctacgtagtttcaattgagaaacaggctgctgaaccggctgtttcttatatttctgcacacgaacctcacgaacttcgggaacgtatgcgtcatcctctatcggctcttgtcgcggtgcggtcaacgcactgcctatcgccgcaccggcaatagtccctacaatattgccaatagcagagccacgataaccacctcgccaacctcgattattatctccaatcaatccacctatcgaacctcccaaactacctccgatagaagcaccggccacgatagctcccggattacccatacgccctgatgcacatccgctcaaaagtaaaacggaaagcaaaaatactgttagttgtttcttcatgagcctttctattttaatatttttattctattaccttaaaacgagcgaaacgcaataatagttgtttctctcccgcatttttaaaatgaatagttgcttttgcattgtctcccgtgccttctaccttcatcacttctcccaaaccaaaacgttcatgttcaattctctgtccggcttgtaatcctgcaaccgacaccggaccggaagacatcgcttgagaaccgccacttaccgtgcttacctttttcaaatttctcggcacactgggagctattatctgagctttcggtcgctcctttcgttccgaagaagcacttccaaaaggtgtagtacgcgatggagaagcagaatgagtgaatcctccttcaatctccctgcggaaacgtcctgcgccttcatccaccgaacgactgattcccgcttcgtgcggcatcttcaaataatggatatcaatatcacgcaagaaacgactgggactcccaaactccatctttccataacggaagcgggttttggcaaaagacaagtagcaatgttcctctgcacgggtaatggcgacatagaacaaacggcgttcttcctccaatgcacggggagaatcgccaaccatcccacttgggaataggttttcttccagaccgactacaaaaacattcttaaattccaaccctttggcggaatgaactgtcatcaatgttatcttttctccgtcatccgctttgtcggaatcctgatcggtgagcaacgcaatctctgaaagaaaatcggtaagagatatattcggattgccttcctcctgccgcaaagcacagaaatcattcattccattcaccaattcttctatgttttccttacggctcaggttctccggagaagtatcctgacacacatcgttcataatacccgattgacggataatatccacacctatctcgtacgcattcttatccgcctgaccggttataaaaccctcgatcaatgcacgaaaaccttgcagctttgcatgagtacctttgttgatgttcagtccataggtcaacggttcacaaagcgttgaccacagactgactccatgatcagttgccgctgatatgattttaccgaccgtagtatctccgataccacgagcaggataattaataattcgtttgaatgcttcttcatcgttcggattcaccaccaaacggaaataagcaatcacatcttttatctctttacgttggtagaatgaaagtccgccataaattttataaggcatactccgtttccgaagagcttcctcaaaaatacgactttgtgcattcgtacgatataggatagcaaaatcagcatacccgtaatgatattcccgacgaagttcagctaccttattagcaacgatatccccttcttccacatcactatatgcctgaaatacaccgatagcttcccctttctccttttcggaaaatacggctttacgtatctggcgctcattcttttctatcaagctgttggcagcacaaacaatggtctgtgtggaacgatagttctgctccaacttgaaaactttcgtattcggatatgtcttcgtaaagtaaaggatattatcaatatccgctccacgaaaagagtaaatgctttgtgcatcatcgccaacaacacaaacatgctgattttctttcgtcaattgcagaacaatgctatgttgcgcataattagtatcttgatactcatcaacgagtatatatcggaattggtcttgataacgtgccaatatttccggataatcacgaaataagatataagtatataccagcagatcatcaaaatccatagctcccgcctgacgacacctttcccaataacgggtatagatatcacgaatagcaggcatttttacagccatatcgccttcatatgcttctttattggcagcgtatcccgtaggagtgaccaaatgattctttgcattggagatgcgggcttgtaccgttcccggtttataagtcttttcgtccagtcccatttctttaataatagaacgaagcagacttttactatcagccgtgtcgtagattgtaaactgggaggtaaagccgatatattgcgcctcagcacgaagaatacgggagaagatggaatgaaatgtacccatccacaagtaacgtgcccgttccgcccccacttgtcgggcaatacgttctttcatctcacgtgccgccttattggtaaaggtaagtgcaagaatattccacggattgtaaccgttctccaacagataggctattttataagtcagcacacgtgtcttacccgaacccgcaccggctatcactagcgaaggcccgtcattgtaagtcaccgccgcgcactgactctcattcaattcctttatataattgatatccataacagcattataaaaacaatgtagttttttaacaaactctcggcattcaaatttgttctgaatacaaaagtataatattcatttgagaatgacggtatttttataatttttcgtcactaactattttaacctaacccccaaagcaatgaaaaaaagtatattgttatcaattattttgagtttaagcctagtcgcctgcattccacaggctatggcgcaaaaacaaagccgtatggaaaaactgctaaggtatctgaacgataatgatacggaaaaatggcagaaaaaccgagaaaaggtagacaacgacacgaaggcatattatgccgaagaactggccctgctggatgtcctcaacgggttgtggaacgaacaaagtgaacaagccgcaaccgattatttcggatgttacgggaaagcggccaacgcctacttctccaacatctgtgaggaagagaaaataccgcttccgaacgtacaggacagagcggaacaggctattatccacatattggaggcttcgaaagaacagatacctttcagccgtacactgctggacagtattcgttcaagcggctatacggcagactccgttattgcacagaagatacggaatatccgcgaattggctttattggaaggtatgctgacagcgcctgcactcagcacatatcagacatatatagcggaatatccgaacgggaaatttatcccacaaatcaatgctgccgaaaacaaacggttatacgggattgtaaagcataacccgtcacaggaaaatttcaaagctttttttgacgatccggcaatgctaaagtttttcacggacaaagaaacgcgcccgtttttgccagaagtccaagctttatatgatgattttctattccattgtatcgacagtctgcgagagggaaacaatgcaaccgccctccggcaggttattgacgattataaacgcaacccttatctgagttcctcagcacgtacccatctggacgacctcgaatatcttagcgagaaagctgattttgaacttttgaaaccggcaataaccaattccgaatctttgggtttgttgcaggaattcctcagtacacataagtacaaagagttccgtgatcaagccaatgcgctacgagctccattcattctacagacaatcatctccactcccacttccgtaaaatattacaatgcgggacgactgatcaagtctgccgccaacgacagcactgggaatgtgtcaatcacttattcgtacaatgacaaggggcagcttgtctctatattatccctgactatgaaaaacggtcaggtgagtgaggaggtacaaacaaacagactgtatgaccctcaaggccactgcatttttgaagtgcagacaaatcccaagaccaaaacggacatttaccgaaggacacgccgtatcggtgccgacgggagcatcgagagcgattcacttaaatatatggacggaaggtcgattatcagcacatacaataaacaaggcttattgactgaagccaaagaatataataagaacggagaactccaagcatacacagcgaacaagtatgatgaaaaaggcagattgaccgcatcgcaacatcagaacctgcttatggctaaccccgccgatcaggttatctcccaaaaagatacttatgaatatgacaaatacggttatttgactcagatagcttatcagcgtattttaggcaataaccagaaaacatccggttacctgacttgtatgtatgataaatatggcaatccgattgacggaaattcttattatgaatatgataatacagggcaatgggtctgccgtacaaatcgcggaaatccccaagaggtggaacgggtacagtatatttataaataaaagtgaagatactgcgaaccttttaccaaatgcttctgttattatagtataacaagccatttaaaacttgtaacattatgaatactatattaatgtctttaattatgatgaccatgacttacgaaatgcctaaacttccttacgcaaacaatgcgttggaacctgtaatcagtcagcaaacgatagatttccattacgggaaacatctacaaacgtatgtaaataatctgaacagcctcgtgcccggaaccgaatatgaaggtaaaaaggtggaagaaatcgttgccaccgcaccggacggagctatattcaataacgccggacaagtattgaaccacaatctatatttcctgcaatttgcccccaaacctgccaagaaagaaccgacaggcaaactgggagaagccatcaagcgtgacttcggcagctttgaaaacttcaagaaagaattcaatgcggcagcggtaggattattcggttcaggatgggcctggttgtccgttgataaaaacggaaaactgcacatcaccaaagaaggaaacggcagtaaccctgtacgtgccggattgaaaccgcttctcggttttgacgtgtgggaacactcttactacttggattaccagaaccgtcgcgccgaccatgtcaatgctctgtggagtatcatcgactgggatgtggtggaaaacagaatgtaacggatttactgactaaactatacttgaacaaggtcgttgtgattttcacagcgaccttgtttaggctatatagatgccaccaacacaaatatccgacagaaaaatgaaaaaaaatcaaccgatgtagtgtttttatgtttctttttcacttactttgctcccgtaaagacaaaggggtgccccatgaggggctgagattataccctaagaacctgatgcagttagcactgacgtagggattgtgtttcttcttatcgcctttccgtaaaagcacgctctttgtatttactttcaacttatttattctgataggacaatgaaagtacaagtgaacaacaaagaggtggaacttattcccaactctacccttacacagctgacgacgcaactcgaacttcccgttcaaggcattgctatcgcggtaaacaacaaaatgattccccgtaccgaatgggaacgtttcgtattgcatgagaatgacaatctggtaattatcaaggcagcttgcggaggataagaaaatgattagtctgcaatttatcacacatcagaccgaacggtattcatatttcgaatcggcacgtatggcactcgaaggagggtgcaaatggatccaactacgcatgaaagaagctcctcttgaggaggtggaacaagtggcgctgcaactgaagccactctgcaaggaacacgaagctatcttagttctcgatgatcatgtcgaattagtcaagaaactggaagtggacggtgtacatctgggaaagaaggatatgcccatcgaccaggcacgacagatactcggagaagcttttatcatcggtggcacggccaataccttcgaggatgtcgtacaacattaccgcgccggagccgattacttggggatcggtcccttccgcttcaccaccactaaaaagaatttaagtcccgtactcggtctggaaggttacgcttccatcctttcacaaatgaaagaagcaaatatcaaccttccggtagtagctatcggaggaatcaccaacgaagatatccccgatatcctccgcacaggagtcaatggcatcgccttgtccggaacgattctccgggcggaaaatccggtagaggaaacacggaagattctaagtaattcataaatcaacatctataattctaaattccaaaagacatggaaaagttagtaattgcaggacgtgaattcagctcacgccttttcttgggaacaggaaaattcaactccaatgaaataatggagcaatctattttggcttcgggcacagaaatggtaacggttgccatgaaacgtattgacatggacaacaaagaggacgatatgctgaaacatattatccatccgaatatccagttattacccaacacttccggtgtacgcgatgcggaagaggctgtgtttgccgcacaaatggcgcgtgaagcgttcggaacgaattggctgaaactagagattcaccccgatccccgctacctgctccccgactctatcgagacactgaaagctacggaagagttggtgaaactaggtttcgtcgtattgccttattgtcaggcagaccccgtgctttgtaaacgattggaagaagccggagcagctaccgttatgcctctcggcgctccgatcggcacaaataaaggattgcagactaaagaattcctacagattattatcgagcaggcaggtatccctgttgtcgttgatgcaggtatcggtgcgccaagccatgccgctgaagcaatggaactgggagcttccgcggtactggtaaatacagcaattgccgttgccggaaacccggtagaaatggcgaaggctttcaaagctgccaccgaagccggaagacaggcatacgaagcgggattaggactgcaagcggacaactttatagccgaagccagctcaccgctgactgcttttttagataaataatatgaataagtagctgactgctaaaagaacaattatggaacaaaaaataaaatttccccgctctcagaaagtatatttgcccggaaaactttatccgaatatccgcgttgccatgcggaaagtggaacaagtgcccagtgtcagttttgaaggcgaagaaaagattgtaactcccaatccggaagtatatatgtatgacaccagcggaccgttcagtgatacggaaatgagtattgatctcaaaaaaggcttgccccgaatgcgtgaagaatggattgtcggtcgtggtgatgtggagcaactacccgaaatcacttccgaatacggacaaatgagacggaacgacaaaagcctcgaccacctgcgttttgagcatatcgctctgccttatcgggcaaaaaaaggagaggctattactcaaatggcatacgccaaaaagggaattatcaccccagagatggagtatgtggccatccgtgaaaatatgaattgcgaagagttaggaatcaagacttatatcactcccgaatttgtccgccaggagattgcggaaggacgtgccgtactgcccgccaacattaatcatccggaagccgaaccgatgattatcggacgtaactttctggtaaaaatcaatacaaatatcggaaactcggctactacttcgagcattgacgaagaggtagaaaaagcattatggagttgcaaatggggaggcgatacgttgatggatctctctaccggagaaaacattcatgagacacgtgaatggattatccgcaactgccccgtacccgtcggcacagtccctatctatcaggctcttgagaaagtaaacggtgtggtggaagacctgacttgggaaatttaccgggatactttgattgaacaatgcgaacaaggagtggattactttaccatccatgcaggtatccgtcggcacaatgtccatcttgccgacaagcggttgtgcggtattgtcagtcgcggaggaagtatcatgagcaaatggtgtctggtgcacgaccgggaaagtttcttatatgaacactttgacgacatctgcgatattctggcacagtatgatgtggcagtatctttgggcgacggacttcgtccgggttctatctacgatgccaatgacgaagcgcagtttgcagaattggatacaatgggagaattagtgttacgcgcatgggataagaatgtgcaagcattcatcgaaggccccggacacgttccgatgcacaagatcaaagaaaatatggaacgccagattgagaaatgccacgatgcgccgttctatacactcggccctctggtaacggatattgctccgggatatgatcatatcacttccgccatcggtgcggcacaaatcggatggttgggaacggcaatgctttgctatgtcactcctaaggaacatcttgccctgccggacaaagaagacgtacgtgtgggagtcatcacttataagattgccgcccatgccgccgacctcgccaaaggacatccgggagcacaggtacgtgataatgcattgagcaaagcccggtatgagttccgttggaaagaccagtttgatttatcacttgacccggaacgtgcacaaagctacttccgtgcaggacatcatatcgacggagaatactgtacgatgtgcggacctaatttctgcgcgatgcgattgtcacgtgatttaaagaagaacaaaaactaatcactaaaaattatgttttcagacgaattagaaaaaatatcttgggaagagacgacaaaagccatctattccaaaacggatgcagacgtacgacgtgcattgggtaagaaagagcatctggacgtcaatgattttatggcattgatttctccggccgccgctccttacctggaagtgatggcacgcctcagccagaaatatacattggaacggttcggcaagaccatctctatgtttgttccgctctatctgactaattcttgcaccaactcttgtgtgtattgcggtttccatatcagtaatccgataaaaagaaccattctgacagaggaagagattatcaacgagtacaaggctatcaaacgtctggctcctttcgagaatctcttgctagtgaccggcgagaatcccgcagcagcgggtgttccttatatcgcccgcgctttggacttagccaaaccttatttcagcaatctccagattgaggtaatgccgcttaaagcagaagaatacaaggagctgaccaatcatggcctgaacggagtaatctgctttcaggagacttacaacaaagcaaattacaagacgtaccatccgagaggcatgaagtccaaatttgaatggcgtgtcaatggcttcgaccgtatgggacaggcaggtgtgcacaaaatcggtatgggggtattgatcggtctggaagagtggcggacagatgttacgatgatggcttatcatctgcgctatctgcagaagcactattggaaaacgaaatatagcgtgaacttcccgcgtatgcgcccgtcggagaatggaggtttccagcccaatgtcatcatgaacgaccgcgaactcgcccaactcacattcgccatgcgtatcttcgaccatgatgtagatatctcttattctacccgtgaaagtgcggagatacgcaacaacatggcaacactgggtgtaacgaccatgagtgcggaaagtaagaccgaaccgggaggatactacagttatccccaaactttagagcagtttcatgtcaacgatgaacggaaggccgttgaagtggaacgtgatttgaaaaagctgggacgtgaacctatttggaaggattgggaccagtcgttcgatttcaaaagataggctgatgcgatacgacagacaaattatacttcctgagattggggaagagggacagaataagttgcaaaaggcaaaagtgctgattgtaggtgtgggagggttaggctctcccatcgctctttatctggcgggtgcaggcgtaggctgtcttggtctggtagacgatgattcagtaagtatcagcaatctgcaacgacaggtcctttattccgaagaggagctgggaaagccgaaagccgtatgtgcctcccaacgtttgacctcgctcaacagtgagattgagacaagacactactctgcccgactgactgcggaaaacgcagaccgtattatccaagaatatgatatagtggtggacggctgtgataatttcgatacccgttatctgattaacgatatctgcatcaagcagggaaagccgtatgtatatggcgctatctgcggatttgaaggacaagtctcggttttcaattacggaaaccgaaagaaaagttatcgtgatctttatcctgacgaagaagaaatgaaacgaatgtcacctccctctaaaggagtaatgggaattacgcccgccgttgtaggaagtattgaagcaacagaagttctaaagataatctgtggtttcggtgacgttttagccggtgaactatggacaattgacctgcggacattgcaatctaacaaattttcactataaaggttggtttctgatatagttaattagtaactttgctaaagaatccaattttaacaaagggaaatgaaattaattgtagtcaccacacccactttcttcgttgaagaagacaagattatcactgctctttttgaagagggattggatattctacatcttagaaaaccggaaactccggccatgtactctgaacggttactgactcttattccggagaaatatcatcgccgtattgtcacgcacgagcatttctatatgaaagaggagttcaatttgatggggattcatctgaatgcccgcaatcccaaggagccacatgattatgacgggcatatcagttgttcatgccattctgtggaggaagtgaaaaacagaaaacatttttatgactacgttttcatgagtcctatttacgacagtatctctaaagtgaactattattcgacgtataccgccgaagaattacgtgaagcacaaaaagctaaaatcatcgactcgaaagtaatggcattaggcggtatcaatgaggagaatctgcttgagattaaggacttcggctttggcggtgccgttatattgggggatctttggaataaattcgatgcttgttccgatcgtgattatctggctgtaatcaagcatttcaagaaactgaaaaagctatcggattgagcgaataaagagccgggcttgtattttatattgcaatcactagatttagattttatataaaggaaaagggaatccccgaatattcgagaattcccctttcctttatattgtacaacggttctttatcagaactcgtaatggaaaccaaatgaaaggtcttcactaccgaatgaaaatccgtaaccatcagtaccatacgcataatcatctctgtatcccaagaatccacatttggcaacaaggctaaagtgattatttaatttaatggcaagtcccggtttgatccccagctcaaagccaccttcggagttgtcaccgtatttaacagaagaaattccaatacctccatccaagaacagacgtactactttattctcgtagtatgaataacgaacataaggagcaaaactaaaagcatttttaaaacctactgtttctttgctgttgtgagcaaatcctaaggtagctcccactgcccatcgttcactaaagttatatccaaattccggttcaatcaggaaagatgtattatctgcatcgtcattatgccacaatgccacatttccacccgcataaaattgtgctttagcagacaaagccgccatcactacaaaaatcaaaactacaatttttttcattctatcgttgttttagttaaacattcaggcctcttaaaagcctaataccttaatttttcggggaacaaaagtataacccttttttgattaaaacaactttttagttagtttttcataaagtacacatcttgagcgagtgtaaactttgagtaaacatcgcaactagtaatagcaaataatcggctgaaaaaataggctgcaatcaactctatgagatgattacagcctacataacagatagttaagtacctaaccagtgtatttgactatccttctatagctgcctgcgccgctgccaatcttgcaataggcactcggaacggcgaacaacttacgtagttcaatcctactctgtggcagaacttcacagaagaaggttcaccaccatgttcaccacaaataccgcatttcaaatccggacggatggcacggcctttttccgttgccatacgaaccaactgtcctaccccattctggtcgagaacctggaacgggtctactttcaaaatcttcttttccaaatatacagggaggaaagaagcaatatcatcacgagagtaaccgaaagtcatctgcgtcaagtcatttgtaccgaatgagaagaattccgcagaagaagcaatacggtcggcagtcaaggctgcacgaggtatttcgatcatagtaccaactttgaaatcaatgcagtctcccatttcctcaaacaatttcttagcttcggcacggatcaccttttcctgttctttgaattcatacagaataccggtcaacggaaccataatttccggatgagtctccactccttctttcttcaattccaaagcagcacccaagatagcgcgtgtctgcatctgtgtaatctccggatatgtatttcccaaacgacagccacggtgtcccaacatcggattgtgttcacacaatgattccacacgctgttggatatactgcaggctcactcccatagtatctgccatttcccgctgtcctttcagatcgtgaggaacgaactcatgcaaaggaggatcgagcagacgtacagtcacaggacaacccgccattgccttaaagatacctttaaagtcggcttgttgatatggaagaatcttagccaatgccttacgacggccttctgcattttcagccagaatcatttcacgcatagccttaatcttctcaccctcaaagaacatatgttccgtacggcaaagaccaatacccaccgcaccgaaattacgggctaccgtcgcatcatgaggcgtatccgcattggtacgtacctgaagacgggtatatttatcggcaagcgccatcagttcggcgaagtcaccggagagttcggcagccttcgtttccaccttaccattatatactatacctgtacttccgttcaatgagatataatctccttctttcaataccacaccatcaatttctacagtacgagctttataatcgatattcaaagcacctgcacccgacacacagcatttacccataccacgtgcaaccacagcagcatgagaagtcataccaccgcgagctgtaagaataccttcggcaactgccataccggccaggtcctcaggagaagtctcgatacgaaccatcactacacgcttaccggcagcacgccattcggctgcatcatcagcaaagaatacaatctgaccggcagcagcacccggagaagcaggaagaccgcgagtcagaattttagctttcttcaaagcgtccttatcgaatacagggtgaagcaactcatccaacttattcggttccacacgcatcaaggcagtcttttcgtcaatcatgccttgacggagcaaatccatagcaatcttcaccatagcagcacccgtacgctttccgttacgtgtctggaggaaccaaagtttaccttcttgtacggtgaactccatatcctgcatatccttatagtgattttccagtttggtttgaagcgcatccagttctttatagatttcgggcatggcttcttccatagaaggatatttggcagcgcgttcctcttcactgactcctgccagttgagcccaacgctgagaacctatcttagtaatctgttgcggagtacggataccggctaccacatcctcgccctgcgcgttaatcaggtactcaccattgaaaaggtcttcgcctgtggcagcgtcacgggagaaacaaacacctgttgccgaagtttcacccatattaccgaataccatagcctgtacactgactgccgttccccattcgtcaggaattccttccatcttacgataaagaatagcacgttcattcatccatgagttgaatacggcacagatagctccccaaagctgttcgtaagctgatttcgggaaatcctgtccggtctgtccttttacggcggccttgaatcgttttaccaattccttcaagtcttccacttccagctcattatccagtttcacacctttctgatgtttcacttcttcgatgatttcttcaaacgggtccacatcttccttattcaccggcttcatgcccaataccacgtcaccgtacatctgtacaaaacgacggtaagaatcccatgcaaaacgcgcatttcctgttttgcggatcaatccttccactacttcgtcattcagtcctagattcagaatcgtatccatcatgcccggcatggaagcacgcgcaccggaacgaacagaaaccaacaacggattctcaacgtcaccgaattttgatttcatcaaagtttctatattggcgattgctctttctacttcacttttcaaaagagatacgactttatcttttcctaattcgtaatattctgtacaaacatctgtggtgattgtaaatcccggaggaacagggacaccgataagattcatttcggcaaggttggcgcctttaccacctaacaagtttctcatgtcagccttcccttctgcctgaccatttccaaaggtataaactctttttttatccataatattgtgtttaaagttacattatgacttttttctgttcgcaaatctaaggatatttcgcaaaccagaaaactttttgcgaaaaaactttctatcaaaatgcaatttcgacattacaatctggaatatttccgtagacacagaagatttccaaaaaaaatacctacttttgcaaagtaattattagattggtgtaaaagtggcaagaaagaaaaaagagcttcccctattggagaaggtaacaatcatggatgtggctgccgaagggaaagccatcgcaaaagtaaatgacctggtaatttttgtaccatacgtagtaccgggcgatgtagtagaccttcagatcaagcgtaaaaagaacaaatatgccgaagcagaagcggtgaagtttcatgaactgtcgcccaaccgcgctgttcctttctgccaacattacggtgtatgcggcggttgcaaatggcaagtgctcccctattcggaacaaatcagatataaacagaaacaagtagaagataacctgaaacgtatcggaaagatcgagcttcccgagatttctcctattcttggttcggcaaagaccgaattctatcggaataaactggaatttacattctcaaacaaacgctggctgactagtgaggaagtccgtcaagacgtgaagtatgaccagatgaatgcagtaggtttccacattccgggagcattcgataaagtgctggccattgagaaatgctggttgcaagatgatatttccaaccgcatccgtaatgcgatacgcgactatgcatacgaacatgattattcctttatcaatctgcgcacacaggaaggtatgttgcgtaacatgattgtccgcacgtcttcaaccggtgagctgatggtaattgtgatttgtaaaattacggaagagcatgagatggagttgttcaagcagttattgcagtttgtcgccgactcattcccggagatcacctccttgctatacattattaataataaatgcaacgacactatcaatgatctggatgtacacgtattcaaaggcaaggatcacatctttgaagaaatggaaggattgcgcttcaaagtaggtccgaaatctttctatcagacaaattcggaacaagcgtacaacctatataaggtggcccgtgaatttgccggtctgaccggaaatgagctggtatatgacctttatacgggaacaggaacaattgcgaatttcgtatcacgccaggcacgtcaagtaataggtatcgaatatgtgccggaagccatcgaggatgcaaaagtcaatgcagaaatcaatgatatcaagaacgcattattctatgcaggtgatatgaaagacatgctgactcaggacttcatcaatcagcacggacgtccggatgtgattattacagatcctccccgtgccggtatgcatcaggatgtgatcgacgttatcctgtttgccgaacccaaacggattgtttacgtaagttgtaatcctgctactcaagcacgcgatttgcaactgctcgataagaaatataaggtgaaagccgttcaaccggtagatatgttccctcatactcatcatgtggaaaatgtagtgttattggaactccgataaagaattcggttcaccacagattacacggattaacacagattttttattgttggattttataatccgtgttaatccgtgtaatctgtggtgagtattaaatcaaaaaaaaaaaagatatggaaaaaagaccgagaagaactcccgctgaaaaggcacgtgctcaatataccaactatgcagtcaaggaaccgatggaacttatgaagtttctggctgccaaaatgccggatgcaagtcgtaccaaactgaaatcattactcagtaaaagggtcgtattcgttgataatgtaatcattacgcagttcaacttcccgttacagccgggtatgaaggtgcagatcagcaaagaaaaaggaaagaaagagtttaataacagactgctgaaaattgtatatgaggacgcttacattattgtggtcgagaagatgcaaggacttttatccgtcaatacagaacgtcagaaagaacgtaccgcatatacaatactgaatgagtatgtacaacgttccggacgccagttccgcgtgtatatcgttcatcgtctggatagggatacttccggcttaatgatgttcgctaaagatgaaaagacgcaacgtacactacgcgacaattggcatgatatagtgaccgatcgccgatatgtagctgtagtagagggaagcatggaaaaggattatggaactgtagaatcgtttcttacagacagaactctctatgtcagttcaagtcaacaagatgatggcggtgcgttatccatcactcactatcgcactatcaagcgtgccaatgggtattctttgatagaattggacttagagacaggccgtaagaatcaaatccgtgtacatatgcaggatctaggacatccgattatcggagacggaagatatggtggtgaaaatactcctaaccctatcggtcgaatggcacttcatgctttcaagctgtgcttctatcatcccataacaggagatttgatggagtttgagactccttatccggcagacttcaagaaattgtttctgaaaaagtaaactctcatacaaaataaagagaggatatccaaacgcagattaacgcaaattatcacagattatttcaatgataaatataaatcaacgacttaaatcatttctgcgataatttgcgttagggatattcagtaaatgttcctctttctaaaaaatcaagagaaaagctcacgtaaagcaaagcttttctcttgattttttcgttcaactctcccagtcttctatcttttttgtagaatattgtttacatattcttgttttttccttcccacccatgcattatgtacatgtcttttttaggggaagttaaaacctctcctgtttttcctgttattttagtcagattatgctgcctttctttttttcttttcgaccttttctatcatacataccgcattggctgtatgtattccaaagaaaatccaaagtacttccgttttcctgtttctagcttttatcctggccagtgagtaatgttgtttctgcgttccaaaacttccttccaggcgggtagctctttcgcggctgagttccgaccgtaagattctccgaagcggctcatctttggcagctctgcccttacgcttaaaggaagtacttatatgatattttgtacaaaatttccggttggcattattggcatagattgaatccgccgcaagcgccttaaccctaaccccggtcagttgttgttgcagatgaatacagtctttcaaacgtactccttcgttaaaagccttaaaggagatatgttctataaaggagattccgtctatctgtatattgttgactttggctccgaattcaacggatttggtttccttgcctctgataatggggcgaaggtaatgccggtcgatactcacgatacggttggacacttttttgcctgcaaataaattcttcccttgctcaaggactgtctgtatgaccgagaaacgtctttggtaatcagaggatagtgcaagcctgttcctgtaggatgaatgaagctgctccagctggtcaagtaacttttccaataactgaagtaaccttcgtgtaatcatacgagtctgtgatttcctgcgtttacgcagtttgctataagcaagataggcacggcgtacatcaagatacttgttacggggacgttgtatgtgcaaggtccggcaatgtttgcacagatgacgatgaagccatacaataccttcccataagagtttggtatcagtaggaaaacgcagatgactttcataacaggtggcatcggtcatacagacatgaaggttctcaagataaggtttccaatgctcggcaagaatgaactggaaggactcaacatcaaggcgatccgctagttcctgacgaattgcactaacgattttaggattggttagtggatgaagcggatcaatctgaacaccacaaaacaactggtaatgaatattaccgtttaaatgctcaatcagttgtgcatcggaaaagttggtataggacttcaagaccatcaaggctattttaccttcgggagaaaaataacttttacgccccaaagcagaggacttcaaatgcatttgtcgggccagttccgagaaaggaaacagagcatggaggcgacctaattcactcgttgcaaaactttgacgatatttttttagcatatcgaactcggtaaaacctaaacgaggttcgatttctgagattttttgtatctttaccatgtgtttttattttagattacccccgttttggccgtcaaaccgttttttggggggaatgcttaaagatacaaaaaaggcaactaactcgcaatgaagtagttgccttaaattttattattttaggaatatccctgcgttaatccgcattttatcactcattatgacactatgctattactttactgacgacgcatataaaaaggttgcccatttatcctatccctgaaatcttgccatgtattataccatgttccactaaatgtcctgccggtagcttccgctccccaaatgtaagcataagtgccatcaccataaaaatgcagttccattgaattatatcctccatcaatccactcccactcaaaaagcaaataatttgggtcgcctattgaaccaattgtcccttgattcctcgcattgaaagtcattactgtacctcttccccacgtatatgcgccataatctatttcttcattagtataccactcacctggcagattaaattccgtctcatcttcactctcacacgaagtaaagccgaccaataaagtcagcataagtagaaaccccgcatatttcttaatcagtttcatatcttttctagtttatttcgtttacaaatacaaaattagcatttttattttactatataccacaagccataagtttttcgtacctttgccaaataatttaaaattctcacatgaaacttctttggcttgatttaaatagttcatacgcccattcatctttggcattgcctgccttgcacgcgcaaatagcagatgacaccacagtcgaatggtgtatggtctccgcaacaattaatgaaaacaccggtaacatcgtcaaacagatctatcaacaccaaccagatattattgcagctaccaattggctatttaatcatgagcaactgttacacattgtctcacgctccaaagcactgcttccacaatgctgtatcatactcggaggtcccgaatttttaggagacaacaaagactttctattcaagaacaaatttgtcaacggagtgtttcggggagagggagaaaaagtatttccattatggttaaaggtgtggaatcgaccaagaaaagaatggaaatcaatcacaggactctgttatcttgacgaatcggaagaatatcaagacaacggtattgcccgcgtcatgaacttttccgcattggtttccccggagagaagccgtttctttaattggagcaaaccctttgtccaactggaaacgacacgaggttgcttcaatacctgcgcattctgtgtcagtggcggcgaaaagcctgtccgtaccatcccattggaagccattcgcgaacgtttggataatattcatcagcatggtattaaaaatgtgcgtgtactcgaccgtacgttcaattataacaacaaaagagccaaagacctcttgaatcttttccgtaaatatccggatatccgtttccacctggaaattcacccggcactcctttccgaagagttaaagaatgaactggctgctttacccgatggtttattgcatttggaagccggcattcaaagtttgcgggaacctgttttggaacaaagccaccgtatcggaaaactatccgatgccctcgaaggattgaaatacctctgttcattaaagaacatggaaacccatgccgatctgatagcaggtctccccctctatcatctgacagaaatatttgaagatgtccgtacacttgcagaatatggtgcaggggaaatacaactggaatcattaaagttacttccgggcacagaaatgcgaagaagagcagaagaattgggtattcaatattctccgcttcccccatacgaagtattgcaaacccgtgaaatctcagtagaagaattacaaacagcccactatctgtcccgtcttttggatggattctataatactcccacctggcggacgatcacacggacattaattttggagaatcctcatttcctacatgagctacttgatcatttggttcggacagacgtcatagacacccctctaagtctggaaagaagaggattaatcttatatgatttctgtaaaaagcattatcccggttatctgacgcaagttagtatcgcatggatagaggccggtatgtcattaaagaaagctccggcggaaaaagtaaggaccaaacgccaagtcccacccgagaaatgggaaatagtatacggaacttatcgtgagaatttacggctatgtttcctccccactgatgaagcagaacatggctattggtttggattcgaatcggagattcagaagatacaacccgtatttaaggcaaaaaattaataacaacgggcaaccggataatcggctctgtaaactcgatcgaagaaaggaatccattcattctcagcaatgccaagctgcaagccataaaaatgtgtatccgcctttctatattccaatatccggtcagtcaacttcggtgagggaagcggtattttaaaatcagtaatccataaaacatccgcattcatatactctttcttcgattgaagtaagtcgaaagtagctttcagcatccgggtggcatccgtgtccccgcaggaggtggtagaaaagaaatcaagcaaacgggcccgttccttgcggacatcaatcggacatatcgaaacagaaaaagcgatcaggaaacaaggacggcgttgcctgtcggctatttccaatagtttcatcaacaaagaataagctattttctccggaatgcctaccatgcttccggaagtatccagacaaacaatcatcggccaatgtaaattccggatgactgatatcctccagctacaggctaaaagtcagagtggcagtgatgggatcaaaaccaaacttcgcattaatagatcccaatccctgcaccaatgccataaacgctttcctacttttagtattcaacgtttcaaaaactttttgtccgattacattcgtattatacaaatcgtataatacaaatccaataaaatcgactctcaccaccgagcctgaaaagttttaaaagcccaaaagctacatcttccattaaatctcgtacctttgctgtcgattttaaatatcatataataatgaagaactttatcaagggattccggtttactccctccaattatccggctgcagtagaagagaaaatacagaaatacagaaaacaaggatacaaacttccgccacgtaaggtactccgtacccccgagcaactggaagggattcgtgaaagcgcaaaaatcaatacagcgttgctggactatatttcggagaatatccgtgaagggatgtccacagaagagatcgatgtgatggtgtatgatttcacaaccgcccacggagctattcccgcaccgctcaactatgaaggatttcccaaaagcgtctgcacaagtatcaatgatgtagtgtgtcatgggatacccaacaagcacgagattctcagaagcggtgatattatcaacgtagacgtttctaccatttacaaaggatatttctccgatgcatcccggatgtttatgattggagaggtcagccctgaaatgcgcaaattggttcaagtgaccaaagaatgtatggaaataggtattgcagccgcacaaccctggaagcaattgggagatgtaggcgcagctatccaagcgcatgccgagaagaacggattcagtgtggtacgtgatctttgcggacatggcgtagggatgaagttccatgaagagccggatgtagaacatttcggacggcgaggcactggcatgatgatcgtgccgggaatgacttttaccatcgaaccgatgatcaacatgggaacttacgaagtattcgtagacgaagccgacggatggacagtctgcacggacgacggactgccttccgcccaatgggaaaacatgattctgattactgaaaccggaaacgaaattcttacatattgatggaactgattctactcattgcgattgccatattagtgacagtcctgctggtattggctctgacgaaaggcaacaatcaaacgcaagcggaacaattacagatagccctgcgccaacaaatgcaagagaaccgggaggaactgaaccgcagtatccgggaactccgcatggaaatgacgcagacgctcaaccagaatatgcagcaacttcaagacgttctgcacaaaaacatgatgactaccggagaactgcaacggcaaaagttcgacatgatggcccgccagcaggaaacgttaataaaatccaccgagaaacgtttggatgatatgcgtctgatggtggaggagaaactgcaaaaaacactgaacgaacgaattggacaatccttcgagatagtccgttcgcaactggaaaatgtgcagaaagggctgggagaaatgaaatctctcgcccaagatgtcggcggactgaaaaaggtattgagtaatgtgaaaatgcgaggcacattcggagaagtccaactgggtgctttattggaacagatgatgagtccggaacagtacgatgccaatgtcaaaacaaaaaagagcggaacagaattcgtcgagtttgctattaaacttccgggaaaagatgacgccaacagcactgtttacctcccgattgacgctaaattccccaaagatatttacgaacagtattatgatgcattcgaggccggagataccgcactgatggagtcatccggcaagcaactggaaaatacgatcaagaagatggcaaaagatattcatgacaaatatgtggacccacctttcactacggactttgccatcatgtttttgccattcgaaagtatctacgctgaagttatccgccgtaccagcctcgtagagacactccaaaaagaatataaaattgtagtgaccggaccgacgacattaggcgctatcctcaacagtctgcaaatgggcttccgcaccctggcgatccaaaagcgtaccggagaagtgtggactgtattgggagctgtcaagacagaattcggcaagttcggaggactgcttgaaaaggtacaaaagaacctccaaagtgccggcgaccaactggaagaagtgatggggaaacggacacgtgccattgaacgcaaactacggcaagtggaacagttaccccatgaagaaagccggaaaattctacctattgacggaatagaagaagaggaagaatagtctcacaggctatcagagttgcattacggatataatcatcagaatatgtttgtcaagaacgaatcgttgtgccctttgtcgtaacggaacgcagcgccagttttttcacccaaagcacaaagattcctgtcaaaataaggttcaagaccaaagtcaatactgaaatcaccaatgccggacctcccagattatatcctaatgctatgaaaataatccccgctcccacttcgccacgggtaaacataccgatcgaaagagccaagcgctcactcaacttccggtcgcgatagaagaacatcggacaaagttttcctagatttgacagtaaagaaacaatcacgacatggaatagaatcattccccacgacatcatttcctgcgaaccggtcaccgaatgtgtaccggcatgagtctccgcaaagttcactccgataaaatgaggcatactcatccccaccaggaacataaacagaaaggagattcccgtagcaaccgaccgttcaaccggtgtatcatgctctttatgcttcatgatcattcccagaacaaatgccggtaaaagcacttcgatatgaatgcttcccgcttctccgtatagttccttgctgccaagataaagtatctgagtagccagaaatataataacagaataaaagaggatagccttccaatcctgccgccaatcatatttattcaatcgctgccagccgatagacagcaatagaaacacaatcaccactacaataatcaactgccagcgcaaaccgatcatcataatctgaagaggaatcatcaggataatcgtgtccagatcatcgaagatagccaacacctgtattttcttataaatccaactggatttcaatccgatagcagccagcattgtaaataagatacccgcagaggtaggggcggcaaaacggcttagcaacagattctctttccatgcctcccagctattccagtaatcgggcggaagtaatatgaacacataataaatagcaatcataaaccaagggagagcagccgtcgccatcgctataaaataatcttcggcataacttttccagcgggacttgtcaagaacaaattcccggcccacgttaatcattataaaactaagacatacataaagcaatacgttagaaatggacttgacaactccatacccctctcctgctatcattggcaggaattgtgaaatgacgagccccaacatcaggaagcccgaaaaagacagtacttttctcatatttatagttgttgctggtatattaaaaactaaccgcaagtcaatttgttcagcgcatatctctgaaaaattgcttgcggcaatgttttaatccaatttcagtacggcaaggaaggctttctgaggaacctccacgttgccaatctgcttcatccgtttcttacccctcttctgcttttcaagcagttttcgtttacggcttacgtcgccaccgtaacatttggctgttacgtctttacggactgccttgatggtttcacgcgctataatcttagctccaatagccgcctggatagcaatctcaaactgttggcggggaatcagttctttcaatttctcacacatccggcgtcccatatcataggcattgtcgaaatggatcagcgtagacagagcgtccaccggctcgccgttcagcataatatccagtttcaccagcttggaaggtctgaaaccgttgggatgatagtcaaacgatgcataccctttcgaaatactcttcaaacggtcatagaagtcgatcacaatttcccccaaaggcatattataaaagatctccacacgattgccggaaatatattcctgtttaagaagttctccgcgtttccccagacaaagcgtcataatggggccgatataatcggtagtggtgatgatggaagccttgatatagggttcctcgatatgatcgatcaatgtcgggtcgggcataccaccgggattatgcacctccttcatctctccctgtttgtcatatatattataagatacgttgggcacggtagtgatcacattcatgtcgaattcgcgatcaagccgttcctgcacgatctccatgtggagcaatcccagaaaaccgcaacggaaaccaaaacccaatgccaatgaagactccggctggaaagtcaaagaagcgtcgttcaactgcaatttttccaacgaagcgcgcaaatcttcaaaatcttccgcctcaatcggataaactcccgcaaataccatcggcttcacttcctcaaatccggcgatagcctgcgcgcacggacggcccacatgagtgatggtatctcccactttcacctcttttgaagttttaataccggaaataatatacccaacatctcccgtacgaagctcattgcgaggaaccagctccatcttcaataccccgacctcgtcagcgtcatattctttacccgtattgaagaacttcaccttatcccctttccgaatcactccgttctcaatcttgaaataggcgataataccacggaaagagttgaatacggaatcgaagatcaatgcttgcagcggcgcttcctcatctcctaccggatggggaatacgttcgattacggctgcgagaatctcttccacccccatacccgtcttaccggaagcacgtattatttcctcacgcttgcagcccagcagttcgacaatttcatcttccacctcttccggcatggcgcttgccatatcgcatttattgattacaggaataatttcaagatcatgctcgatagccatatacagattggaaatggtctgtgcctgtactccttgagatgcatcgacaatcagcaacgcaccttcacaggctgcgatagaacgggacacctcataggaaaagtctacgtgtcccggagtatcaatcaagttcaggatatacttctcacccttataattatactccatctggatggcatggctcttgattgtgatacctctctccttctccaagtccatgtcgtcaagcatctgccctgaagtcacctgaatagtgttggtatactccaacaaacggtcggccagagttgacttaccatgatcaatgtgggctataatgcagaaatttcgaatattcttcattctgaattcttattattttgtctttttcggtgtgcaaagatacgtaaatggcggaatataaaaaaatgcgttgataacattatgataatgtaccaacgcatttttttattgcttaagtgagttactcgcttagatcaatttgatgaagagttcaccttcaacttcttccacagagactttgtcttctctcaataaccagccaagtccgaggaacaaatctttgtcaaccaatttagttgctttcttcaattgcttggcagtcattccttctgtttcattcagtgcattccagatagtacctgcaatcacacctgctttttctttcaacatttgctttgaaattttagttagacatgctttaaatcatccggtcttgaaagactttcagattttatttcggggacaaagatagctatttttatgttatagaacactttattgaagttttttttattgattttgtaagaataatggcttttttcccttatttgggatggttttcgagatattcagaccagattctcgccgcttcttccaccattttcgcacaaggacgtttgctataatattgagcagtacgttcttccggaacatttgagaccagttcttttttcttcaatcccaacaattcgccacaaatcagcgacccgttgcgttttttaaactcagcagccaattcctggacaactgcataatttgccgcctttccctcgcggtctgtcgcttccgtagctccggtttcgagtcctgccaccaagaacataccgcaagcagcaccacaagtttcgcgcatccggcctattcctccaccaaaggatgcccccatgcgcagagcctgttcctgcgtgaatccgtacatatctgcaaaagctgccactacggactgtgaacaattgtatccgcttttaaaaagctctactgctttttgtactctatcttccatattattgtctttttattatattcatcccgaccctaaaaactcaacggtcaatctccaacaccatcggacaatgatcggaatgcaccgcctcattcagaatccgcgcactcttcagccatcggcgtaccggctcgctggtcatacaataatctattcgccagcctttatttttggcacgcgaattaaaacggtaactccaccaggtatactcctgttttcccggataaagcagacggaaagaatcaataaagcctgccgagagaaaacgcgtcatccattcccgctcttcggggaggaaaccgctattcttcgcattacggacaggatcatgaatatcaatcggttcatggcatatattataatcaccgcaaagaatcagattcggatgtgtcttccgcagctctgtcacgtatttctgaaaatcctccagccacaccatcttgaatgcctggcgttcgtccccgctagtccccgaagggtggtacacgcttaccaccgacaaatcgccgaagtccgcacggataaaacggccttcattatcgtatgcttctattcccatcccgtattccacgtggtcaggttcttgcttggtcaatatggccactccgctatatccttttttctgtgccgaatacaaatacgacttatagcccaatgcttcaaacacttccgccgggtattgatccggctgtagttttgtctcttgcagacaaagaatatccggattttcctgcgccagccattccgggaaacctttggagacagcagcacgcaagccgttcacattataagttataatcttcatcattatatatttattgattcacgtttattttaggaaaacagaagcatgatattcagtacggatacaattatcgcaatagtatacagcacaaatgtgctccaacgactattcacataattccccatcacctttcgggaagatgtcagtccgacttgcagaaagaccgtgaaaggcaattggatactaagtatcatctgcgaaataatcagccccttaaaaggatctccgataaagaaaatcagcaataaggcgattcctagcgataaaaggactcccacttgcgagtgactgtctttgatgtgataagactcaccgaaaataccggcaaagatggaacctgccgccatcccgcttgtaatggtggacgaaatgcccgccatcagcaatgccaaagcaaatacaatggcagcgttgctgcccagcaacggttccagcaaggacttggcctgttgcagttcctccacttgaatgccgcttttaaagaaagtcgcggcagccagcagaatcatggcactgttaatcgcccaaccgataaccattgagaacagcgtatcgaacaactcatatttcagtactttcttgatagatgcatcatctttcttgttatactcgtgactctgtatcacttccgaatgcaaaaacaggttatgaggcattaccaccgctcctagcacgctcatgattatcaacatacttccttcgggaaacgaaggagtcacccaccccactgttgcagccggccagtctatctgcaccaagaaaagttcataaataaacgaaagtccgatgacagacacaaacgcaatgatggaacgttctatttttttataggaattggtgaaaagcatgatggacacaaaaagcgtagtcagcacagctccccatacaataggaatatcgaacagcatttccaatgcgatggctccacccagaatctctgccagcgaagtagagatggaagccagcaccgccgtaccaagaataggacgggatacccatttgggagtatatttggtggcagcttccgaaaggcaaagtccggtgacaatccccaagtgagcaacattatgttggaggatgatcagcataatcgtggacaaggtaaccacccacagtaatgaatagccgaattcggatccggcggcaaaattagaagcccagtttccgggatctataaatccgacagtcaccagaagtcccggaccaatatatttgaaaacatccagtccgcccaaatagcgtttatgatctttgcgttttaagtcttgaaaaagattcttcattgctgcataatagtttattcagtacaaatatacttataaataacgagtagggatcaattttggttcaaaataccgacaaataaggaaaacgctactaacatcaaaagcccaaagcagtatcataaaagaatgcggatcaacgcaaacctacacaaagattaaatttaatctgcgataatttgcgttaatccgcgtttcctatcttatacttgagaccggatgatatcaataccccatctcatgcaatgcacggcataactggtccggacacgaagtgggtctgccaccacagcgtactccttcaagtttacttatcacgtcctccaccttcattccctttaccaggcgcgaaagaccttgaagattgccgttgcatcctccccaaaaggccacttctttcaccactccatcttccacattcagttcaatgttggtgctgcaagtgcctttcgtcttataaacatattccatgaactgttattcttcgccttccggttgcatattggtataaacggtctgcacgtcgtcaaattcttccaaacgttccaccatcttatctaatgtctcacgctgttccggagtaacctctttcagatcgttcgggatataagtgaagtctccaccgacatcttcgaaaccacattcttccaaatgtttctgaatggcggcatagctcttaggatcaccatagatcgtaattgttccttcttcctcatcttcatcatattcatcttccacattataatctatcaggtcaagaatcagctcttccatatccaagtcctctttcttcttgaaagtgaaaatacacttatggtcgaaaagaaatgccaaagaacccattgtacccaagtttccgccgaatttgttgaaaacggaacgcacgtccgctacggtacgggtagggttgtcggtaagtgtatctacgaatacagctactccgtgagggccgtatccctcatacgtcatgcccttatagtcactctggtctttacccatcgcattcttgatggcacgctcgatgttatccttcggcatgttttcacgcttacaagtagcgatcaccgaacggagtgtcgggttgttttcgggttccggaccacctgcctttacagcaatagcgatttgtttacccagtcttgtaaatgttttagccatgtggccccatctcttcagcttggtagcttttctatattcaaatgctcttcccattggtttatatttttagattgaaattttaaacttatctaagtttggctcctagtttatcttccaggtttttcaccagtttcgacatgatcttatcaatcatcttatcattcaatgtctggctctcgtcttgaagcaagaaactgaccgcatacgatttcttaccagcttccaggttcttgccttcatatacatcgaagagttccacttctttcagcaacttcttctctgtctcgtaagcgatcttctcgatttcggcaaactgcacattcttgtcgagcagcaaagccaaatcgcgccgtacagccgggaacttggaaagctccttatagctgaccttagccgaacggacagctttcagcaattctttccagttcaagtcagcgaaatagacttcattgtctatatcgaacgctttcagcagcttcttagtaactacaccgaaagaagcaaggcgtttgccacccttcgtatggacagacagtgcggcagcaaagatatcatcagacagattgcctatcaccagattgtgcaaatccagtcctaaacgtttcaagatattctccacgtatgctttcagctcatataccgaactgttctcatccggatgcgcccatgagttggaaaccttcttgcctgtaacccacagacccaaatgataatcttccgaataaggagccaacgctttttccgggttcttcttgtccccgtcgaaataataacaattaccaaattcaaagaatttcagatccgcatttttacgattggcattatgggcaatgctttccaatccaccgaacagcaaagtctggcgcatagcgttcaaatcagcgcttagcggattcaacagcataaccaggcgattggaaggataagtttccagaccgtcataataagccgcacgggtcaatgagttgttcaatatttcattgaatccacagcccaccaattgttcggcaaccagattctgcaatttattcgacttgtcatgctcgcctttagtagtcagactggatttcaacgtagtcggaatttccacattattgtatccgtagatgcggagaatatcctcaatcacgtcacaatcacgctgcacatccacacgataaggaggaacggccagtgtcagtccttccaccgtctcattagttatcttcatttccaggctcgtcacaatgctcttgattgtctctaccggaatcactttaccaatcagcgaatgtactttctcgtaagacaggtctactatgaaatcctgtgcaggagtagtatatacatcttttatttcagaagagatagtaccgcctgccaactcttttaccattatggcagccagtttcagacagtaaatcacactattcgggtcgatgccgcgttcaaagcggaaagaagcatcggtattcaagccgtgacgacgggccgtcttacgcacccatgtaggatggaaataagcactttcgatgaaaacatccgttgtagcttccgtagaaccggaatccaatccgccaaatacgcccgcaatgcacatggcttcttccttattgcaaatcatcaggtcgcggtcactcagcttacgttccacctcgtccagtgtaacgaacggagttccttcgggcattgtctttacgataacttcattaccctttatcttaccggcatcaaagcaatgcaacggttgtccgaaagcatggacaatgtaattagtgacatccactacattattaataggacgcacaccgatcagacgcaatttattctgcaaccattccggactttcctttacagtcactcctttcacggtaacaccggcataatgcggacacgcttcactgttttcaacctttacttcaatatccaaatcatggttttccactttaaagtcatccaccgacggacgttgcagagttgcctgcttaccgttctgaatcagataagcatacaagtcacgggctaccccgtagtgagagcatgcatccgcacggttaggagtgatatccacttcaagcacataatcgctcttgatattataataatctttggcaagagtacccgggacagcattttccggcaaaacgatgatacctgcatgatccgtaccgataccgatttcatcttcagcacaaatcatacctgtagattctacaccacggatttttgattttttgatggtaaagcattcgtccccgtcatagagttttgtccccaatgtagcgactaccactttttgtccggcagccacgttcggagctccacaaacgatctgcaccggatcgccttctcccagattgacagtagtaatgtgcagatggtccgaattagggtgttccacacaggtcagcacttcgccgatcacaagtccctccaaaccacctttaatggtctgcacttcttccacaccacctgtttccaagccgatagaagtcaacgcagccgccgtttcatcaggcgtcaaatcgaagttgacatactctttcagccagttataagagatattcatataattaattttttattgtttctcaaaagattcgcaaagttaataagatttttcggttgaccgaaaaggttagataaaaaattgcaggttatttcaccacagaggacactgaggacacagagttttttctttttatttaagcactcatgtttaattagtttataagttaattatacacactttgcttattacggatttacacttatttttcatccttccgatatcctctgtgtcctcagtgtcctctgtggtgaaataatacgcaactaaaatggcaaaggtccatcccctcctaccggtgccccgaacggattacccgactgcggagtaaagtccggtgtcggtggtggcggaacagaaccggctcctccggcattcatcttagaccccagcatagcaccggcaggctcacccggcataggaatcaccatgtcatcctccggatttgagaaacgggtaaactcacctttgaatcggagcagcacttcacccaccgcaccgttacgatgcttggctatcacaatctccgccataccgcgaaggtcattaccacgatcatcctggtaaattttgtaatattccggacggtggataaaacataccatatcggcatcctgctcgatggctcccgattcacgaaggtcgctcaactgcggacgtttgccatcaattccttcacggctctccacaccacgattcaactgcgacaatgcgacaatcgggatgttcagctccttcgccaatcccttcagtgaacgtgaaatggtactgacctcctcctgacggcttccgaacgccattccactagcattcatcaactgcaagtagtcaataataatgattttcaccccatgttcacgcaccagacgacgggctttcgtacgaagctcaaacaccgacagagagggagtatcatccacatacagcggtgcatccagcaaatccttcagtttatagtccaattgctgccattcataattcgccaactgtccgcttttaattttctcactcggaatctcgcagacattcgtaatcagacgattcaccaactggacattactcatttcaagagaaaacaacgctaccgggttacgataatcgacggctatattcttcgccatagaaaggacgaaagctgtcttacccatcgcaggacgggcggcaataataataaggtcagaattctgccaaccggaagtcatcttgtccagcttcgtaaaaccgctttcaagcccactcaatccgtccgttcgtgccgctgccttctgaatcagcttatacgcttcgtcaatcaccggattgatctgcgtgtagtccttcttcatgttctgctgcgaaatttcaaaaagctttccttcggcttcctgcatcagatcgtccacatccagcgtttcatcaaatgccttactttgaatgttactggtaaaagtaatcaactcgcgcgccaatgatttctgtgctatgatgcgtgcatgatattcaatatgcgccgaagaggccactttgctactcaactgagtaatatagaacggacctccgacctcttccagctctccgcgtttgctaagctgttcctttacagtcagaatatccaccggcttctgatttacggcaagatcggtgatagcggcataaatcagttgatgccggtgttcataaaaagattcgggacgaagaatttcactcaccaacgaataagcgtccttctcaatcatcaaagcccccaatactgcttcttccagctcaggtgcctgcggctgaatacgtccataatcatttaccggttgcactttagcagacttcgtattgcgggtgtttcttctctgttcggccatgaaaacatttactattttacaatttactacttactattttacgaccggacagactcttttatcacatttatcacggaattcctccggtcgggacgacaaagatagaacataatcacgaagaatggataaggaaaaatgaagattttactaactttgtccctgaatcgcgttcagcacaagattaattgcaatgtgcagcactgcaaatagtaaatggtaaattataaaatagtaaacatgattactttccccaacatcaaaataaacttgggactttccattacggaaaaacgcccggacggatatcataatctggaaacagtgttctatccggtagctttggaagacgcgctggaaatccgtacttctcccgacactgaccggaaattcaccctttaccaacacggaatggaaatagcgggcaaaccggaagataatctggcggtaaaagcctatctgttgatggataaggagttccatctacctcctgtagagattcatctatataagcacattccttccggagccggactgggtggaggatcatccgatgcagctttcatgctgaagttgctcaatgatcattatcagttaggggtatctgaagaacaattggaggtatacgccgccactttgggagcagactgtgctttctttatcaaaaacagaccgacctttgccgaaggaatcggtaatatcttttctccggtcgagctttcattaagcggctaccaaatcatgattatcaaaccggatgtgttcgtatccactcgggaagcttttgcaaacatccgccctcatcatccggaatatcctgtcaaagaggtcatccgacgcccggttacagagtggaaagataccctgatcaatgatttcgaaaccagcgtatttccgcaacatcccattatcagagacataaaagaagaactctatcatcacggagcgatctacgcatccatgagcggttccggttcttcagtcttcggactctttgctccagaatccactctaccggaaattgattggggaacggatgcgttctgcttcacaggaacgctataagaaaatcaaacgaaatatctatcccgtcatactaaaaacggtaccacgactcacatcgtagtaccgttacaacacaaacacaaaataaaacacgacaaaactactgtgcaaccccctgtctataccggagaggtataagtactgttcatatatattcacatacccatgaacagcttcaggtcgatcgcatcaattaaacaaatccatattgatttgtttgaactatttagattataaaaacaaaaaaattccatttattgaatacctctttcacgaagtttcaactgccagttccaggcagagcgcaaagtatcttccaaagtttccacagctttccatcccaattcggaattagcgaaatcaggatttgcccaaactttttcaatatctcccgcacgacgtccaacgatctgataattcaacttcacaccggtagccttctcgaagccttgaatcaattccaatacagagacaccacgtcccgtaccgatattgaatacttccactttttctttctgcgccttctccaagatacggcggatagcaatcacgtgtgccttagccaagtcaacaacattgataaagtcacggatgcaagaaccgtcgggcgtatcataatcgtcaccgaacacactcaacttctcgcgaatgccgatagctgtctgagtcagataaggaatcaggttctggggaacaccgttcggcaactcacccagcaatgcggtaggatgcgcgcctatcggattgaaataacgcaacatgattgcattgatcggagcaccggaggctaccgtatcacggataatctcttcattaatctgttttgtatttccgtatggtgattccgctttcttaatcggcgccttttctgtcaccggcaattcatccggctgtccatacaccgtacaagaagaagagaatacaataccttccactccgtgtttcggcatcagttcgagaaggttgatcaaagaaaccagattattacgataataaagcaacggtttctccaccgattcacctaccgccttgcttgcagcaaagtggatgatagctttaattcctttatattttgtgaatacagcgtcaagaccttcaaaatcaagacaatccaacttttcgaaagccggacggataccggaaactttttctatattgtcgacaacatcagcactggaatttgataaattatcgatgatgattacttcatacccactgttttgcagctctacaacagtatgggaaccaatatatcccgttccccctgtcactaaaattctttctttcatattctttacttatatggttagttcttcggtctattattgtttgagctacaaatgtatggaaataaaatgagaatgcaatattccgtaaccattttatttataaaagaattgggaactcattatctgtatgtccccacacagccgagcccccaattcatatttaattatcaactgtaaatcttataccacgccggagaatcccatgaatgccatagccagcaaaccggcggtgatcaaagcaatcggagtgccttgcattcccttcgggattttcaccagactcatctgctcgcgcagtccggcaaaaagcaccagcgccagtccgaatccgagagctgttgagaacgcatacacaacgcctgtcagcaaatcatagtctttctgaatcaccagaatagccacacccaagatacagcagttggttgtgatcaatggcaaaaatacacccaacgcctggtacagagccggagagactttcttcagaatgatttccaccatctgcaccagtccggcgatcaccagaataaaagtgattgtctgcaaatatcccagatcgaaaacatccagaacaaatttctgaatcaggaaagtgacaatggtagcgatggtcagcacgaaagcaaccgcagcgctcatacccatcgcagtttccactttcttggatacgcccaggaacggacaaatgcccaagaactgcgacaacacgatgttgtttacaaagattgccgaaataaaaatcaatatatattccatattcttctcttatttaattgaattaggctttcttcaagctgttgatcaacgcaataaggtatcctaaagcgatgaaagcacccggagccaatacaaataccaacattccgtactcttccggcatgattgtcagattgaaaatcttgcctgttcccaagaattcgcggacagctcccagcagagtcaaggctatcgtaaaaccaagtcccataccaagaccgtcgaacatggaagccaccggattattcttcgcggcgaatgcttcagcacgtcccagcacgatacagtttactacgatcaacgggatgaaaagccccagtgtggcatacaaatccggcacgtaagcctgcatcaccatctggagcaatgttacgaaagacgcaatgactacaatgaacgatgggatacgtaccatatccggaatcagattcttgatggaagaaattaccacgttcgagcaaatcaacacaaacatagtggccagtcccatacccataccattgatagccgatgaagttgtacccaatgtaggacacataccaagcaggagcacaaacgtaggattctctctgataatcccgttcatcattactttaaaattattcatatcttaatctcctcctttcttaattaatagaatcttgcttcaccgtttcagtttccggagcagtggcaggttcatttttctgcgaagctcccgaaacagtatctacttctcccgtcttataggcctcgtaagccttgttgatagcgttcaggaaagcacgcgacgtgatagtggaagcggtaatagcgtctacctggcctccgtccttagagactttcagctcaccttcgcccggactcatgcctatgatagactttttgctcatttcgtgcgtcaccgccttttcgcctttggtagcgtcataggctccaaaccatttgtcagctttcgagcccaatcccggagtctcggtatgggccagcaaagagtaattgtaaatcttgccttttgcatcaaagccgaccagcactttcagttcgccaccgaatcccatagctttggactcaacagccgaacctacccattcctctcctttttttgccggataaacgatgaagtccaccactttctttccgtctttctcgctgaagatcgtgtcgctttcgcctaccgggttattagtaaattccggaagaacctgtttcaaggccttgttcaatgtcttcgcattcgcttcggcaataggaccttttgtcagttcattcacgtaagccagcaatgctacggaaatggcagtcacccccgtaagtaccagcagcatattctttaaagatgattctaactttttcatttcttcttcgctacctccccaaagcgtttaggtttacaataggtgttaatcagcggagtgaacgcattcataatcaggatggcaaacgacataccttcgggatatgcgccgaacagacggataataaccgtcagcagaccgatacaaacaccataaatcaacattcctttcttgctcatcggagaagtcacatagtcggttgccataaaaaccgcacccaacatcaatccgccggaaagcaactgcaataccggagatacatattttgcaggatcaaccaaatgcatgataccggcaaaaacaaatacagtgaccaagatagacacagggatatgccaagtgatgattttcttccaaagcatgtaacccaatccgatgagcagagccaacgcgctgacctcaccgatacagccaccgttctgaccgatcagcagactgaaagaatcaggaagctggtcgatagagaatccctgaacccctccgattattcctttcatgatagccaacggagtagctccggtagtagcatccgtataagctgtcaactgacctactaccggccagctagtcatctgtacggggaacgaaagcaacaggaagacacgtcctgccaatgcggggttgaaagggttgcagcctaatccgccgaaagacatcttgcctacaccgatagcgaacaatgcgcccagaataataatccatacaggtaggttggacggcaaattgaaagccagcaacacacctgtgatgacagcagaaccgtcacaaattgttgaagtcggtctcttcatcaaatattttccgatcgcccattcgaagaataaacaggctgcaacggaagtagcagtaacaatcagagcacccagtccgaagaaatagagagacaccagaaacgccggaatcagtgcaatcagcacaccgtacatatttttctgtacgctgtctccgccatgaacgtggggtgatagtgatacgattaatttattttccatattcgttattttttagcttgacgtgcacgaatcatagctcccactttgcctttaccgagacgacaatagtcgagcaacggacggttggcaggacaagtgaactggcaagagccgcactcgatacagtccatgattctttctttttccattctttcaaaatcaccgttttcggacaaagctcccagcaagtacggttccagtcccatcggacaagcgcttacacacttcgcgcaacggatacaggtctgtgcctcaccacgcttggcttccttctgattcatgatcagaataccggaactgcctttcgcagtaggaacttccgtattgaccaaagccttacccatcatcggaccaccaccgatcacttttcccgtatcttccggcagaccaccgcaagcatcaatcagctgcttcatcggcgtaccgatacgggccaggaagttggaaggttttgcaaccgacttaccggtcacagtgattacccgttcaaacaacggcttgttcttctgaacggcttgatacacagcaaaagcagtacccacgttctgaacgaccgctccggtagaaataggaagggcgccgctcgccacctggcgtttggttatcgcatcgatcagttgcttttcacctccttgcggatatttcaccttcaaaggcactacctcgataccggcataaccggaagccactttcgtcatcagctcgatagcgtccggtttgttattttcgattccgataaacgccttgttcactttcacagctttcatcaggatagaaacaccgaccatgatctcttccgcgtgttccagcataagctgatgatcggccgtcagataaggttcgcactctaccgcattgataatcacacattcggccttgaaagaaggaggaggacaaagtttcacctgagtagggaaacaagcgccacccagaccgacgattcccgcttcggcaatctttttcacaatctcctccgacgaaagctcacattctttcaccagggttgcgctacggtcaatcgtttcttcccattcatcaccttccacatcaataaaaatagctggtttcgcataaccgctggcatcgactatcgtatcaatcttcgccactttgccactgacggaagagtgaattgctgccgaaacaaagccggccggttcggcaatcttagtgcccacctttaccacatcccctttcgcaacaatcggctttgcaggtgcgccgatgtgctgccccagcaaaataacggcctttgcaggaacctccgccgtgatgataggttgatgtgccgacaatttattttcgtgtggatgaactccaccaattgaaaatgtctttaacatacaattctgtattttattctgttattattctgttactttcggagtagccggagctttcgaagcttccacagcttcttccgccttcggtttgcgaggagggaaattcagctcgataatagaattctgcggacaaacttccacacatttccggcaagatttacacttgttcggatcaatgtaagccagattattctccaatgtgatagcctcgaacggacaagtcttcacacacttgccacagccgatacaacttaccgtacaagctttgcgggcaacagcgcctttgtctttgttcacgcaagagacgtacacgcgacgcgacttcttaccctgcgggcgaatctcgataatcgctttcggacaggccttcacacaagcaccgcaagccgtacatttagtctcgtccacttccggcagacccgtttcgggattcatgtggatggcgtcaaactgacaagccgccacacagtcaccacatcccagacaaccgtaactgcatcctgtctcaccaccatacagtgaagcagcaatagcgcagctcttggcaccatcgtactggttgatgcgagggcggttggcacaggttccgttacatctcaccactgctaccatcggttcagcctcaccggctgccagtccgagaatatcagcaacttttgccatgacaggctgtccgcctacagggcagaacttaccttccagtgaaccggctttgacacaagcgtcggcaaatccgctacaaccggggtagccacatccaccgcaattagcctggggaagcacttcccccacttgggcaatccgcgggtcttcatacacggcaaatttcttggaagccacataaagaatagcggccagcacgagcgctatcgctcccaatgaaatcactgcaatcagaatcaaattcataatgttttagttatttattggttttatagtaaatgaaaatttttgtttcagtcgtgttttgttgagccagagaatgaaataatagggtataagtatagccagagaaagaagagcggaatacagttcattctccatcaacgccataaaaaggaatagtgaaaatatcagaagtatgaaaggaattataaaagccaataccaccgccatcatgcccatcgacgtttcgccaatcaccatgactttctctcctacccggtaggaagaggccgccgtatcgataatatctatgattttgtccttgctatctgctgaggaacagtgtccctttgcgctacaagccgcacaagccgatgtctgaacaatcctcaccgacagatgagaaccctgtatgttttccacaatacccagatgctttatagtattattcgtcattttgcaaactcaacattacaaatcgcggcaaatttaatcattatttatgaactacgaagcattcccccaactttttctacctaataaattgttattttttgtgttttcgttatcgcacacggaaaagatatgcctaccatttgatatttttcgagaatagcaaatagacatcctaaacaaaaaatccattcataaagaccgcaggcgggaaactttttcccgcctgccacttttactttatctgtttttttcaccgttctcctctctcctcctcttttcttctcctgtactgaaaatacattctcctccattcatcccagatagctccggcttcctcttcattgaaggcatccagacagcactccaccacttttacgtaatcactcaatgggcgttttgccccttttttaaatcattaaaagtagagtggccgatgtgtactttcttacatatttctccatttttcaaatccgcacgctttcgcaacttttcagtgtatgctcctaaaatcaggtaacaaccgacttcgttttccattcctttttattgttaaaattaaactatattgattaataatctccactttcatcccaacatgtcgggacgatgtctattttgcatttactaattttacgccgtgttttgaaacatatttatgtattttccacaaaagtaaagtttttaattcattacaacaaaaaattatgtccaacaattacagaatgtcctattttatgccacctatcgctcctatcaaagacaaacaaggccgactgatggctcctcccacacttatccccttctgcgaagtctccatcgaacaagttttccaaatgattacttgcaacgagaacctcaaagccctgaccgaacaagtgcgcaattccaaagatttacgagccgccaaagcgtcattactaccgtatgtgaccccctgcggcacattcacgcgccgtagcagcaaggattttgtctccccgtctcacctggtgatagtcgatgtggacgatctccactcttatcaggaagcagtggaaatgcgacgtatgctctatgatgatcctctcctacaacctgtactcacctttatcagtcccagcggactgggtgtaaaagcatttgttccctgccattattcctccacgataaatgataccaaaaatatcacagaaaacatgagttgggcgatgcggtacgtagagacggcatacaatacgataacagcagtttcttccaaaacaaaatccaaagtcgatttctccggcaaagacctcgtgagatcctgtttccttagttacgacccggaagcattgttcagaaccaccaacgaataaattataaatcaaaaatcataaatccaaatgaccgatattgaatctttatgccgtctcaccgaagcagtcgaagcggcaggagcggacattgctcccacctatcttgaatacgtacaattgtcattcgccatcgcaacggattgcggtgaagcaggacgtgactttttccatcgcctgtgccgggtgtctcccaagtatcagcgcgaacatgccgaacgggtattctccaacgcactccacacccaacgtggagaagtgcacttgggcaccgctttccacctggccgaagcgacgggagtaagcatctgcatagaagaaatgcccaaacatcccacaggtacaaaaggtacagcaggtacagcacgcaaatttcccacacacacgggcgcgtataataaggtgggaaatgacaatatctccgatgataaagaaggggaagaagaactattaccgggcagtgaaccgcaacatcaattgcccacttttccgaaaaacgactggccggaattcttgcaacgtatcataaaagccgggagcagcccaatacaacacgacatcatgttattgggagcgctcactgccctgggtgcttgtatgtcgcgccacgtgcgatgcctatatggcggcaaataccatcaccccagcctccaatgtttcgtagtggctccttcggcttccggcaaaggtattctttcttacatccgcttactcgtggaacctatccacgacgagatccgcaaagaagtgaccatacagatgaaagcatacaaaaaagagaaagccgagtatgatgcaatggggaaagaacgaaccaaaaaagaggctccacaaatgccccccaacaggatgttcctcatttcgggcaacaacaccggtacgggtatcctgcaaaacatcatggactccgacggaaccggacttatctgcgaagcggaagcggacactctttccaccgccatcggatcggaccacggtcattggagcgataccctgcgcaaagcgttcgaccacgaccgcttgtcctacaaccgccgcaccgaccaggaataccgggaagtgaagaaaagctatctttccgttctgatttcgggtacgccgtcgcaggtgcaaactttcattccgacagcagaagacggatcatactcccgccaattatattattacatgtgcggaatcagtaaatggatcagccaatttatggacaacgagatagattgggaggagatattcaccgctatgggactggaatggaaagaaaagttgagcgtgataaaaacacacggcattcataccctgcaacttacggatgaacaaaaagaagaaatcgacaccgtcttttccgacttgtttgagcgctccagtgtagctaatggaagggaaatgtatagttttgtggcacgtctggccgtcaatctatgcagaatcatgtcggaagtagctgtattgcgtgccctcgaaagcccgcagccctacgacttcaagacttctcccacctctcctttcacaccggacaaggagattcctgcggacaaccgcaaagatgacatcatcactcgttgggatgtatccatttcacaggaagactttcatgctgtgcttagtcttgcggaacctctctactgccatgccacgcatattctatcgttcctccccagtacagaagtcagccatcgtcctaatgccgatcgtgattatctcttccagaaactgggtgatgaatttactcgtacacagttattggaagaagcagttgccatgggaattaaggaaaacacagccctcacttggttgaaacggctcaccaagcgcggaatattagtcagtatggacggtaaagggttgtatgcgcgtgcgtgtgtgtatgagtgaaccggaaaaagtgtacctactgtacccgttttacttacggatgcagtagtcatttcaattaccacatccgttttgactgaaacaatcgtttgtcctgcataaagcatcgctttaggaggtgtaaagctaagctttagacatcgtaaagcggtgctttagacaccataaagcgacgctttatttaaggctctcccaaagcatccacaatcactctcacctccaatggtgtgaatgagcgtcgctttgattcgtagcctaagtcgtacaggcgttgcagaagtccgggacacaaggagatccatttcttcatctttcgataggcagcaatgtcagttagttgtggagaatagagttgcgccagttccatgcgcccgtaagcacgtattttaaattcactcatgatggatatatttctgatttactgttacaaaaataacaaaaaacggctatataaccaacgtttttccattgaataaccgactataatgacaaataaccgaccgctaccagacacaaccgtgcacagctgatttccgggagatccggagtagtatttttgtatcgtcgaaagggaaaagaatccccggacaatatgtttaaccctttaatttattgttttatgattcgttacaaaatttatcagaaccagcagaagaaaggcttgaatgcgggtaagtggttcgcccgtgcagtaagcgacgagacgtttgatttggcaaagcttgccgaacacatgtcgaagcacaattcaccgtattccggtggtgtcatcaaaggtgtgctttcggatatggtggattgcatcaaggaattgttgctagacggcaagtgtgtgaaaattgatgatcttgccatttttggtgtgggtattcgcagtaaggcagccgatgcgctggaagagttttcgttggagaagaatattagcggcatgcgtctgaaagcccgtgccaccggtaatctgtcaaccaataatctgaaactcaacagccagttgaagcagcaggcggaatatcagaaaccgacaactgccggaggaggttctgattcgggtgacacccctgacccgaaaccggacggaggcggcgaagcgcccgacccggctgcttaaaaggtccaccacggaggacacggatttccacagattatattgaattggtagttgctaaagtagtcgattatttatctgtgtgagtctgtgtagatctgtggtaaaagaaaactattattaatttatttaaaacctgttattatgagtaaatcatcatctccccgctctgtatggagcttagttctcaaaatcgttatcactgtagccaccgccatcggaggtgtgttcggaatacaaagttgcatgtaactccatgcggactattacattaattatcattcattgcagtgccacgccggaaggaaagtccctttcggcggaagcttgccgacaggatcatatcttgcaccgtggtttccgtgatattggctatcatttttacattactcgtaatggggagatccaccggggacgtgcgttagaaaaggtcggggcacactgccgtaatcataatgcccattcggttggtgtttgttatgagggagggctggatgcgaacgggaaaccgaaagatacgcgtacattagagcaaaaaggagctttgctcgctttgttgagggagttgaaaagacagtttccgaaagcgttgattgtgggacaccgggacttgaatccaatgaaaggatgtccgtgctttgatgcggtgaaagagtattctcaagtaatttcttgtcaaaagtagcttcttatagatttccaccacagccttattgtataaaaaaataccaacgatcttcacagacagttggtattttttggaaatgcagggattcatgtttgtcacatgaatctagggacctacattttttcatctcactgtaaatgttcaattataacatagcgtattaaaaagcactttcagtacttcttattcattgtttttcatcgttcaacgagtataagctccatctttagcctcaaagatgacagatggttcaatcacttctacagtatgccatgcacccttaggtatctgacaaccatacttggcttctgtaggattgagatggatacgctgtacttcccgatactcaaccttacgagctacattttgtacactcacccccttctgaaaatcgtccgtatccttctcatacgaaactacttcctcataaattacttcgtccaacttaccacacaggcagattactgtttcggtagtatcttcatgtcgatggatgggcaccttagtttccggcaacaatgcgtttagcatacgttgactggtatcagcaggtgaagtgcgtaggtcgaagttctgacgcaaacgtggattctccatagcttgctcaaataacttatctaaaaattctttatcaaattccataatcgttattgtttcaatgatatgagatattcttcatgtaaacgatagtattttttcatgaacaatatgtaagcaatagccaatacaactgatacacccaccagatataaccaatgagcaaacatcgtatcgggacaaagatagataaatcctagagaaatcactaactgcataaccgtatacagtaatgaaacttttacatgccccactttcaactcattagccataatctgataagcatgcttacgatgtgcctcgcccaagttctcgtgcaacataatacgatgtacaatagtcagacagccatccacaccatataccaacaggaatatcagccaagtaatatccgttgtctcgatcatcacattacctaacagaaacagtatgataaaagcaatgccgatagagccgacatcccctgcaaagcatttcgctttacccttcggacggaaattaaaaatacagaacaccaatgaagcaagaatcgttgatatgatcaaactctgttctacaaaaacaccatttatattcaccagtgccaacggtatcaatacagccaaagagtagcctgctgtgataccattgattccatccatgaagtttatcacattcgtggcaccgacatagactattagtgccagtaatattatccaccacattgaccaatgcaatatgccgagctgatagaatgccattgcggcagctgcaaactgagcaaccaatcttacagagtccggtaatgaatggatgtcatctacaaagctaatgcctgctacaagtgtcaagccgactagaaaccagggatattgaaatccgaagaaagcgctccaaatccagataccaattaaaaagattatacctccgccacgcaatacaatcgtagagtgcgatgagcgttcgttgggtttgtcgataatgttaaagtggtcagccaccttgaaatagcataactctaatgccaatagaatcacaaaaataattccgtaagtcaagtatgcattcataatcattctactgcttaaaacttctaatagtgtccatcaatccatccttcgctcttaccggcatccgcgtaatgccaagagcagccttgatcttggcattactcactacatagttttctgtgagcttctgcatccgaagaggattgagcggaagatgaaaccacccacccacttttgcaactccgttcatcagacctttcggaatgcaccatatatgagttttcttaccaagagcctcacaaataacctgaatgagttcattagttgaaagagcttcatcgtctcccatatggtaaatgcccgaaggtacattcttagttaaaaatccgtcaattactacacaaagatttccaatactggtaaacgaacggcgattctcaaaagcaccaagaggccatggaatccccttgctcactactccataaagaagattgaggttacccttgtttccaggaccgtgaatcatacaagggcgtataatgtacacattcttcccttttacaagagagtcgccatcatcaaaattgtgataaggacgtttgagagcttcaggtgcgaaatgcccgattatataatcctccgctttaattttactctctccataaggacctacgggagtgggaacgcattcttctgtaaggcatttgccttccactttgtcagaagcactctttacggtagagaaaaatataaacttctttgcagattcattggcaagaaaccaatcaaaaatacgctgagtaagacctgtatttaccttgaaatacacatccgccgcactcttgttccgagtgtcatgtgccttaccagcaagatggataacagcatcaatctgcggcaaatcaatgccacccagatcattccatgagaaagtctttactataccgtccttctctggagccacaatgtccagaccatatattgtattctcaggcgaaagcgctttcactaaatttgagccgacgaaaccgtggactccggtaatgaggatattcataactaaaactctttaactaattcaatatatcggtcacatatctgcggccatgtataattatcttcaacgatttgacgtgcagttttaccttgagctttcagtgtgttaaaatccttttcaatcgctatcatattagcgatcacttcctccacattctttacagtactccaaagcccaatctcgtatttttcaagtacctcttgaattgacggaatacgtgtaactacaggaatcttaccatatgacatcccttctaacaatgctatcggaagcccctctgacgaagacacaaggcaatacgccatacaatttttaagcaatgctattttagcatctccatatacaattccaggaaaaataatatttttgcacccctttgcacgttcaacaatggtacgaccataagcattattaatatctccaccgataaccaactgataatttacatgattatgccttttgaatgcatcaatcaggacctcatagttcttaatcggatcaatgcgaccgatagtcagaaagaattttccaacttgtatttcattcttttcaagaatatccgtatttaattctttatttatgggcaagaatacaccacaaggaagaaccttacaacttttgtgatacctgttgtacacctcttttgctttagtacagctaacggtaaccacatttttagtgaaagccaaagctaacctcattgaagccataagaagtttcttcatcatctttccatgtttcgggctatcttccgcaaggctatgaataatagcacttgatttcataccaaacaaacgtacaatcagtgaaggaatcactgaaaatgtaaccgtttgatacattaccatatctatttccttcctatgcttgatcaaatatggtaatgattttagatacaaaacagggatactggtcatcgtatttccccaagtcctatactgcttaattttcacccctttgtaatcagttaccttattgcatgatccaaaactcatcacaaacgactcaaaacctcttttcttcagttcaagagccaaattataagtatatgagttcactccgttcggttcctcatgtgcacctatgaatactgttctcatctattattttccctctatcaaatccaaatatcgtttctcgaaaatctccatagaatagttctcgcgaagattctgattgctcctcactcccattttattcctgagttctactgaatcaagcaacttgcataaagaagtggttagtcccgtaacatcaccaattggatgcaagtaaccattcacaccatcaattactaaatgatcattatctccaacgttagtagcaaccaccggcaaactccaattcaaagcctccataatactattgcttgtaccctcaaatagactagtagatatatatatgtcggcattacgttcaagttctgatacattattcggtttgatatggatatcagttctatccttgatgccatacagttcaacccattcacgaatctgcgcttcaagcactccatagcctacaatacagaggcgataatcttttctatcaagcaatgaaatacttttaataagggtttcgtaatctttttgaggatcgaagcgaccaactgtaatgattgtcctttgagaatgattgtctcttataattggttcggcaatatccgggaagcaattaggaatgacaatattcttatctttccgaaaacctaacttctcaaaataatcagccccagaataacagttgtaaatggtcgctgtagcccaatgattatgagcccatttctctatcaacatcttactccttggaagtctagagttacgtataccattatatacgcttatttttaatctcttaccaagaaatgaaccaagaagatctggcattgtcagatagttaagaagcacatcagtatgagattccttcaaaagttctctaatccgtatagtctttaaaagcatactgccgttcagtcgatgaaccttaactgagctcttggttaacaaatctacatttcctttatattcagtgtgaccgccataaagcacaatcagattcacatccgtatgctttgaaagctgaatcgcaagcaatacagcctgcttctctgcccctccagaatctattgtcgaaactaatatagaaactttcttcattatcatttacgtattaatgttcacgagctttaatgtaccttgctggattcccagcccatacttgataaggcggaatgtcttttgttactatacttcctgcacctactattgctcccttgccaatagttacagaattacaaatgacaacatttacacctatgaacacatcatcttcaatatgaacttcaccgatacgaaacattcttcctgaacgcgatggatcaagatagtgggttaaaattctagtaccagcagtaatggcaacattgttacctataaatattttatttggcgcaacagtatcaatgcctacaccaccatatatcaatgctcgacctaagacattcccccaattttcagtaacttagctctatgttgggtaacataggaaagcaagcaagccccagccatatcttccaccacatacgtttaggagaatatactacaaaaaagttttttattgacatattgtttttttattatttagaattgttttccagtctcaacaccaagctcatcatacctcttacaagaatagtcttactgaaattcttaacatactctccttatccagttattactttggtaaacagagccctatattcgttaccatttttcacagccaatgatataactatgagtaatcaaacaataattaccctatctaatttttcttcaaagccttctcacaaaatctattcacccaataagccaacgctgttccaacaatgataaccaaagcataatgtaaatagcaacctttattcactggcgattcataaatccaaggtaagtatacaataatccaagaacccacgattccattaaacaaataagattccaaagatattttaccaaaaaaactaagtacattcataaaagtctttccactgtagcaaaacaatctgcaaagtaaagggacaaatgaaaataccaaaaaaccaggccaataccccaaatgcaaatacttcatcataataacaagaaataatggaacaactatcatccacagaaacgaaatgcacttttcctctttagccataggagccaacataaaaccaatggggtaatagcatacaacggtacaagcattgcaatataccaagctcctttatgttcaagccaataactgattgtggatatattaagcacagcttccgcaatagttctgcctcccattacagcaagaatatttcctatgcctgcaatgataaaatacggaaccagaatacgtttatatcttcttatataccaacactttacccccacacaaatttacttaactatcaatactttttaatgaataccaaaggcccaagccgctcacgagaaggaaaatatccactcctacggaggcaagcccgcagagcgactccatccaccttggcatcacaacaccattgccaacagaatgaccaaatatcactaaaagcgtggcaatccccattagttgggtacggtatttactaatatcgtttacgttaaattgaaacattgtttacaaatacactatgcttgaattactatgatatttgaagctggtctactacatgctccgcaaacaacttccttgcatttataccaatgcgatatttttgataattttgctgaccatttattgcaacataatcatacttacctatttgaacctctttgataatattctcgaaatctgaaaaatcccaatttatcggaatataggtttcaaatggtttgtataagtcaggataggtaacacaatgctccatagaaggcttcaacagaattgccctattgtaaaacgcttcaaaatctctcagacagcactctccccatccaaatggagatgcaatcgacttagagtgtttaagttcctccaaatactcttctcttgatattttcttatatacatcaggatgtgtgatgtccctaagattcattatcaattcaagcatttttttacgttggtaaccaactacatcgccatacacttttgggtttgaccctccgtaatgaacatcaatagtccgttctgaatcactctcaataacattagggtctgcaaacttaaaaggatgcttatatatccaagtctttccacccattctgtcataaaaagcaacattccatgaaacacgtaatttgtgaagatattcttttagagctgtatgataatgaatcgaagcaagagattcatctgttaatcccaacttttggtggtaataatcagaatagagacgggcacaataaaactcatttgtataaagattggtatccttcagcagttgttttttgaaatacaaatccacataaggtagaacatcaaaaagacatgttcctgtactatctgctgtatctagccaacacaacaatttgcatttctgttttaagaattttacgagagctattcttttttcagaattttggccaataagggattgagaatgatgaaaagccagaaaaactatatcaaaacgacctattgtatcccacttcaactttattccctcataaggaacttttgtagatttagggtaaggaacatagtcaaaaatgctggcatattttattttatatcctaaatcgtgaaattcattgcgagcccacatcatggctttcagccaacgataggtattgaacgtaccatcataaatgagcgttattgttctcataagttttacttcactttttctagatactccttcaaactcatcagattcttgtccttctcagagataatcacgttatcgatgccaccgatcttctcgaaaggccattcgatggccatatcaggatcgttgtacatgatgccagcatctccctcgctataaaacacttctccacacttgtagctgactacagagtcctcaagtacaaggtagccatgaccgaagaactgaggaatatagagagtcttctgattctcgccggtaaggtcgaaaccttgccacttaccaaaggtcggagagtctagtcggagatcgatgattacatcatacacatgtccgctgatgcatcggacaagctttgcctgctgcttcacaagctgaaagtgcattgcgcggatcacacccttcttagagatagtgtagaatacttccttcaactcatgctcaataccgttagccttgaacatatcaatattataatccttgacaaagccaccgcgttcgtcggtagcgtagaagggagttatctcgtaggctcccttcatttcaagctccttgaattcaaatttctgaatcattcttgtaaaagtttaatagggtaaaaggttaaagagtcttcaaccaatcaatagtcttgttgataccattatcaaaatctgtagagacatactcaccaacagttgccacaaggtcactattatcgaacatctccatcgagtacttgatgccatcgtctggacggatacccacacctaccttgtctgcacaaccagcaagttcaccaatgcgaaagagatattcttttagaatacgaggagtaccagaaccgatatagtagaatgccttattggtatcgttggcactaagacgatatactgcctcaatgagatcatccacataaatgaagtcatatggctgaagagcaggtccaaaagttgcttccttacctgccatcaactcacccaaagtatagctcacaaggtttccagtcttgttacctacgccatagatattcgagaactgcatccatacaaactgctgtccgatgtttttgcagtagtcctcaaggataagtcggcaagcatgctttgccacaccatacatcataccgccagaggttttctccaagttagggagactgaaggttgcattctctgctacggtacctgcacaaagatattttttcacattgagttgcttgctgatgttgacacaatccaccgccatctgaatatttgcaagttgaacgataggatctgccttatcggcaccattcacacctctccaagccagatgatagaaagcatcatactcgccagatggtatcttcttagcaagtgaaacgtctactccagactcaatctttgtaatgaactccgactcaggcaaacggtcgcctgcaaaagttatatctacagcaaccacattaacgccattcgccaccaacttcttgatgagcgaactgccgataaagccattgccgcctgtcactattacgttcttcatgttcatttacgcatttaagaattctgcaatctgcttatccatacaagcacgtacatcgccaccagcgagccagatcttgctccactcaacaattttatccattgcctcatcaatattccaacgtggagtccaaccgaaagtagccttcagctttgaacagtcaagtttaaggaagtttgcttcatgagggccaccatcgtatttattcacccacttcataccttcgccccacttgctgacaaagagatcaacgagcgctcctgtctggaaacaatcgacatcatcaggacctacattgtagtagtcagcatacttgctatcgtcatactgcttcatagcaatcacaaggtaagcatagagaggctccaatacatgctgataaggacgagtagaataaggattgcgaacaacaatatcctcatgttttgcagccgcacgaatactatcaggaatgatgcggtctgtggcgaagtcgccgccaccaatcacgttacctgcacgagcagtagagatagggataattggcaatccgtccttatcggtgaaaaacgagcgcttgtaagaatgggtaacaagctctgaacatgatttagaatttgagtaaggatcatagccatccaactcctcgttctcacgatagccccagttccattccttgttgagatacaccttatcggtagtcacattgaggaaagacttcacacaattgctttgtcgcacacattcaaggatgttgactgtacccatcacgttggttccgtaagtgtaagcaggatctttgtatgaattgcgtacgataggttgagctgcaaggtgaagtacaatctcaggttgtgcttcatcgaaagccttcttgagtgctgccatatcgcgaatgtcgccaatcacagaatacacatcgccttcgatattggcaatcttgaagagcgaaggctctgtaggtgcttccaacgaatagcctgttacgatagcaccagcattagcaagcatcttacacatccaagagcccttgaaacctgtgtgacctgtcaaaaacacacgcttgcctttatagaattcgtatatattttccattgttaaatgttgacttattaattgccacctttgcttattttgcataatcagggatgtctggaacagaacgatcccaacgcttccaaggagccttgtcttctgcaagaagtttctcaagaaatgacttctcgcgaatgttatccatacattgccagaagccagtgtgaacgtatgacatcagttcgcccatttctgccaatttcacaagaacggtcttctcaaagacacaagtgtcccctccctcaagcatatcaaacaccaaaggttcgagaatcatataaccagcattaataggagcgccatctgcagcattcttctcacgaaacgcacgtacagcctgatccttggtgatatccagtatgcccttatcctgcgccatcttgactgcagtaagggtagcgagcttaccatggctcttgtggaattcgatgagcttgtcaatctccacatcacatacaccatcgccataggtcatgaggaaaggttcattgccaacatacttctggatgcgcttgatacgcccaccggtcatggtgttgtatcctgtatcaaccacagtcaccttccatggctccatattggtctggtgaacggtcatctcgttcttaccattacggtaatcgaaggtgacgtcggagttgtgcagaaagtagttagcgaaccattccttgatatactcctgcttataaccagcgcagataataaactcagtatggccatagtaggcatactctttcataatgtgccaaaggataggcatgccacctatctcaatcattggctttggtttgaattgagattcctcagagatacgggaaccgaagcctccggcgagaagaacgactttcataatatactcattatttatacatcaaattaataatcttcaatacttctgttgaactattaaactccttcatagctacctcttttcctgcaatggcaacagaattgtttttttccggatttgcagatacttccatcatcttatcagaaatacaattaatatcccccggtttagctatgaaggcgctgacgccatcttttaggaagtctgtaatattaccaacgtcagtaagtacaacaggtctgcctgatagtaagtattcacccaatttagtggggaaaccgtacttagcttgaatattatctggacgagcaagaacaagcatttctgcatccacaaaatactgcggaatagtggtaggagatacagaatctgtaaataccacactatccagagctttgtatagtctcagatattcttcatactcctgcttttgttcctgcgaaacgattggtccaatgatataaagttttctatcactatacttctcatgatatctgacaaaagaggcaatcaagtcacctacaccatccttgctatccttgtttacatttccacaatacgctatgtatttctctgcattagggttacgttgaacgctttcaaagcgctttggatccactatcatattgatgacatggaccttatacggactgaccccataatcaacaaagtactgctttaaattgcctgagataacgaagattccgtttaatcgtttccataatttcttgtagtatctccacggataagtccttggcttaaataaatcaggacattccgtcacttcaaaataggtctgcttacgtctgatccacaccagtaatggcagatattcagcagctccatacaacagcaatctgtcttctttcttcacatctgcaagcaaaaaccaaatcgtggtgaagaaagacaaaagttttgagaaaactttactctccactttacaaggtctgagtcctctaataattacaccacttctgggttgacaattcctcagatcaagcctcaaaaacgctacaatttcgacatcatatcccagttcagcagcactattagcgtatgccagtaatctattactactggcagagccataactaaaaatccaatttagtatgtagaattttccttttctattcatttattcaatttccattttgatttcgagagtctctatcgcatcgactcttcgtttgctctcacctttaagcgatgaatgtgacaaccgaattagcagcacacaacgatatgatcacccagcacttcacaccagtaatcttcgcgtccgcagaaaggagcagacctttgccaattcttctacctgtatcagaaatgcaagtagatgtgtgtagtgttgcatatggaccaatccgattggcgttacctactacgatggttccatagtgtgaaatcaccaaaccgtagaccgtagtcacaagcatcatagcctatactaaacccaagcttgcgagacaacctaaagaaacgcaattattgattataagtaacaatcctccccccattttggcaattatgagagtaatattgcacctttctcattgccttaataaggaactccatgatgtaatcttgagggagctataagatgcaataacttctttttgagaggttctttgaagtaccctctctattcatcatcatgtctacctgaaagtagaagtggaaattattacgagacataataatgctcatatttatctataatgtattgtccagaaaatcaataagttttttagtcacttcttttgaaccaaagttggctatagcatagtcatacgctcttcctgccacttcttttgcctcttgaggatgtgataggatatatctcatcttttctgcgtatgcgacatcatcgcaaggatctaccaagtaaacggtattgttatcttgcacatagtaatgaatctctcctacattcgtcactattgccggtgtatgactcatcatgtattctgccaatttcgttgggaaaccacctgcagctctctttgtaacaggttgagacgtcacaagaatctctgcatttgcaagagtctgtggaactaagttataatctattcttcctttaataaaaactctatttcctaatccaagttctgctattactccttcgacaacacttttatctttgtcattaggtgtaccataaagatataagtcaacatcagaaaaatcatcgcatactctcttaaaagctctgatgatgttatcaacattatcttttgccaacatcatatttcccatatagcacatatacttacgggaaactttttgctttactataccatcaaaacgagccgtatttaaaattgaacatagaatatacgtaggcttctcacacactagctcatcatagaacttttgaagagcctctgtcatgagaactctgaacgaaatgaactgataaacaaatttgtatgcaagcttataggaaaaaggaatcgttgatttcagcctcctaataggctcaggaaactcgtcgccaataaatccaatcttgattcccatgattcgcaacactggaacaaaaaagaggagatatgtaggatggtcaaagcttaagagtatacaatcaaacttttcctctttatgggaattccttattttctttatggcatttaaaagagacttgggcctatcaacaaaaagtttatataacttggacttattcgtgtccctcttatgggcataggcgtacttaacacctccaacataacctgaaagagaatatgcattatcgccgacctttggctgaaataccacaacttcaaccttacatccattatccactaacccctgtccataggatagtattcttatggtaggagccatcccttcggggaatgaatatgtgcaaagaattccgattttatttatcatacgtgcatgtattaaatgcaaaaaaatatagaaccataaagaaaggtgaatatgtaattgtttgtgagaaacataaaagcaacaatgatacaaaaacgcacacattcgctcccttgtgactattacctacatatacttttgttcctctatataacaagtagtaaaacactatggataatggaataccataatacctcatcaaatcagtcaatccatttggactacttaaaagttcatctccaaaaatatttgaaagaaatggaccaaagccaataaacggagattgcgttatctgattccaatggtatgcaatggcgccaaatcttgaccaagtggaatcatcagctgattgctcagcaattttttcggtcataaaatctaattgccccacataatatacaacagcaaacagtattatagaaaagatgattttattacttctcttgatgtttgaaaagaatatatatcccacatacaatgtagctgtagctacatatccagtcgtagaaaatgttgttagatttgtaagtagcaatacaagactattcttcgatgtaatcttttctttgaaatagaaaagattaatagccaatgctagtgttatatatatagtgaaacggcctggctcccagaagggacctgaatttcgcataagacctttaaaatcttgggggatactaaatatgtatagtgtatctacaatatttgtattgttctcaatattatcccaacctaaaagaggaaattgtgatgcaattgaccgaagaaaggatagtcccaatggaaacaagcaaattacccacaataccaagcaaacctgtgagatgaaacagactaaatctaaatatacttttacaaacttacagcaaattatcttagcaaatatagcacaaactaagagcaagcatgttggcttaataagattgataatggccccaccaaaattcaccatttgtaagaaatgaacagacaaaacaacaccaattagcaggattgtcggatttgaaagtttataacctcgatgaaaaaaaatgaatccaacgactggcatcatatacaacatccattcaaggaaaagcccataggtgaaacctcctcccgaccatagaattatgaacagaagaatggcatactcataccactttgtcttgtttgtcttgtcgttatatatggttatttgttccatatccctgttgcagtttggctgatgagtttattgcattgcactttagaccataagtaattcagcgcaaatacaatagcatttgctattaacactccagacaagccaaataatttacctaaaagtattgcaagcggtatataaatgattgcaattactcctgtcaatatcatctgcgcaaatacttttcctgttccattaatgatagttccatagactttgtacaacatttcaaatgaaatatacaataatataagactagtggttgaataatttatgtctattgtgcccttacccaaccatatgccatatacaaacttagaagccaataccatcaatacaccaataaaaatagacgcaatacagacttttcgtgataaagagattgtcttgtttatccatgcaaagtctttacgaacataagcatccgttgttgcagaccacacaggagtgatgacaatagtgaaaatcatagtcaaaagactgacatatttaaatgctaaattatactctaccactgcttctggacttacgactcttgctatgataatgctattggcctgaaaaagtacaattgtaatcatttggaggacaaaaaacttcaatccaaggcttaagatactaccaactgatttgaattcaaataatttgaaggatggtgcaatttcttccagtttcgttctaaaaagtccgatagaccccaggaacagaactaaaggaggaatcatactgttgacagcacctatctgtaagacggaagtaacatcaaacacatatacctgtattaccaacgcaatgagagcaataaattgtcccacgaaagtaaacaatgattggaacgcaggcatttgataagcaaatagaattgaatttattaatccaaacaagaactgaatacagaaagctataaacactacatttgtaagtcctcgaatttcaccagcatcacttgtaggggaattcagaactcctaaccaatcaacaaaaggactaaccatcaaaaagattactataattaatgctacatatatagcaagagttacataacagctgcttacaatctttttagcagaatgaaagtctccctttgccaaaaattctggtaatttatttctgagtccatttcctaaaccaacatccatatacccaacccaacctacaattgaggtgagggttagtaatactccataatctgccctatctacatgatgaagcataataggagctgatatcagggtaagaatcattgaaactcccctaataccgatcattgccacagtatttttatacatttttttactgcgactatcagttcctatgaactttttccttatttgagtctttatactaaacatttattattttctattgaatagataatagacacatgcaactgagatgtacaaacacattaaaaacttgtcggaaaatgagtttatatccttactttatcccccctcacacccatatacgcataaagggggttcgaagataagctttcagaataaaccttgctgaatagcatcctttggcatgattgataacataaattgaaccataatagcttgtcattgcatttgctaaaattattttcttcatggttcctatataggaatcaggatttaattcagtacatactgaaattgagttttttaaccctacagtgccaacacccagactggacttgtcggttggaatattatccaaagccttgtcatagttcttgattccactcctacaagatgaccctctataatctgatactgattttcaattttatcccatcttgctacttcataagcgtcataaagtttatcacttgcttgcgatacgtattttgcagcatttttctaatttatcattcattaaagcgtgcgaaatatgacaggctttcgccctcgttctcacgaatcaactcacacacgaaattgagaatatgtgtctttccattgccatgatgaccatagattactgctattctattcatagggatctcttgttttatagagttgactgcattaggagttggatagattaatattcatcgtaataaagttcatttgacatacttagaataaactgtaatctatttggaacatccattcagcctatttcagttcagatgattgatatttttcagaactttctccacaccattttattgacgataccgacatagctctgcacaatcttcacaactttggttgagacattctcgtctacatagtcgggcacaggaataccatgctgaccatcacggcaaagttcaacggctatgtctacggcttgaagtaatgatttctcgtcaataccggcaatgataaagtcgcccttgtcaatagcctctggacgctcagtagaggttcgaatgcaaatagctggaaagggatgtcccacactggtgaaaaaacttgattcttcaggtaatgtaccactatcactaacaacagcaaaagcattcatctgaaggcaattgtaatcatggaaaccaagaggctcatgttggataacccgttcatcaagtttgaaactactctctgcaagacggttacgactacgaggatgacaactataaagaatcggcatgtcatacttctctgccatacggttaatagcattgaagagcgacatgaagtttttctcggtatcgatattttcctcacgatgagcagagagcaaaatatattttcctttctccagacccagacgccgatgtacatcgctagcttctatttctgcaaaattgttatggagtacttccgccataggtgatcccgtgacataggtacgttccttaggtagaccacaatcggcaagatatcttcgcgcatgttccgagtatgccatattcacatcactgatgatatcaacaatacgacggttggtctcttccggaagacactcgtctttgcaacggttacctgcttccatatggaaaattggaatatgcaggcgcttcgcaccaattacactcaaacatgagtttgtatcaccaagtacaagaactccgtccggctttgtctgagcaaagagtttatatgaacaattgatgatattaccacaagtagctcccaaatcatcacctacggcatccatatatacttccggctctgccaacttcaaatctttaaagaatatgccgttgaggttgtaatcatagttctggcctgtatgggcaagaataacatcaaaatactggcgacatttattaatgacggctgctaaacggattatctcgggacgagtgccgacaatgatgataagtttcaacttaccattatccttgaattttatatctgaataatcgaatttaggttgtttttccatgatcattttttcactttatcaaagtatgtatccggtttatccgggttgaatacctcattgcagtacatcactgtcaccagatcttccgtatcagaaagattgatgatgttatgagtataaccaggaagcatgatgacagactgtattttctctccgctcacctcatagttaaacacttcgtctgttccttccttacgaagttgaataagaccatgcccactgactacaataaactgttcccatttggtattgtgccagtgttcacccttggttacacctggtttggagatattaatgcttacctggccacaattcaaggtatgtaccagttctgtgaaactgccacgttgatctacattcattttcaagtcgaagatcactttttcttttggtatgtagctcaaaaaggtactgtacagacgtttggcaaatgaatcagtcgggatttccggaatcatcagtgtcttaggcatttccgcgaattgatgtaataagtcaacgatttcaccaagcgttaccttatgggtgacagggcaatagcaatatctgccgtcagcctccggatgtacatcaagcccctcgaactcgcaatgatgttcctcgcctttcagggcatgaatcatttcgtccacaaggtcatcaatgtaaagtagctcaagttctacactcgaatcgttgacctgtataggcaagtcattggcaatattattgcagaaagtggctacggcactgttatagtttggacggcaccacttaccgtaaaggttcggaaagcgatagaccaaaaccttggctcctgtctctttaccgtattgtaggaaaagatcttcacccgcctttttgctacgaccatattcactgttaccaaaacgaccggtcaacgaggcttgcgcactggaggaaagcatgacgggacaagtgttatgatatttcttcaaggtatcaagtaatgtactcgcaaaaccgaaattacctttcatgaattcatcattgtctttagggcggttcaccccggcaagattgaatacgaaatcggcctctttgcaccaattatccagttgttccgaagtagagtcaagatcgtactcgaatacgtcactaatcttcagttcaccataacaacgagccttaccgtccttgatgttattaagttgggcacaaagattcttccctacaaaacctttggcaccggttactaatatcttcataattttattactgtacgaagttgccctcaccactcaactccttctttatatagtccaaagctgcaatcttggctttggtttcttccacgttaaggattcgcgtattgtttgaattgaactctgtaagcgtgttacgctctgtctcaccctctttaaaatatttgtcgtaattcaatccacggttatctgccggtacacgatagaaattgcccatatcctctgccttggcacattcttcattggtaagcaatgtctcatacatcttctcaccatgacgaataccgataactttaatgtcttctttcttgccaccaaagagttcacaaacagcctctgcctgagtctggatggtgcaagccggagctttttgaacgaggatgtcaccattctgaccatgttcaaaagcgaagagtacgaggtcaacagcttcttcaagagacattataaaacgtgtcattttaggctcagtcagagtaacaggattaccattgcggatctgctctatccacagagggattacagaaccgcgagaacacatcacattcccataacgcgtacagcaaattttggtcttaccggagtaacggctctttgccactgctatcttttcctcaacagctttggtgatacccatagcattgattggataggcagccttatccgtggaaaggcagattacggcaccaacacccgcttcaattgcagccgtcaatacattgtcagtaccaattacatttgtctttacagcttccattgggaaaaattcgcaactcggaacctgcttcaaggcagcagcatggaagatatagtctactcccggcatggcgttcctacaagactggaggttgcgtacatcaccgataaagaattttattttgtttgccacatcaggatacttagcctgatattcgtggcgcatatcgtcctgcttcttctcgtcacgtgaaaatatacgaatttcaccgatatcggtacgaaggaaacgattcaagactgcattaccgaaagaacctgttccaccggtaatcattagggttttacccgcaaaaatgctcatagttttattgttttattgttttatttctccgtattataaaactttacataccactctgcaaagtttcttagtccatctctcaaacttgtacccggtttaaaagcaaaatcctgttccaatgaagtagtatcagcataagttacaggcacatcacccggttgcataggcacaagttctttatgggactcaaaatcatagtctttcgaaagcacaccggcacggaccaattcttcctgaagaatagttacaaactcaagcaagttctccggatgactgttaccgatattatatactttgtatggtggaatcggaagtccgtcttccccattctctttttccggagcgtgttgcataacacgtactactccctccacaatatcatccacgtatgtgaaatcacgcttacaattaccataattgaaaatcttgatagtttcgccttttacaagcttgtcggtaaacccgaaatacgccatatccggacgacctgcaggaccataaaccgtaaagaaacgcaaacctgttgatggaatattgtagagttttgagtatgcgtgagccatcaactcgttactcttcttggttgccgcataaagactgaccgggttatcaaccttgtcgtcaattgaatacggaactttcttgttactgccgtatacggatgatgaagaagcataaaccaagtgctccacctcgtgatgacggcaggcttcaaggatattataaaaacctataagattgctttggacataggcatcaggattggtaatactgtaacggacacctgcctgggccgcaagatttacgacaacggaaattttgttttcagagaaaattctctctaccacatccttgtcagcaattgaggcacgaacaaaaatccagtcacggtctaacgactcgatctccttgagacgttcgtacttgatattgacatcgtaataatcggtgatggaatcgatgccgattactttaacattccggaaatcatggaaaagacgcctgacaaggttgcttccaataaaaccggcagcacccgttacaagcactgtctttccgtccagctctacattatatggcaacatggtcaatctcttctaaaaatatcacgtgtataaactttatccgccacatcttccaagctgttgtcaaaacggttggctatgatagccttgctctgcgccttgaatccggcaagatcattaacgaccctgctgccgaaaaatgtagtcccgtcctcaagcgtgggttcatatatgatcacttccgcaccctttgccttgatacgtttcattataccttgaatggcggactggcggaaattgtcagagttcgatttcatggtcagacggtatacaccgatgacacaagtatgttccttggatgcgtcccattgtccgttccctgtataatagcctgccttgcggagcactgcatcagctatataatccttgcgggttttgtttgattccacgattgcggacatcatattctggggaacatcctgatagttggcaagaagttgtttggtatctttcggcaggcaataaccgccatagccaaatgaaggattgttataatgtgtaccgatgcgtggatcaagacctacaccttcgatgatcgctttactgtccaatcctttcatttcagcgtatgtgtcaagttcgttaaagtagctgacacggagagccaggtaagtgttggcgaagagtttgaccgcttcggcttctttcatacccatgaagagggtatcaatattttctttgatagccccttcctgcaggagggaggcaaacattttagctgcttcctccaacatagtgacatccgtgacggaacggatcgccttgttttcttccgcaaactccggacgatcgagaatcttcggatagcctacgatgatacggctcggatagaggttgtcataaagagccttgctttcacgaaggaactccggtgaaaacaagaggttaaacttccttactcctttccgagcgtacttcacataaagattacgggtatagcccaccggaatcgtagattttatcaccattacagcgtcgggattcacttcaagtacaaggtcaataacctcctccacacggctcgtatcgaaataattcttcacagggtcatagtttgtaggagcggctataaccacaaagtcggcgtcagcgtaggctgacctcccatccaaagtggcaacaaggtcaagaggctttccagccagatacttctcgatataatcatcctggataggggaaaccttgttgttcagtttctccaccttttccgggattacatccacggcagttacatgatgatgttgtgatagcagtgtcgctatgctcagtcccacatagccggttccggctactgcgacccgaatctctttgaaatcacgcatattatgtttgatttggttttatcaatagcagtttatttaccttcccgacttgtatgcttctctccataaccatagccataaccataacgtctgccatagccataatgcttgccgtatttaccataaccataataatagccgtacttctttttctgaagatccaagccgttaatggcgatacagaggttaggcagtttgttgttttccataagctcattgatcaaagtaaactctgtcttacgggtataatcggcacggcatacgtataccgacaaatcagctgtacggcctatcagcaaggtatcagttaccatgcccacgggggccgtatccagaatcacatagtcaaaattagccttcaatgtttcgatggctttttccaaaccgtcacgggccagcagttccgtcggattgggaggaactgctccacccggaagaataaacagattcctgttgatatcagaaggctgtaccaaatccatcagattaacagccggattagtcaaaaattgggtaataccttgttcttttctcgaaagattgaaaactttattcaatcccggtttgcgaatgtcaagacctactatcacaacctttttccctaacaaagaaagactaatagccaaattagatgatacaaaagacttaccttcaccactgatggtagatgtcaccagaatcacattcctgccattttcaagcataaactgaagattggtacggacatttcggaaagtctcgctcatcaggttattctgattctcaaatacagctatagaaccggacttttcatccgccaacgggatatcgccaataacaggaagagaagttagtttttcaacatcagcacggccctcaatcttaaatttggtcaagccaatcagataaatgatacctaccggaaatcctactcctaacaccaaggcggcaagatagatcatcatcctcttgggagaaactggattgtcatccgctaatgcttcatcaatagtcttggcattattggctgtagctgccaaagtgatggcattctcttcacgtttttgaagtaacatcaaataaaggccggccttaatttcctgctgccgggcaatacttacgaactggcgttcctgggtcggagcgtcattgatacgacgggaatagcggttcgcctcatgggcaaggtcttctttggttatctgcaatcctttcaatgtagcatccaacgtagcctgtacattgctccgcatcgcacggatactggtatccaaatttatgatcgtcggattattctcggttgatgtacgaagcaagcgctttctttcaaccaacatctcattatatctgtctattgcacctgctgatgctgcatcctgtaatccaatattacttggcaagacctcatattcgttaccttgcatatagcgttgcaaatccatcaccaaattgatttgagtctggttttccacacgcttcttttcatattcagcattaccggttaaggctatttgagcctcactgctcaaatctgtaattccggcgctacgcttgaagttctccaagtcttgttctgtacttccaagttccttggaaataatgccgatacgttcgtcgatgaattctgcggttttttgggctacctcattcttgtcattattggcattgatattgtacatctcaaggagcttgttgatgaagtccttgccacgctgggtatttgagttctttaacgaaagaacagctacagaagtggtttttgatgtaggggctatcgacaaggactggatatatcctttggccacagacatcggccggtttataaaagcatttatatgacgctctttactttcctccttagcctgattaaccgccaatgtatccttgctttcaaaaaaggcgaccgtcccctcatccgtcggaaaaacagcaggtaattgttcgaattgtttccgatactctttgtctttcactgttatcaatacatccatcccaccattgggaaataaagtcatctccacttccattggtgcagacagcttttccgcctcttgtggagtcaagctcaccactacgggcgaggtacggtaaagttccctactaggaaactcatcttcatccttataagtcacaaacagtcccagattgttgaccacttcacgggcaagagactttgatttcagcacctcgatttcattgtctacgttgttcgacgaggaaacgaagccgtccagccccatcttttccagttcggaggacatgctcgcaccaccgcctttcttgtcatccttgatcaagactgtagcggatatattatagacaggagtggccagacgcaggtagccccatgcgcaggcgatacatattattacagaaaccacaaaccagggccagtggatcaggtaacggaagaggatttcctgaatgttcacctgctcttccggttgctcaccccggttctctcttttttcctcaatcatatctatattactatttgaagattgttactaataaacttgccaatgataccagaatagaagtagcggagaaccacaagctggtactattacctatatcggaattacgggcttttgctttattaggagtcacataaactatatcattctgctgtaaccaataataaggagaaagaattgtctccgccttgtttaaatccaatgtcacaatttcctgtttgccatcagcaccctcacgaatcagtttgacattgtcacggacgccccagaccgtcatatcccccgccatagccaaggcttctaacaggtttaccttctcgttactgatggtaaacgtacccggacgggctacttctcccaatacggaaatcttgtaattaaccatacgcacggtgacaatcggactctccttgatgtaaggtttcagtttgtctattatcagttgttcagcttctcttttcgtcaatccacccacttttaattcgcctaataccggaaaattgatctttccttcattatccaccagatagggctgtaggacaggctgagctgtcaactgtgtattcccaatagccacagtgccaggacccgctacagtcaaattgaatggaactgcaagttccggactagtacacgacaccacgatagtaagtaagtctttaggcattatctttgcatcatacaaattttcctgttgattgatatcctttacaactcccgcatcctgcaaataaggtactttcttataagactggcaggaagcaagcagaaataccactatcaggcaagaaaacagactttcatacaagcttcgtacattcaaatgcgtgtgcaatgatttattcatattaaatgataatttatttatagaatcttttgttgattatttcctatttattctttatccaatacttcaaatcgcggagaattttttgatttgaactccggaactattttcttcatcaaccgcacggtatccatgatctttaccgcacgcgacaacttttcaaactctgcataagtatcaagaatatcagcatattcataccgacgaactttggcgatcatgattttcttattctctgttgggatcgtattttctttatcgctcaatacctcttcataaagcttctcacccggacgtaatcccgtgaattctattttgatgtcttcacccggacgatagccagccaattcgatcatacgagtcgctagatcaacgatcttgactgcttttcccatctcaaagacaaagatctcattgccctcacccatggtagcggcctccattaccaaacggcaagcttcgggaatggtcatgaagaaacgaataatatcggggtgagtaacagtcaccggcccaccattctctatctgttctttaaaacgaggaatgacagaaccgttactacccaatacattaccaaagcgggtggtgataaatttggtatgacctttcacttttccttcacggatagcacatcccagactttgaacatagatttcagctaaacgcttggaacagcccattacattagtaggatttacagctttatccgtagacaccataatcatcttttcagcaccatattccacagccatatcagccacctgacgagaaccggtcacattgacaagcacagcctcacaaggattttcttccatcaatggtacatgtttgtaagcagcagcgtgaaagacgatttgaggatgataaagatcaaacaccatacgaacacgttccttcacacgcacatcaccaatcaccggaacaaaatcaatattcggatattttttctcaaactcaagacggacattatgcagaggtgtttctgcagagtcgaacatgataagtttctgaattcccatctgcactaattgacggcaaagttcactaccaatactgcctgccgcaccagtcaccaacaccacttttcccctgaattcttctgcaacttgacgaaggttgatattaatttcggcacggcccagcaaatcctcaatcttaataggacgtacccactgatgaaattttccatcagaatccgcctcactgatagtaggagctatcaatgttttaagttcattatttttacaatattccagaaggcgtttttcttccagacgggtatcttcataacgggcaaacagaatccccttaattccgcgcttccgcatgatataatcaacatccgattcattttcaaagtaataaacgggaagatctgccaatcggcgtcggctgttatttttaccatatacataaaaaccggctaccttataatgtgcactatccctaagacgtaacttcagggctacactctcttcattagtaccataaataagaatacgggtgttctttttattcacccaatccaataagaaatcatagatgattatcaatgatacgcggaaagttgtcaaagtcactaaggtcaacaaaccgtcaaatagaagataagatattttataattatatggcaattgggtctcatatataaattcgaaagaaacgattgccaaacaagctattttaaataatacagcacacatgatacgccaaagttcacgtgcctgtgaaaaacgaatcgtattacgataagtatggaataataaagagccagcaacacttgccaccaaagaaacgcaagcaaatttacaaagcatccagtcggtcattggaacatgcgccatataatgaattaccgcataagcaaccaatgaacataatacagaaattgccgtgtcaatacctaaaatagaccaataactgaaataatttttgcgggcatattgcactatgcctttcaatgtcttttccattatagtataaatgaataaaataatatttcgaaatttgatttatctgattgattatatcagcacaaaggcaatgaacaggatttcaatgtgagtgtcaccacaccaagattttttcatctttcgatatacacatatatttccacactatatcttttacaagatataattcacaatactgttatggatttttattttttgagagagatcatcgataaatatacccactgtcttgttaccgatgtcagatagactgtctgctattttacagactttcattacatttttgcagtaaaatccccatatcccctataaaatagattgattactcaatcacgtaaatccccattttcagataccggctctacacatcccaccggtatatctacacatgcacaccccaacattgtcaatcgaacagcaactttagacttgccgtccacatttaccaactctccttccaaacctgccaaaggtccttttatcacccgtaccttttctcccggtgccaacggcgatgtgctcatactgatcgtttcatccgaataatcgagcataaatttgaatcgcaacatttgttggtcaggaataacagctggagtactttccccacgcagtaccatatagcggctgatagcggacagcgtcaacacctctttttgttcttgagggtcgacatggacaaaaatcatcatcggaagtaaaacgcgatctaccactttacgacgatcactccatttatgaacctcttgttgaataggaaggaaattttcaatccccattttcgttagccgctcactcgtttttttctcgtgatatatgcgtacaaccgccactagccagcgttttgagcgtgctacgcttctgccaatcacagttgttggcagaagattttgatcgtcatttttgctaatgatcatgtatatttaccccatatttcttgctacttcttaaatgaagcaacgaaatttcgtgcaaatataaatattatatatcaaacaatataacaaaagaatgtttttttttcacaaatgaaggctaccacttgtagttaataccgaagctgagcagttcctttaactggaaatagctgtcaccttcagtgggtttggagctatcgtcaaaacgggtgtgaatataaagtttggtagagagataacggttaagaacgaagttgaacgtgttttcccattccacacgtgcccaatgatagttggtcagatagttgagacgggattccaatgatacggcagagatgatattccagttaaacgtagactgcaactgtgaaccgaagtcattcttggagcatttgcctttatccagaccaaatttcgtttcatccacttccgagttgtcaatataacgtaggttataagtcaatggcgccatgaagacagaaagattgaatttctttttgttcagcttatagtccataccaatactgaccgccaaatcggccggagacatgaaagctgaaaccagatcttcgctgttggccttgtatccattgaaaaactgggttttgaactcagaggagatcgtataataccaattcttaaaagctttcaatcccagcttgttatagatgcgaagttggtcggttgtgaaaagatatttatggtattcgtccgatggagtggaagtcatacccactttcgcttcaagctggttttcaaacagcactttctcattgtcattatagtttgcgaagatcagaaaagtagctaatccggagaagttactctcccctcccttataccagttgtccgaaagatggttctggctgatctgtaatgaaccgttacctcctacaacccaccagttggggcggctgatcttgatatcggcctttcctacattatcattcatatcttcacgttgaaacagatgaatcacattcgctttgggggagatcttcggtttcacatcatgccggaaaacatcccggctcatgatacggtcttccgtagtaacaaccaaattcggatgttgcagataaagatccatcaaagcgttattgactaatgtattggcacgtcgggttttggtaaacaccaatgtgtcgtatggtaaaagttccgatgtcagtttgggggtagtgtccggctgcacaggtttccattccagtcttgaatactgttccatcggggcatagtaatatgccaaaggagtaaacagacgaaaatagtcgggatccgacggaatatagcgcggcggtacagacggatcattcagataatccaattgggctatatacttattatataaataagaaacggtatccaatttgggtgtcggaccggacatgttgagttttaacattaaatatttctggagttctgccgaaagtgtatctgcttttacgactttggccttagccactaccgttgaagatttgggaagtgaagaattgccggcattttcctgtgcagaaagcgataacgaaaataacaacaggataaaaactgaatataaagtagtaactctcatcatatttgcttatggtttaggttgcaaagctacattattttgttcagaaatcataggattctttcaaaattgcattttttaataaaattgtagagacgaaagtctgcattcttcctcttttttttataattttgcgctttttaagttcataagaatactactaagtaaacaattttaaaaacagttatagctgtgggagaaacaaagtatattttcgtcaccggtggtgttgcctcttcattaggaaaaggtatcatttcatcttccatcggtaagttgctgcaagcaagaggttataatgtaaccattcaaaaatttgacccgtacatcaacatcgacccgggaacactgaatccatacgagcacggagaatgctatgtaacggtagacggacacgaagccgacctcgacctgggacattatgaaagatttctgggaatacaaacgactaaggcgaacaacattactacaggacgcatctacaaaagcgtcatcgacaaagagcgtcgtggagattatctgggtaaaacgattcaggtgattccgcatatcacggatgaaatcaaacggaatgtaaaactgctcggtaacaaatacaaattcgattttgtcatcaccgagatcggtggtacggtaggcgatatcgagtcactcccctacctcgaaagtatccgtcagttgaagtgggaactcggtaagaatgctctttgcgtgcacctgacttatgtcccttaccttgctgccgccggagagttgaaaacaaaaccgacgcaacattctgtaaaggagcttcaaagtgtgggtatccagccggatgtactggtactgcgtgccgaacatccgttaagcgacggattgcgcaagaaagtggcacaattctgtaatgtggatgataaagccgttgtgcagtctattgatgcagaaacaatttacgaagtacctatcctgatgcaggcgcaaggcttggatagcaccattctcgaaaaaatgggactgccggtaggagaaactccggggctcggtccatggcgtaaattcttggaacgccgccacgcagctgagaccaaagagcctatcaacatcgcattggtcggaaaatatgacttgcaggatgcttacaaatctattcgtgaagcattgtcgcaggccggtacttacaacgaccgcaaagtggaagtacatttcgtaaacagcgaaaagctgacggacgagaatgtgggtgaagccttgaaaggtatggcgggtgtcatgatcggaccgggattcggccaacggggtattgacggtaagtttgtagctatcaaatatacacgtacacatgatattccgactttcggaatctgtctggggatgcaatgtatcgccatcgaatttgcccgcaacgtattgggatatacagacgccaactcacgcgaaatggatgaaaagactccgcacaacgtgattgatatcatggaagagcagaaagcgatcaccaatatgggcggaaccatgcgtttgggtgcttacgagtgtgtattgcagaaaggctctaaagcatatcaggcatacggagaggaacatattcaggaacgccaccgtcaccgttacgagttcaataatgactacaaggaacagtacgaagctgccggtatgaaatgtgtaggtatcaatcccgaatcggatctggtggaaatcgtagaaattccgacattgaaatggttcgtaggtacgcagttccatccggaatatggaagcacggtactgaacccgcacccgttgttcgtggcgtttgtgaaagcggctatcgaaaacgaaaagtaattagtaatttgtaattaaaataagaatggataaaaataccatcacaggtctcgttttaataggtatattgttagtaggattcagctttctgagccgtcccagtgaggagcagatagctgcgcaaaaaagatactacgattctatcgctcttgtacaacagcaggaagaggcactgaaagcaaaaacggaggcagcactggctaacagcaagaaagaggcggcatctgctgccgattcatcctccctgtttttcaatgcattgcagggaacagactctaaagtcagtatccaaaacaatgtagcggaaatcactttcacaaccaaaggcggacgtgtctattcggccatgctgaaggattacatggcacaggacaagaagacaccggttgtactgtttgacggtgacgatgcatcgatgaatttcaacttctataataaggaaggagctatccagacaaaggattatttctttgaagtggcaaacaagacggatagcagtgtggtcatgcgtctggcggcagatagcgcaagttatatcgactttatctatacgttgaaaccggacagctatctgatgaactttgaaatcaaggcgacaggtatgacagacaaattggcaaacaccaattatgtggatatcgattggtcacagcgtgcccgccaactggaaaaaggattcacttacgaaaaccgcttggcagagcttacttataagatcaaaggagatgatgtggataatctgtcggcagccaaagacgacagcaagacactggaaaaccgcattgactgggtagctttcaagaaccagttcttttcatcggtattcattgccgagcaggacttcgacaaggtttccgtgaaatcaagaatggagcaacagggaagcggatatatcaaagattattctgctgaaatgaatactttcttcgatccatcgggtaaagaaccgacagagatgtatttctattttggcccgaaccacttcaaaacgttgaaagcattggataagggacgtgacgaaaaatgggaattgaacagactggtatacttagggtggccgttaatccgctggatcaatcagtttatcacgattaacgtattcgactggctgtcgggctggggcttgagcatgggtatcgtgttgttgattctgaccatcatggtgaaggttgtggtttatccggctacgtggaagacctatatgtcatctgccaagatgcgtgtactgaaaccgaaaatcgacgaaatcaacaagaaatatccgaagcaggaagatgcaatgaagaaacagcaggaagtgatgagcctttacagccagtacggggtaagcccgatgggcggctgtctgccgatgttattgcaattccctatcctgatggctttgttcatgttcgtgccgagtgctatcgagctgcgtcaacagagtttcttgtgggcggacgacctctctacttatgacgctatcatcacattcccgttccatatcccgttcttgggcaaccacctcagtttgttctgcttgctgatgacggtgactaatattctgaatacgaagtacacaatgtctatgcaggataatggagcgcaaccgcaaatggcggctatgaaatggatgatgtatctgatgccgattatgttcctgtttgtcttgaacgattatccgtcaggtttgaactactactacttcgtgtcgaccttgattagcgtaggtaccatgattttgcttcgcaaaacgactgacgaaacaaaattgctggctatcctggaagcgaaaaagaaagacccgaaacaaatgaaaaagaccggatttgctgcccgcctggaggcaatgcaaaaacaacaagagttattgcagcagcaaagacagaataagaaataaggaagaaaatcctattatattctgaaagagccggacatcctacttgggttgcccggctttctttctctaaaaatgaaataagatgaaaacaaaatatacttataaacaaatttggacaatagcctaccctatcctcatctgtctgatcatggagcaaatgatcggtatgacggatactgcttttctgggacgtgtcggggaaattgaactgggcgcgtccgccattgccggtgtatattatctggctattttcatgatggcattcggattcagtatcggtgcgcaaatattaattgcccgccgtaacggagaaggaaactacaaggaaataggaccgatcttctatcagggaatctatttcctgctggctgttgccgtcattctattcacgctgtccatcgtattttcaccacatattctaaggaatatcatttcgtcaccacatatttatgatgcagccgaaagttatatccattggcgtgtatatggtttctttttctcgtttgtcatggtgatgttccgtgcattctttgttggtacgacacaaacaaagacactgactctgaactccattgttatggtgctttcgaatgtggtattcaactatatcctgattttcggtaagttcggtttcccgcaactgggaattgccggtgccgctatcggttcttcattggcggaaatggtatcggtgattttctttatcatttatacctggaagcggattgactgcaagaaatatgcattgaatatattacccaaattccagagaaagacattgaagcggattctcaatgtttcggtgtggacgatgattcagaattttgtttctttgtccacctggttcatgttcttcctgttcgtagaacatctgggagaacgctcactggctatcgccaatattatccgcaacgtatcgggaataccgtttatgattgcaatggcttttgccgccacctgcggttcgctggtcagcaacctcatcggggcgggcgaacaagattgtgttcgagggaccgtcagacaacatatccgtatcggatacgtattcgtattgccgatattgattttcttctgtctgtttcccgacctgattctgagtatttacacggatatgccggatctaagggctgcctctgtaccttcattatgggtgttgtgctccgcttatctggtgttagtacccgccaatgtctatttccaatcggtatccggtacgggaaatacgcggactgcattggctatggaactttgcgtattggcaatttatgtagcctatgccacgtacttcattctctatctgaaaatggatgtcgctttttcttggacaacggaaagcgtgtatggtactttcatcctgctcttctgttatcaatacatgaagaaaggaaactggcagaaaaagaaaatctaaattcttttttcactatcttcgcaagaaaataaacattttataaaatatatgagacaagctaatttatttatgatgtcggcagcaatgttgttagctgcctgcggagaaaccaaagacgcaggcaaaacggatcaggtgcttatcgagaaatcggatatcaagatcgaagggaagcgcatgactcccgaagcactttgggctatgggacgtatcggcggattcgccgtatcgcccgacggaaagaagatcgcgtatacggtagcgtattacagtgtgacggagaacaagagtaaccgcgaagtatttgtaatgaatgcagatggaagcgataacctacaaattacccacactccttatcaagagaatgaggtgacttggataaaagggggcagcaaactagcattcctaagcaatgacagcggtagtagccagctttatgaaatgaatccggatggtagcgaacgcagacaactgactaactacgacggagatatcgagggattttccatctcaccggatggcaaaaagcttttgtttatctcacaagtaaagactaaagacagcacagtagataagtatccggatttacctaaagctacgggtatcatcgttaccgacctgatgtacaagcattgggatgaatgggtcacgatggcaccgcatccgttcattgcagattttgatggaaacagtatttccaatgtcatagatattttggacggcgaaccgtatgaaagtccgatgagaccttgggggggtatcgaacaacttgcctggaatacgacttcggataaggtggcctatacttgtcgtaaaaaaaccggactggaatatgcaatctctacgaattcggacatttatatttatgacctgaatacaaagaaaacggagaatataacggaagagaacaaaggatacgacaccaatccgcaatattcaccggatgggaagtatattgcctggcagagcatggaacgtgacggatacgaagctgatctgaaccgtctgttcatcatgaacctggaaactggcgagaagcgttttgtgagcaaagcgttcgaatcgaatgtagatgcttttgtctggggagcagatgctaaagtgatctatttcacaggtgtatggcatggagaatcacaaatttatgcgcttgacctggcaaatgattcggtaaaggctattacttcagggatgtatgattacgaaggggtagctcttttcggagataagctgattgcgaaacgtcattcaatgagtatgggtgatgagatttacactgtggcactggatggttctaccactcaactgacacaggagaacaaacaaatctatgaccagttggaaatgggtaaagtggaaggtcgctggatgaaaacaacagatggtaaacagatgttgacatgggtgatttatcctccacagtttgatccgaacaagaaatatccgactttgctgttctgtgaaggaggtccgcagagtccggtaagccagttctggtcttatcgctggaacttccagattatggcagctaatgattatatcatcgttgctccgaaccgtcgcggtttgccgggattcggtgtggaatggaacgaacagattagtggcgattacggtggccagtgtatgaaggattacttcactgctatcgatgaaatggcaaaagagccgtatgtggacaaagatcgtctgggatgcgtaggtgccagcttcggaggattctctgtatattggttggccggacatcacgacaaacggttcaaagcgttcattgctcatgatggtatcttcaacatggaaatgcagtatctggaaactgaagaaaaatggtttgccaactgggatatgggaggcgcatactgggaaaaacagaatccggtggcacagcgtacgtttgccaactctcctcacctattcgtagagaaatgggatactcctattctctgtattcatggagaaaaagactaccgtatcctggctaatcaggctatggctgcttttgatgctgccgtgatgcgtggtgttcctgcagagctgctgatttatccggatgaaaaccactgggtattgaagccacagaatggagtgttatggcagcgcacattctttgaatggttggataaatgggtaaagaaagcgccgtccaaataaaaacggtgcatattcctataaagtaaaaggaaggctctgttctcaatctacttgagttcagagccttccccattacattcaaccaaaatccgctaatttttacctcgaataaatattttcaatttctacaatatacatcttatggaaacctccatgagcaccaccataccacttttctattgattctttatccagaaaacattccggtttgatagcgtcagcataaagtttcttacattccagactcaaacgtgcctgctcgaacaggacattacctttttctgtaaatacaggtttcaatccggtttcttttactttatctatattacgtcccgacttggaaccacaaacagcgtgaatcttcttattttcttctcctaagaaagaaagtgtcaggtgatcgttctcctctacaaactcgtatgtataccgttcgggacggataaaaacgaaagcaaccggtttattccacaaccagccaatgccaccccaacttgctgtcatggtgttaaacttctcttttgttcccgccgttacgagcatccactcttttccgattgcttcgaaaaagttttctttcaggtcttttacttctaatttcttcatctctttattcgtatctaagtattcttatttctgtttcttcaatttcacgatctctcccaaataaggaatttccacagagatcttccgtttctttgcctctgttgcaaagactttcgggggatcatgcaaaggctcgtcagacaaatcgaatgtgccataatgcatggggatagtaagtcctgcatgcatttcttcggcagcagtcaaagactcgtgaggcgatatatgattgggacgcataaaccagcgaggtttatatgccccgatacccaacaaagcgtaatcaggtgctccgaacagatcggggatttcacgaaagtggctggaataacctgtgtcaccactgtaataaagggagattccatctccttgcagcatgaaggctccccacaatcgctggccgccatcgcgtacggaacgtttgctccagtgttgtgccggtagaaaagcaatcttcaatccctcatcttccatttgttgataccatccggcttcaatcaccttcatttcaggaaaccatccctgaatcagttcaccggttcccaatccacaaaagagtttcatttgcgggttattcttcaataggcgtgctatactcttcttgtccagatgatcgaaatggtcatggctgacaagtagataatcaatccctgtaaatatgtcaggattagcaggaaactcgctctgtctcttcacaaaaggaatactgccgaacacaggatcgaacatgattcgtttacctgctaattgcagaaagaaagaattatgtccgagccatatcagggaatctcctaccaccgcatccaatgaacggaggtaacaaactttcggatcccatttcaccgttttcttctccttgcgttgaggattgggcgaaagacgccatttcagtacactccccatccccggacggaagcgatgctgccgattaaaaaaacgcccgcgcaccatcggatttcctctccaataagggttgactgtcgctaaacgttcgtttctcctaaaacatatatgttcacccatttttatttcctgaatacgtatttacaaacttactaaaaatttctcgatttacgatgaattagagtaaacaaaaaatgtaccccggacacactatcggggtacatttacttataaaagaataaatattatccttttttttaatagaatgagacttcgttaagagcagtgcaagccgtacaaaggcagttgccagccaagagctgaaagattaataatcattatgactgcacccaatatccatagaatcaatagcgaccatttcaagcctgttcccatcggtgaccaatggaataattgccgcaagatagtatacaagaaagctcctaacggaataccgatgagagcaactccggcaatcgtacctagcagtgtcatcattggagatacggaagcaaccggcatccagtcgatggcaggcagcatctcgtaaagcagtgctcctccgctaactaccacggcaattgctgcaaacaccaatactaccagtacaacggccagtacgaacaagacagggcagcaaagaataacaagagctaccagaaatattttaaagagaacagcagcaatggaaacaaatacatcgcctatcttttgaagaaaggtacgaggtttgccggaattcatatagttgttgactccgtccgctacgcgttcgaaaccgtctgtcactgttttgccaatattctcaatggtcactgcttctccacgcatactcaatttttccgcagcagtacgggcttccggaataacgatccatccgataatataaagtataatcatcgggcaataaggtacaaataccaggataatcatcaatatacgcactaatgtgatatcccaaccgaagtaagctgccaatcctgccgctacgcctcccaacaatttattatccggatcacgaaaccaacggcgttgagcagcggtttgcgtactgccttgattagcggacgatgtttgttccgttcttttctgtgagtccatatcctcatcagcaattccaaagtcttccggtttgccgacacgggcgataatttcttctacatccgaaactgtgatgacctgtttcccttcagttactttctcggcaaacagttcggcaatacgcatttcaatatcgtttacgatctcttccgcaccctcctgtttacgaaagtaatgtttgaggttagacagataattgtctaacaatcggtaggcatcatcatctatatgatagacaattcctcctaaatttatggtcaatgtctttttcatttttatttcttctttttcggattatctattggcaatatgattcactgtttcattgagttctttccaggaaatttcaagttctcccaaaaagacttctccctgttcggtcaatttatagtatttgcggggaggtccttgggtagattctacccattcataacttaacaggtcgtcatttttcagacgggtaagcaatggatacaaggtgccttccaccacgatcagttgggcttctttcaatttttgaatgatatcagaagcataagagggttccttgtgtagcaaaagcatgatgcaatattcaagcatacctttcctcatctgtgattttacattgtctactttcattattcacttcttttagatacacaaatatatgcattactttagtaccttgcattacaaagtactataaattaataataattaaaacattagagactctccaccttattataaaaagaaataatggctatatttgtgcccattaaataatagatatgtttacaattcgaaaagcaacagtagccgattgcgagcttattcataagatggcaaaggaggtattccccgccacctacaaggaaattttatctcccgaacaactggattatatgatggactggatgtatgctccttccaatgtgcgtaaacaaatggaggaagaaggacatgtgtactccattgcttataaggagaatgaaccatgcggatacgtttccattcaacaacaggagaaagatgtattccatcttcagaagatatatgtcctcccacgttttcagggcacgcattgcggcagttttttgttcaaggaagcaatcaagtgtatcaaagaaatacacccggaaccttgtttgatggagctcaatgtaaatcgtaataataaggctttgcagttttacgagcacatgggaatgagaaagttgcgagaaggtgatttcccgattggtaacgggtattatatgaatgattatattatgggactggatatttgatatacaaaaatgccccggaacatttatgatacttgttccggggcattttgtttatttagttaatggcaagattttatttcgctacacgctccagccattttaccattgaaagcattacaatcatggaagcacctgttgctcctacaaataccaaccaacaagcccaaataggaacagttgtataaagaataccaccgataaacaacagtgagttacccacagctgtcgcagccaaccagcaaccttgcatcaatccttgcaaatgaggaggggctactttagatacaaatgataatcccagaggagagatgaacagttcggcaaccgtaagaatgaaatacaggccgatcataatccatggagtaacacggatagcattgatttcagcagcactcatagtacccaacacctctttcgaaggcaatgtaaaggagaataccatcaagaatacatacgctaatgcggcaatacccataccgatggcaatcttcatcggggtagaaggttctttaccattctttttcattgagccgaacatccacatgataaatggagtcaggaatacaacgaagaatggattaacgctctggaatatttcagctcccttgatctgcgtaaaacctaagtcgatattaatcacacttaaatccacatagtcacgggcaaaataggtcaaagaataaccattctgatggaaagataaccagaagaaaataacaacaccgaatacagcaaacagggcatagatacgctgtcttatttcagtagcactcatccgaatttcttctttattcaccgttgtcgctcctttatctgtttttgctttcgttgccggatccgggaagcgcttcttatttgccatataaataatcaacgaaataatcatagcaccgatagcagccataaaggcatattggaaaccgcgattaaatacatcaaggtaattatttacaaatacgcccatatctgttacatgagttttatccaagacaacactgttagctaacgtagtcagattttccatagcctgtggagccatatcttttcctttttccaaatattgatgacataactccggcaaagtggcatcataatcaaagttattcactttcaaccaccagttacgcacaccgatagcaataaacggtgcaaaaacagcaccgatattaataaacatataaaatatctggaaaccggcatcacgaagattggaatatttaggatcatcatacatctgacctaccagagcttgcaggtttcctttaaacaagccgttaccaaaagcaatcactaaaagtccgaaacaagtcagccccaaataaagagccatattaggaaccggagtaggagtaggaatggcaataatcaaataaccgacagccatcagtattaatcccaccaaaatagtgcctttgaaatttttcgtcttatcagcaataacacctcccgctaaagctaaaatataaatggatgcgtaaaatgcggaatagatgtatccggtagtcgtctcggacaatccgaatttcgctgaaataaataacgtcaaaatcgccatcataatatagaagccaaaacgctctcccatattagctaaagccgcagcaatcagacctttagggtgtttactgaacatagatataagtttttagaattaataattgattgaattaaataaatatttcttgcaaatatatactttttcctgagtttttgcacaaataatttgtaaaactagtcttcaaacaaacgacaagtttccgctccggattcacgaatcaaatcgtccggagctatttttatttgaagccctcttgtgccggcacttacataaatatacgggaatttccggcaagtctcatgaatataggtcggaaaatgcttcttcataccaataggggaacaaccgccacgaatatatccggtaagcggcaatagctctttcataggtatcaggtcgcatttcttattgccggaagccttagccgccaatttcaaatcgacttcgtgctctcccggaataacacatacaaaatatccgttcttatcaccgtgcaaaacaagcgtcttgaatacttgttcaatattctcacccaaactggctgccacatgcacggcacttaaatcattctcgtctacttcgtatgggattaactcatatattatctttgctttatccaacaagcgggcagcatttgttttattgattctcatcttctataaattggcatttattattcagatcatcaaggtcaccattcttagcaaaatcaaagtcctaattcttcgcgaagaaacctaggtgtatatcctttagaactcttcgcaacttcttcgggtgtcccgcaactaaggagttctcccccgcctttaccaccttccggacccatatcgatgatataatccgccatttttataacgtccagattatgctcgataacgataactgtattacctttatcgactagtttgttcaatactcccatcagcacccgtatatcctcaaaatgaagtccggtagtcggctcatccaaaatataaagtgttttgcccgtatctctcttcgacagttccgtagccagtttcacacgctggctctcgccaccggaaagagtggtagaagattgacctaacttaatatagcccaatccgacatcttgcagaactttaattttattgagaatctgcggaacattttcaaagaattccacagcacgattgattgtcatatccagcacatcggcaatggatttccccttaaaacggacttccaacgtctcgcggttgtaacgtttgccatgacatacttcacagggcacatatacatccggaaggaagttcatttcaatcgtcttataaccgtttcccgaacacgcttcgcaacgcccgcccgctacattgaaggagaaacgtcccggcttgtaaccacgaatcttagcttccggcaatccaacgaacaaattacgaatgtccgaaaatacgcctgtgtaagtagccgggttggaacgaggagtacgtcccaacggggactggtcaacgtccaccaccttatctatatattccagcccttcaatagaatcgtactccaaaggatcttgcaaagaacggtagaatttctgtgaaagaatcggttgcaaggtttcattaatcaaggtggattttccacttcccgatactcctgttacgcaaatcaatttgcctaacgggaactccacatctacatttttcaggttatttcctttcgctcctttcaacaagatagactttccgtttccttttctgcgtttggctggaacttctatcttcatctgtccgttcaagtattgcgaagtcattgtactggttttcagcatctcttgtggagtgcctgcaaaaaccacttccccaccaagacgaccggccttcggccccatatcaatgacataatcggcagcaagcatcatatccttatcatgctctaccacgatcacggaattaccgatgtcccgaagttctttcaaagaattgataaggcgcaaattatcacgctgatgcagaccgatactcggctcgtcgagaatatacaacacattcaccaactgcgaaccgatctgagtggccaaacggatacgctggctttctcctccggacagactaacggaactacggtttaaggcaagatagtccaaccctacatctaacaggaacttcaaacgtgtacggatttctttcaaaatctccactgatatctttttctgcttgtcagaaagaaattcatccaccttcatcaaccagtcgtacaactcgttgatatccatattcgccagctcattgatattcttatcatggatacggaaatgcaatgcctccttattcaaacgggctcccttacattcggggcaaacagtggttttagcaaattgctccgcccatttctgcgctgttgcggaagcgtctttctcttgcaacatctggatgtacttcacaacaccttcataggtaacaaaatagtcagaggaagtaccaatcaacgagcttttgatcttaatccgttcatcagaaccatagagaacttcttcgatggcgtcatccggcaattccttgaccggagtttttaataacgcatcgtacttttccagcaaagcactgatttgccagaaaatcatggcatttttatattttcccagaggtgcgattgccccctcataaatggatagttcacggtcgggaatcaccttatccacatcaatctgattgacaacgcccagccctttacatttcgggcatgctccctgcggggagttgaatgaaaagttatgcggggcaggttcgcgataagaaagtcctgtcacaggacacataagacgtttactataatgacggatactttccgactgggcatctaaaatcatcatcaggccgtctccctgacgcatagcagtcgccacactttgtttcagccgccggtcgtctttttcggtcaccaccagtttatcaatcaccacttccacatcgtgattcttataacggtcgagcttcattccatgcgttacttcacgcacttcaccatctacccggacatataaatatcctttttttcgcacctgctcgaacagttccctataatgtcctttacgtgcacgaaccaacggggcgagcaaatagatcttctttcctttataatctttcaggatcaattccagaatctgttcttcggtgtatttcaccatttcctcaccggacaaatacgaataagctactccggcacgggcatatagcagacggaggtagtcatagatctcagtcgtcgtacccaccgtagaacggggattcttgttcgtcgttttctgctcaatggaaatcaccgggctcagacctgtgattttgtcgacatccggacgctccaaattacccagaaaattgcgggcatacgctgaaaaggtctcaatatagcggcgctgcccttctgcaaaaatcgtatcgaaagctaaagaagatttcccactgccgctcaatccggtgatgacagtcagactgttacggggaatctcagcgtcaatatccttcaaattgtgcacgcgcgcaccgtacacattaatatattctgtttcctgcatattcatatccttcataaatgctgcaaaattaatgtttccgcccgaaatatgctcctaaaaaagcacaatattattttcttaactcaaatcttatgaagatatagggcattattcgtacctttgttccttgatttcaaaaaccaatagttataatttgatgaaaccgataaaccgaatattcttatttctgctttttataagcgtttcatacgccgtcagttatgcacaggagaatcaatcctatttcttgcataccatcgaaaaaggacaaagtttatattctatatccaagatgtacaatgtcacaacatcggatattatccatttgaatcccggttgtgacgagaaaatttatgccggacaaaccattaaaattcccaaaggaaaagaaagccagaaaggagaaacattccatacaattcaagccggagagacactgtataaactgacaacaatgtacaatatatctgctaaggatatatgtgaagcgaatccgggattgagcgctgagaatttccgtatcggacaggtaattcttatcccgcaaaaggagaaagaacaggtcgttaccgcccaaaaaccgactgagcaaagtaatattcaaggtcctgtggttcccagatgcaaagaaatgcataaagtaaaacgcaaagaaacaatctttagcgtaagccgcgaatacggaatcagtgaagaggaactgattgccgctaatcccgaacttaaaaaagggatgaaaaaaggacaacttctatgtatcccctacccggtggcaacaaccacgcaacccacccagaaagaagatccatatgctatccctccaagtaacagcgaacttttccgcgaaagtaaggagactcccaagaagatgtcgaccattaaagccgcattgatactgcctttccaggaagacaaacgtatggtggaatactacgaaggttttcttatggcagtggatagtctgaaacgtacaggtacttctttggatttatatgtatatgacagtggaaaagaggtttctaccttgaatgcgattctttcaaagaatgagatgaagaagatggatgttatttttggcccgatgcatcagaagcaaatcaagccactgtctgatttcgcaaaaaagaatgatatacgtctagtgattcctttctctcaaaagggtgaagaggtattcaataatccggctgtttatcagatcaatacgccacaatcttatttatattcagaagtttacgagcatttcacacgtcaatttcccaatgcgcatgttatctttatcgagcccatcagtgccgacaaagaaaaggctgaatttatcagtggcttgaaacaagagctaaagaataagggcatctccatgcaaacggtcaacgagaatgcaacaaaagaaatgttgaaagcagcgctccgcaatgataaggagaatatctttattcctacctcaggaaaaaatgtattgcttattaaagtactcccgcaattgacgctgttagtcagagataatgcaggacagaacatccatttgttcggctatccggaatggcagacttacacgagagatcatttggaaagcttctttgagctggacgtgtatttctattcttcgttttatacgaacacactattcccagctgccgtgcagtttaccaacgcttaccacaaatggtacagtaaagacctaagcagcaagtatcccaattatgcaatgctcggttttgacaccggattctttttcttaaaaggattgtcacgttatggctcggaacttgaaaataatctgtctaaaatgaatctgactcctattcaaaccggcttcaaattccaacgtgtgaataattggggaggatttattaataagaaagtgttcttcattcgtttcactaaaaactttgaattagtaaaacttgacttcgaataatacggaaaatgataaagataaaaccatttttgatcgcaggccttctgctaacaggattcactctctccgccactgctcagatcggagaggcacgaagcaatttttctgtaggtgtcaacggaggtgtcaacttaaatagtgtatccttcactcctaccatcaaacagaacagcctgatgggaataaccggaggattgacagcccgttatatttctgaaaagtattttgccatgatttgtggggcacaggtcgaactgaacttctcacaacgaggttgggatcaattatttgagattccaggagaaaatggagatatggtagaagaccccactcaaatttacactcgtaaaatgagctacattgatattcctttccttgcacatctagcatttggtaatgagagaggcttacaatttttcatccatgccggaccgcaaataggatttctcattggagaatcagagaagattgaaggagtcgatatgaataaactcaatgatacccaaaaagcggtatatggtactaagattcagaataaatttgattatggcattaccggaggcggtggtgtagagcttaggacgaaaaaagccggtagttttatagtggaaggacgttattattttgccttatccgatttctacaagacaaccaaaaaggattattttgcccgtgcagcgcatggaacaatttcaataaagctcacttatttattcgatttgaagaaataaccccctcctccgcaaaaagaatttccacatctgcaaagcatcgttttaaagatgctaaagcgcagctttagatagcaaaaagcatagctttaactcctataaagctatgctttttatctatcatattattaacgaattactcagagagtatagggaaaattttatcttaatctatccgcagcctttaccatcacttcatcacgtccgatagcacgaacagccaatatattcagaataatggaaacaagcggcaaacacaaagcccaccccacccgaaacatattcgcatcatttttcaatgcaaaatagaaagcaagaaaagcaatgtaatagcctaccagcaataagctgttgaaaatcgtcatacgtatctgcaacatacgattcttatataaaaaaattgtagctacggcaacaatagtactaagcaataaaatgcagaataagccccatgtagactcgtaagcaccgtttagttctattcctagagctttaaaagagtgctctcccatcgtatcagtaaaataccccatcggcaagcacattgctgtaatcagcaaacctgtaacaatcagtaaataaactgtttgaattctttgaatcataaatagtataaatagtagttgagttaaacaataatagccaagcaataaggagcagggattgtcatcccacttactacttgactatcaattctttcgtcagaaaataaattactgaagtttttccttctctttagccggatttctataatatattttcccttcgatgtattcttgcgtagcaatcaggtccggtttcggcaacttctcataataacgagaaatctcgatttgctctctattttcaaacacttcttccatgttgtcagtataagaagcaaactctgccaatttcttagaaagatcgttcttgatttccacactaatctgattagcacgcttaccaataatggcaactgtttcataaacattccctgtatcggagcagagttccatcatgtcacgggttaccgttgtagtaggagcattcgtctttttgtagtccataaatctatttaaatttagtctttaattactttctgtgattcattgaaaattttctcagcctctttcagatatttgctttccggaaactcattcttaaaagcataatattcatcgattgtctcacgataccgatccattttcttatcttccacgctataaatagccatctcataccttgcacgcagaatcaagatggaaagttcttcgcgataatcagtataaggataatccttcagtgcattttgagccgtgattacacaagactcatagttgttgcccaaataattacccaagttataatataatttggctgaataaagttctttcaacaccaacttatcctgcaaagcaaaaatcatatcctgtgcctcttgctttttactactgttcgggaaatattccatgaacatctgtaattgttggatagcctgataagtacttgactgatccaaacgtggctccggagtatccaaaaataatgctttacctgcatggaaacgtgccaattcagtaaaagttccacggggatatgtattaaaataggtgataaaagtctgagccgcagtctgataatctttttgattataataactcatgcccaacatatacaaagattcttccgctttatccgttcctttaagaatagtaatcaattcgttcaacaaagtagccgaacggttatactgtccttttgcaaaatagtttttagcggcttcgtacttgtattcgtaatcggtgcttttcagcaatttattatactccccacatgaagtgagagtagctgccgcaagcaaagttataatgatatttttcttcatcctattttaaaatattgcgcaaagttacttattcgcagggaatttagcaattaatctatgttttttaatacataaaaggcgttaaacatcgacaaatggggagaaaaagacaattaaagtttatacaaatcgctagccgccagcagatcaactttcttttctttcaacacctcaatacatttatccagattgctaggacgaatcactacattggccacattattattggcaaacgagtacatatattcgataaacaccccttcagcggacaaatatcccaatacagttgccaaagctcccggcacattaggacaactgattccgaccacatcggtcacatttactgcaaaatgattatccttcaaagctttatatgctctatccggatcggacacaattccgcgcaaaataccgaaatcagcattttcagcgatgcacaaagcagaaagattgatatcttctttcgccagcacttcagtcacttccgtcaaacgacctgacttgttttccaaaaagatagaaagttgttttgctaccataatcgtagagtattaattttaagttttaaagttttctgttatcaatcacccgtttcgctttacccacactgcgttcaatgctacgcggttctaccagcttcacattgactcccaatccgagtacactctgcagacgcgcacccaatttcttcttcagagccaacatcttattgatttcatcagaatagaattccggccgtacttctacttgaagttccatcgtatcggtattattctcgcgtcccactatcagcagataatgcggttcaaattccgccatttcaagaataacggattctatttgtgtcgggaatacattgacaccacgaataatcaacatatcatcactgcgtcccaagatacgatccatgcgtaccaatgtacgtccacaggaacatttgtcataatgtagagcggtaaggtcgcgcgtacgataacggagcagcggcataccttcctttgtaaggtgagtaaacaccagttcgcctgtttgaccgggttctatcggctgtaatgtattcggatcaataatttcggggaagtaatggtcttcattcaagtgggttccatgctggcattcacactcgtagcccacacccggtccggcaatttcactcaatccataaatatcgtatgccttaatgcccagcttttcttcaatctcatggcgcatattttccgtccaaggttctgcaccgaaagcaccgactttcagcttaaactcctcacgtggataccccgaatccttaatcgcatctgccagatacagtgcataagaaggcgtgcaacaaagtactgtcgaaccgaagtcatgcatcaacgttatctgcttttcagtgttaccgctagacattggaatcacagaagctccgatattttcggctccggcatgtgcccccagtccgcctgtgaaaagtccatatccgtatgatacttgaaaaatgtccgatcggcctgccccgtatgcggtaaaggcacgagaaatacattccgcccatgaagacaaatccttacgagtatagccgacaaccgtcggtttccccgtcgtaccggatgaagcatggatacgtacaatctgactcatcggtacagcacaaagcccgaacggataattatctcttaaatcatgtttcgtggtaaacggcagtttcacaatatcatcaatgctattgatatcatcgggagtgactcccatttcctgcatcttcttccgatagaagggtgtgttgtgataaacgtaatctacaattttcttgagtcgtatgctttgaatcttacgaagactctcacgatccatacactcaatgctctcattccaaatcatgcttttcattattaaaatttaaaaatagagaatcgagaatgaaagggaattatctgcttctgcaatactttttaattttcaattctcaattttcaattattttgttgcaaagtaaaggatttatttggaaaaatgatttgtaatctcgattattttgccgaatattgttccaattttagaattgactatgaattttgaactaacatcagcttataaacctaccggagaccagccggaagcaatcgcacaactgactgaaggggtacttcaaggagttcccgcacagactttattgggggtcacaggatcgggaaaaacatttaccattgccaatgtaatcgctaatatcaataagccgacattgattttgagccataataagacgctggccgcccaattatatggagagtttaagggattctttccgaataatgcggtggaatattacgtttcatactacgattattaccagccagaagcctatttgcctagcagcgatacttatatagaaaaggatcttgccatcaatgacgagatagacaagctccgtctcgccgcaacttccgccctactctccggacgaaaagacgtagtagtggtctcttccgtttcctgtatctatgggatgggaaacccttcggacttttataaaaatgtgattgaaatagaacggggacgcatgattgaccgcaatgttttcctccgccgcctggtagacagtctgtatgtccgcaacgatatcgaccttaatcgtggtaatttccgcgtcaaaggagatactgtggatatttatctggcatatacggacaacctgttgcgcgtcacattttggggagacgagattgatggcatagaggaggtagacccagtcagcggagtcactgtcgcccccttcgaggcttataagatttatcccgccaatttgttcatgactactaaggaggcaaccctccgagctattcatgagatagaagatgacttgaccaaacaggtcgctttctttgagtctatcggcaaagaatatgaagcgaaaagactatacgagcgtgtcacatacgatatggaaatgattcgggaattgggacattgctccggcattgagaattattcccgctatttcgacggtcgtgctgcaggtacccgcccttattgtctgctggatttctttccggacgattttctgattgtcattgacgaaagccatgtcagtgttcctcagatccgtgcaatgtacggaggcgacagggcacgtaaaatcaatcttgtggagtatggtttccgcctacctgccgccatggataaccgaccattgaaatttgaagaatttcaggaaatggcgaagcaagtgatctatgtcagcgctacaccggcagactatgaactcatccaatccgaagggattgtagtggaacaggtaatccgtcctaccggactgttggacccgattattgaagtacgcccgagcttgaaccagatcgatgatctgatggaagaaattcaactgcgtattgagaaagaagagcgtgttcttgtcactactcttaccaagcgtatggcggaggagctaactgaatatctcctcaacaataatataaggtgtaattatattcatagcgacgttgatactctcgaacgtgtaaaaatcatggatgacctccgacagggaatttacgatgtgctgatcggggtcaatctgctacgtgaaggtctcgatttgccggaagtatctcttgtagctatccttgatgcagacaaggaaggcttccttcgttcccatcgttcgttgacgcagacagccggacgtgcagcgcgcaatgtgaacggaaaagtaatcatgtatgccgataaaattacggacagcatgagactgaccatcgacgagaccaatcgtcgacgagagaaacagttggcatacaatgaggcaaacggcattactccacagcagatcaagaaagcgagaaacttggatgtattcggcaacgctaattcggaaacaaatgaattgctgaaagaaaaacaagcctatattgaaccgacaactccgaacattgcggcagatccggtagtacagtatatgagtaaagcacaaatggaaaagagtatcgaacgtacgcgcaaactaatgcaggaagcagccaaaaagcttgaatttattgaagctgcccaataccgtgacgaattattaaaattggaagacttaatgaaagagaaatggggatagatttccctacttctcttctactacaaatttgattgtcaagcatagaaaatcttaacaaacctgtatcacgtcatccattccgttaattagagttataaaaacacttatcaatggctgataatttgcaaagttgccggaagtccgtatctttgcattgtgtttttcatagtattagatttaaggttaacaaaggttggagcaaggcgttgctcctttttttatgtctatacgttatcttcgtattcaaagtgctttatcaatcgctttctttatcaacggttccatgatatcatatccttcactgttcggatgtactccgtcttttgtatattgaggattcaaggcctggttttcattaaccaccaatgcttgataataatccacatacggaattttatttgcttttgcataagcctctatccgatcatttaaagatttaatcttctgaggagcatctttaatttccattctccacttgaatgcagcagcaggaagtacggaagtcagaataactttaattttattcgctttagccaattcgaccatggagatgatatttccaaacgtataatcttcattataagcctgtgtattttcggcaacatcatttgttccggcattaatcactactaaagcaggagaaagattaatcacatcttcccgaaaacgtaacaagaattgataagaagtctgcccactgattccgcgaccaatatatccatttgtcttgaagaagtccggatgagtccttacccaaccttcagtgatggaatttcccataaaaacaacccgtttatctttttttgtcgcttgcggaagcgcagcattttgttttgaataacgagctaaatttgcaaaatcctttttctgtgcatagctctctcccattgagaagcttaaacaaataattgccaacagtaaccattggtacattcttcttttatccatatttatattaggtattagtaatagatattggacgcaaagataaaaaaaatctctgtacatagacagtaaaattccgaataaccgttaagacaggaatgcattttcttaatctatgttatataacatacattttttcttggattatttgcaaatatcacagaagtccgtacctttgcaatgtgtttttcatagtattagatttaaggttaacaaaggttggagcaaggcgttgctcctttttttatatctatacgtataggatctatcgtaaaatagaaacaatcaattcaaataactaaatccaatggaacaacaaattcaactcaacgatcacaacaagcaggaataccctcctatgcatacagcagagcatttactcaatgccaccatggtgaaaacctttggctgcccacgttctcgcaatgcccacatcgaaaggaaaaagagcaaatgtgactatatactttcgtcatgtccgacagcggaacaaatccagtctattgaaaataaagtgaacgaggcaatcagtcagaacctacctgtgactgttgagtatatgacacatgaacaggccaaagacatcgtagatttaagcaaactacctgccgatgcaagcgaaactcttcgcattgtccgcattggagattatgatgcctgcgcctgcatcggattgcatgtgtccaatacttctgaagtgggtaccttcaaaatcattagctatgactatgacgaagaaaaacaaacattaagaatgagattcaagctaatcgagaagaaatagacatattatcaaattaatatctatcttatataaaataaataaaaacagaatacattttgtcatcattattgcaaaattggcattatcataatgacaaatagacaatttcagtctcaaaaatcacttggcataaggtttgcacttatagaaacgaacaacggttcgaaagcagacgatggaaaccgggacaaccggtaccatcagaagtgaaaataccgaagttcaagaataattaactgaatgtttaacttaaagataggagactaaaattatgatgcctgttagaagaactcaaagttggttaccaagtatctttaatgatttctttgataacgattggatggtaaaagcaaatgctactgcacctgcaattaatgttttggaaacagaaaaagaatacaaagtggaattggctgctccgggtatgacgaaggatgatttcaatgttcgcattgatgaagataataacctcgttatcagcatggagaagaagacagaaaacaaggaggaaaagaaagacggtcgctatctgcgtcgcgaattctcatactctaagttccagcaaacaatgattctaccggataatgtagacaaagaaaaaattgctgcatctgtagaacatggcgttctaaatatcgaacttccgaaactctctgaagaagaagtaaagaagccaaatagacaaatcgaaataaagtaatacagtaaccacttactattcaccggagacggtgatgaaaaggatcaaaaacagctctctcccttaaagggaaacgagctgttttttattgtctttgcaggcaatgccgccttattaacataacagacccacagggttttcggactgaccccttattatcttcagttgttcttccgataactaattaccgcccaactattaaacacgactgcaaaaagcaacaatattccgaactgcggcagcaaatcaaagaaaccactccccttcagatatatcattcgcatcacctccataaaatacttcaaaggattgaatatcgttattatttgtgcccattccggcatgctgctaatgggggtaaacaaaccgctcatcaaaatcaccaccaacaaacagaaccacataacaaacattgattgctgcatcgttgctgaatagttggaaatgactagtccgaagccggacatcaccagaacaaaaagaaccgcgaaaaagtaaatcaacagaaaatgcccgacaggtactatgccataaattaaccaggctaatatgaaacacaccgtcagcaccagaaaaccaatcagccaataaggcaagagctttgccaaaataaaaacaaacttcggaaccggagtcacattgatttgttctattgtccccacttccttctcgctaaccacattcaatgcaggcaagaaaccacaaatcaaagtcaacaacataaccatcaatgccggaatcatatagagcttatagttcagattcggattaaacaatccctgcgtatcaacctgtatggaagagaaagcaccggaaacggtagctgcttcgggatgttccgaacgtagttcggctgcataatcattaatgatagaagacaaataagaactgcccagaccgcctttcgttccattcacggcattggctgctatcaaaacatgagcatcctctccattcatccaatcccgttccaaatgccttggaatttccatcacaatatcagccgttccaatttcaatgtttcgaagaccttcttcatacgaggtcggtacttctaccaaacgaaagtaagtggaggcagcaatcttattcactaagcgttgtgaaatagccgaatgatcattatccacaatattcagctgtatattcttgatttccaaatttaccgcccaaggcatcaatagcataatcatgcatggaaatacaagaatcaatttcggaagaaacgaattgcgaagcaattgtttaaactctttttctatcaggaactttatcataaataattcttcaatttgctgatatgtttatatgtcaatgccatgtagtataacacagccaattggcacattaacatattattcttatctactccaatctatacttgaatttcttgatactaaccgtaataagtaccgtcgccatcaataataagataccaatctccttatataccaatacaacaggcactccttcaatcatcaactttcgcacagcctgaatataccaacgtgccggaagtatatccgagatccattgaagtatcaacggcatactctcaatagggaaaatcatccccgataaaagcatcgtgggcatcatcaacatcaaaccggaaaccagcatggccgcaacctgtgtacgcgtgactgatgaaatcaataagcccaacgccaaggatacgaagataaacaacaaagagacggttatcaaccagaacaaacttcctactactggaacatccagcacaaagaccgaaagtaaaagaattgttatcagattgacaaacgacaacacaaaataaggcacagcctttgccaaaataataaatagtggcttcacaggcgaaaccagtaatacctccatggtccccgtctctttttcacgaacgatggaaatcgaggtcatcatagcacaaatcagcatcaggatcaaccccattacccccggaacaaagttataagcactcttcatttgcgggttatacaacagttttatatccgacgttaaacaggcagccgacatattgggcggcatcatttcctgacctaccatagaaacaattcccgttgcataattaacctgcgaagtcgacatattcggatctgtcgcatctactaccagctgcacacgagcatcacccgtatagagatcatctataaaacgttcgctaaaaacaatcgccatatcaaccttattcttcagaaaagcagcttccatttcctggggcgaatgaaaacgtgcagtaacggtgaagtactcactggcgtccaaacgatcaattatttttcgcgtcaccacatcattagaaggatcgagtaccgccaaccggacatttttcacctctgtactgatggcaaaaccgaatagtacaatttgtacaaccggcatccccaacaaaatcagcatggttcgccggtcacggaaaatatgataaaattccttctttacaaaagctataaactgtctcataatcaatctgctttgcgcaccgcaccgcgggctaattgctgaaaaacatcatccatcgtttccgcaccgaattgttgcttcagacgggcaggtgtatcaagagctttaatctgaccgtccaccatgatagatatccggttacaatattccgcttcatccatataatgggtagtgacaaatatggtgattccctggtcggctgcctgataaatcaattcccagaactgccttctcgtagcgggatctactccacccgtcggctcatccagaaaaacaattctcggctcgtggaagattgaaactgaaaaagctaatttctgcttccaccccaccggaaggcttttcaccagagtatcccgttcggcagcaagcttcaaacgatccaacaattcttctgtcttccgttctatatcttgttccttcataccataaattccggcaaacagacggatattctcccacactttcaggtcttcatatagcgaaaacttttggctcatatagccgatatgcttctttacttgttcagcttcccggaaaatatcatatcctgccacctttccgatacccgatgtcggtttgctcaatccgcaaagcatgcgcatagctgtagtctttccagccccgttagcacccagaaagccaaatatctctccccggttcacctgaaaggagatatgatctaccgctgtaaaattaccaaaacactttgtcaactgctccacttcaatgaccggagcggtttcatgcctcacctcctcccgttccaaagaaggaggacaaaggatggatgcaaattgctgaagaatacgctcaggagtatcaattccatgaatctttccatgattgataaaagcaatccggtcacattgccgggcttcatccatgatgggagtagaaacaacaatggtaataccctgttcccgcaagttccggagcatttgccaaaattccttacgcgacacaggatctactccggtagtgggttcatccaggaataaaatatccggtttatgaatcaaagcgcaactcaatgccagtttctgcttcataccacccgacaaagcccctgcccttcttttcctgaacggttctatctgctgatagatatctttaattaaatcatagttctcctgaacagtcgtatggaatacggtagcgaaaaactccagattctcctctactgaaagatcctggtaaagtgaaaaacgaccgggcatatatcccaccttcgtacgaatctgtttatagtctgttgccacatccagtccgccgatcgtggccgttcccttatctgccagcagcaaagtagtcagaatacggaataaggtactcttaccggcaccgtcaggacctatcagcccaaagatctctccccgttctaccacaaaagaaacctctttcagcgcttccaccgttccatagctcttgccgacttctttcacaaccactatgggtacatccttctccatctccctgactttaatttttaatcttcattctttaattttactccgccatacataccaatcttcaacgctccgtcattcttcaccgcaatcttcactgcatataccagattagcacgttcattcttcgtcagaattgtttttggagtgaattccgaacgatcggaaatccaggtcacttcccccggataagctttctgctccgagttgccatagtcagcatacacagtcacttgatctcccagtttcacttttgacaactgttcggaagtgatgtaagccctcaaatacatacgatccacttcgcccaccttaaataaaggcttgcctatcgccgccaattcaccggtttccgcatacttagccaatactgtacctgcgataggtgactgaacatgacatttagctaactgatcctccacttgcgctacctgtatagcaaccgaattgccttgttctgtaaggctattcgtactattacgcaacgatgattcctgcgcaacgagctgccgttcgagtaatttgacttgcgcgtcccaatcgtccagttgtttttgattggccgcacctgcagcaagcaagttttccacccgtttcctctcacgctctgccgtgacaatttgctgcttggtagcggcaatctgtttggcaagatcaggacgctggttttctaccgatttcatactggcttccaattgcagtttctttaaatacaattgtaccgtatctaccaacccgatctcctcacccgcttccagctttgtaccctcttctacttccagtcgtagcaattttccggcagcctcggcggatactattacttccgtagcttcaaatgtaccggttgcgtcataatcaggtgttccatttccacaggcagataacatcatcagcgttatcccccacattcctatttctgttattcttttcatatccggagaaattatattaatcattcgttgtatatttcaattgataaattcccattaaccgttgaatctcatgcatggctttcgactgacgcgccaagctctcattagtcagttcacgtaacatttcagtcacggtcaatgttccatttgccacctttgcttcagcagctttacggatatttgtacgcaaccggataatttcatcatcatcccgcatttgcttctccaaagaatggatagcctgatcctgctgcgtcatttccagcctcgtattgaaaagaaatacatcccggttattatccagttgctgtcttttcttctcgatcacccgacggtcatttttcaaagtatacagactaccgaaattccatgaaaaccggacacctgccatataataaggagagaattcattcttcagcatatccaatccgggatttccgtatgccccctgcacaaacagtccgaactgcggaagatgacgcacattcaaagccttctcctgcacttgcagtccagctccctgtgcatcaaacaaagccaactccggccgacgaatctcactgacagccgaaaccgtactttgaggtacaggtttctccagcaccgtctccggagacagtgcttctcctaccaacagcgaaagcattttcaaataagctgcacgtgatgatactaaatccactcttttctgttttgtattcagctgctccactttcactgcatccaaatcagcttgattggctattccattttccacataagcagtaatctgacgataatttctctctagctcatcttgtaacaatgtattctgtttgatttgctcgtccagcaggagaattccaaaataaagatcattcacgcggtcattcagcgcatacatatctacattcagtttttctttctccacttcagcctctgcaatcgtctgcttcttctgcatacggattcctcccccgtcccatatcttctgttgcaactccaacatgacctgatattggtctttgggcaatccttttaaatctactccgggaagttttgccggaatttctgtcacatcactctgataagaggccttagccgaaagagcaaattgaggtaaatatcccttggctgcattttccagattatattcctttgtcttctccactaaaccatactgatgtaccagcggataattgtcctgcgtcttccgcagacattcttccaatgtaatctgcgcatacgctcctgctacatacagtaaaaaggagaaactgaaaatcattcttttcatatccattatttctttggtttcttcgaaagacaaagatagggatttcaaagacactggtcatttccaagagttggcaaatatgtcccattagttcgataaaacagaaaaaagaaaataaatatgctgcattttattacctttgccggaaaagagagaagaaaatggaacaaaaagaaccgatagagttagcacttaaattattagacaatctcaaaattgtccggcataacgagcatcgttatatatcttctgatttcggattcgtcaatagctttgtaaagatggaaacgactcttttctcactcggtcaaccgtatcgtattaaagaagggcgtattgcattcgtcaaacaaggttctgcccgagttctcattaatctgattgagcatatcatccaaccgggatacatttcagtaatcgcccccaattctatcattcaaattatagaagtatctcctgattttgatatgcaaatgatggcagccgatcatgatttccttcctatatccggaaaagacgattttttctcttaccttctccatcatcagaaaaatatcttattgttactacttccacaagagcagcaacaagtgaaaaactatttcactttgatatggggagtattacaggaaccgccattccgcaaagaagctatacaacatcttttggccagtctcctctattatttagaatatatcgctcaaaacagcattgagcagaatcctgcacagttgacaagacaggaagagattttccaacgcttcatctctcttgtcaacacacacagcaagaaagagcgtaacgtgaacttctatgcagataagctatgtctcactccgcgttatctgaatacagttatccggcaggctagtcagcaaacagtaatggactggataaaccagtccattatactagaagcaaaagtattgctaaaacatagcaatctgctcgtttatcaagtttctgacaaattaaatttccctaatccttcttttttctcgaagttcttcaaacgaatgacaggaatgacaccccacgaatatcagcaaacgaaataatctttatttcgagaactctttaatccgttgttcctcttccagtttacaaatcagtaatgtattatctttctccgcgatgatatatccatctaatccttgaacaacaactcgtttttcttcgctggcatgcacaatacaattcttactgtcatacaaacgtatatcggttcctaccgtagcatttcccgatttatcctgtggtaaaagaccgcgaagtgctccccatgtgcctaagtccgaccagccgaaagaagccggtaacacgtaaattgcctccgctttttccatcaccgcatagtcgatagaaatactttcgcaagtcgggaacaactttttgattgtttcattttctttttccgtatagaaatccgggaaaatacggtcaaaaatctgtgcgatacccggagcatatacacgcatcacggaagtgatagtacgcacattccacacaaagattcccgcattccagaagtaattaccttccgccaaatacttttcggctgtctctttatcgggtttttccttgaatgcgtctactgtataaatttctttatctgtttgaagctggttggcagcagcaatatatccgtagcctgtctccggacgagtcggccgaatacctattgtgacaatagcactgctatcatccgtaaaacgaagtgctttctccatcactctacggaactcgcccgtatcgatgactaatgcatccgaaggagttactacaatattagcacggggatgcttctttttgattttccagcaagcaaatgcgatacaaggtgcagtatttcgtgcacaaggttccgctaaaatattactttccggaatttccggcaactgctcccgaacaatatcaatgtatttttcagaagttaccacccacatattttctctggggcaaacaccatcaaaccggtctgccgtcaattgaatcagtgaccggccacatcccattacatcaataaattgtttaggacattccggagtgctcatcggccagaaacggctccctatgccaccagccattattacaacatgattatccatacctatcatccccctgtaaaaaaaatattatttaaataagtgcgcaagttacattaaaatgtccaaaacagcaaataaagaccaagagtatttaattttccaactgaataatcgaataattgtatttccacaataaaagacaaaggccgctcccgaataacaggaacgacctttgtcttttcatttcaatagaatataatcatcttatttatattctgcccagctcttgatagctatatcatccacactcatcgtacagaaggcattgataaatgcactagccagacgagcgttcgtaatcaacggaatatttaaatcgatggcggcacgacggattttatacccattgcttaattctccggcagtcaagttctttggtatattgactaccatatctatttccttactatgaagcatctccaacgcctgcggatgtccctcttcactcggccaataaacatgagtactctcaataccgctctcggcaagcgctttatgtgtaccgcccgtcgcaaagagtttatatcccttattcaccaacatacgggctgcatccatcatatccgctttttgcttcatggtacccgtggaaagcaagatattcttcttcggaatacgatagcctacagaaagcattgctttcaatacagcacaagaagtatccataccaatacaacctacttcaccggtggaagccatatctactcccaacaccgggtcggctttctgcaaacggttgaaagagaactgtgaagctttgattcccacatagtccaattcgaaaagattcttttccggtttttcgacaggcaggccaagcataactttggttgccagttcaataaagttgatcttcagtaccttgctgacaaatgggaaagaacgactagcacgcaagttacattcaatcaccttgatatcattgtcttttgccaaatactgaatattaaacggaccggagatattcaaagccttggcaatctcacggctgatacgcttgatacgacgaacagtttctacatatagcttttgtggcgggaactgaatagtcgcgtcaccggagtgtactcctgcaaattcgatatgctcactaatagcgtatgccacaatttcgccattctgcgccacggcatccatttctacttccttggcatgttcaataaactgacttactactaccggatgttttttcgagacattggctgccagtttcaggaaacgttccagttcttcctgattggaacaaacattcattgcagctcccgaaagcacgtatgacgggcgaacgagtacggggaaacctacttcttcgacaaattcatggatatcttccatagaggtcaactcacgccaacggggttgatccacaccgatacggtcgagcatggcagagaatttctcacggtcttcagcgttgtcaatgctcttggcacttgtgccaaggatattgatatgctgtgcatccaaacgcaaagccaagttattcggaatctgaccaccggtagatacaattaccccatgcggattctccagttccagaatatccatcacacgttcaaaagtcaattcgtcgaagtacaagcgatcgcacatatcgtagtccgtagatacagtttcaggattataattaatcatcacgctgcgccatccttctttacgaatagtattcaaagcctgcacaccgcaccagtcaaattctacggaagagccgatacgataagcgccggatcccaatacgacaatggatttatggtcgcccaagtaatgaacatcatttgccacaccgctataagtaagatacagataattggtttgtgccggatattcggctgccaaagtatcgatctgtttcactaccggaagaatacccgcctctttacgatgtttgcggacataaagaataccatcctccatatcaccttcgtagccgatggcacgagcaacctggaaatcagagaaaccttgaaccttagctttacgaagcagttcgtttggcagatcggctatttgtttgtgattatttccccagctatgcagttcttcggaagtctgcatgatattcatcaatttctgaaggaaccatttatcaatcttagtcagttcgtgtacctgatcgatggtgtagccggcacgaaaagccttcgagattacaaaaatacgtttatcagtcggttcgcgtaaagccttgtcaatatcctgaataaccagctccttgttttctacaaaaccatgcatcccctgtcctatcatgcggagccctttctgaatcgcttcttcaaacgtgcgtccgatagccattacttcacctaccgatttcatagaagaacccaactctttatctacaccgtggaatttacccaaatcccaacgtggaatcttacatacgacataatccaatgccggttcgaagaaagcagaagtagtctttgttacagagttcttcaggtcgaagagtccgtaacccagtcccaatttggctgcaacgaaagccagcggataaccagttgctttagatgccaaagcagaagaacgggaaagacgggcatttacttcaatcacccgataatcttcggattcggggtcgaaggcatattgcacattacattcgcccacaataccgatgtggcggatgatacgtattgccagttcccggagtttatgatattctttgttcgtaagcgtttgtgacggagcaataacgatagattcaccagtatgaatacccagcgggtcgaagttttccatattacaaactgtaatacagttgtcgaaacggtcgcgcaccacttcatattccacttctttccaaccacgaagtgatttttccactaatacctgcggagagaaagaaaacgctttttctacaagaatatccaactgttcttcgttatcacaaaagccggaacccaagccacccaatgcatacgccgcgcggacaataaccggataacccagttcttttgctgcgcgacgggcatcttccgcattttctacggcttcactcttaatggtctttacattgatttcattcaatttctgaacgaaaagttcacggtcctcggtatccataatggcttgtaccggagtaccgagtacttttacattatatttttcaagaataccttccttatacaatgccactccacagttcaaggctgtctgaccaccaaacgccagcataatgccttccggtttttctttttgaatcactttctctacgaaatacggagtcaccggaaggaagtagatttgatccgctactccttcggaagtctgtaccgtagcaatattaggattgataagaatcgtttcaatgccttcttctttcaaggctttgagtgcctgcgaaccggaatagtcaaactcaccggcctcaccgatcttcagggcaccggaacccaacagcaatactttctttatattttctttcattgattctactttctggttcatcacagattacacagattgacacagatttttataatccgtgatgaatatgggttataatagttttacaaattcgtcgaacaggaattccgtatccgtaggtccactcgctgcttccggatggaattgtgcagaaaaccaagggtttcttttatgcttgattccttcgttagagccatcattcatattaataaataacggttcccaatctgcactcaacgtattattgtctacggcataaccgtggttttgcgaagtgatgaagcaacgttccgtacctaccatacgaaccggttggttgtggctacggtgaccgtatttcaatttataaatcttggctcctcccgctttcgaaagcagttggttacccatgcagattccgaagataggcagtttctcgtttgacattgccttacggatattctgcaccgcggcatcacaagtatccgggtcacccggtccgttagaaataaacaatccgtcaaattcgagtccgttataatcataatcccaaggtacacgaatcacctcaacattacgtttcagcaggcaacgaatgatattagtcttcacaccgcaatctaccaaaaccacttttttaagttgtgagttaaaacctgaaagttgagagttgagttgctcaataggagtcgttaatgggaaagaatgagaggttccgtcgggaagataagaggttatttccttgcagcttactctgtctacataattaatactctcataatcttccatgttcaattcttcattctcaacttcatcgaaaacgattttccccatcattactccatgttcacgaagaactttcgtcaactcgcgtgtgtcaatgcccgtgataccaggaaccttttcgcgtttcaaccagtcaccgaggctctccacagcgttccaatggctgtattcataagaatagtcacttacgataatcgcttccgcgtggatcttctcactttccatgaaagtggcaagtccattcggctcgatagtgaaaggaggaacaccgtagttacctaccaaaggataggtaagcgtcatcaactgtccggcgtatgaagggtcagtgaggctctccggatatccggtcatggcagtattaaacactacttcgcccgccaccggcttctcgtagccaaacgacttaccggaaaaccggctcccgtcgtcaaggattaatgtcacatttctcattcttattattgaatcattgtatggttgttagaattgatacagttgctctatgtagttgataaatgcctgattcaccattttcacgccacccggagtaggataattgccactaaagtaccagtcgccgcgatgattcgggcaggcttcatgaagtccttccaacggttggtagacaatttcaactttagctttcgtgcctttcggagtcaataactctaccatcttggcagaaatttcctcgtcagtgaacggcgcatatatttcttttacatagttcaccatctgttctttcggcagtcctacctgatccttggattttcggtaggcagccgcaataatatctttcatatcgcgttctttcaaaagctcgatagcagccctgaaggcgataaactcgctcatctttgccatatcaataccgtaatagtcaggataacgcacctgcggagaagaagatacgatgacaatcttcttcggaccgagacggtcgagaataccaataatactttgtttcagcgtagtaccacgcacaatgctgtcatcgataatcaccagattatcaacaccgggtacaagacttccgtatgtaatatcatacacatgggcagccaaatcattacggctgtttccttcagcaatgaacgtacggagcttaatatccttgattgccaccttttcgctgcgaatacgacgggaaagaataacttccaactcctccatattcgggttatgacccaatgaagcaatctgctgtactttctcctcattcaagtaatcatccaatccctgcaacattccatagaaagcaacctccgctgtgtttggaataaaagagaaaaccgtatgatcgatgtcattattgattgctttcaatattctcggaaccaacttttcgcccagccgtttcctttctttataaatatcgacgtcactgccacgggagaaatagatacgttcgaaggaacaagcctgattttcacgtggcttattgatttgcgaagtacgtatctttccctctttgctaatcagcaatgcctgccccggttgcagttccttgatttcctcaaacggaacgttcaaagctgtctggatcaccggacgttcggaagcaagaacagctatctcgtcatcctgataccaaaatgcaggccggatgccccacgggtcacggatagcgaaagattcaccgcttccggtcaatccacaaataacataccccccatcccattcgcgactggaagtacgcagtacgtttgccaaatcaatatgttcttctatataatgcgtgatgcccatgcccgtaagcccttcggcttcggcaagattgaatacacgctccacttcacggtcaagacggtgtcccacctgttccaacatgatatatgtatcggcatatttacgcggatgctgaccaatggcagtgatacgggcaaatatttcgtccacattcgtcatattgaagtttccgcaaagagcgagattcttggcacgccagttatttcttcttaagaatggatgcacgtatgagattccggattttcccgtagtggaataacgaagatgccccatatatacttccccggcaaaaggcaggactcgtttggcatacgcagcatcatgcaactgttcgggagtgagctccttaaaattgttttgaacattttcaaaaatctccgtaatagctccggagcctaaagcacgttcacgaaacatatattcttcacccggatttgcttccagtttcacacatgccagtcccgcaccttcctgtccacggttatgttgtttctccatcaacaggtagagcttattaagaccgtacatccatgttccgtactttttctcgtaatactccaacggtttaagcaagcgtatcatggcaacgccacattcatgtttcaattgttccatctatactatttacgatttgacgatttactatttacgatttaaattaccacctgccaatcaaacaacttactatctatcattgattcttcaatcgtaaatagtaaatagtaaattgtctaattgtaaatcacattactctaccgttaccgacttcgccagatttctcggctggtctacatccatccccttacataccgcaatgtgataagcaagaagttggagaggtaccgtagtaattaacggatcgagacactctattgtttcaggaagttcgatactacaatcggcaatcttgctgataaccgtatctcccttcgtaacgaacgcaatcacttttcccttcctcgccttgatctcctgaatattacttagcactttttcgtacagtccattctgcgtagcaatcaccactaccggcatttccgcgtcaatcaaagcaatcggtccgtgcttcatctcggcagccggataaccttcggcgtgaatatacgatatttctttcaatttcaatgcaccttccaatgcaacaggataactatatccgcgtcccaggtaaataaagttatgcgcatacgtgaaagttttcgataactccgccagggtatcattcagtttcagcacttctttcatcttctccggaatatgatttaattcctgtactattgaaagataatgccgttcgtcaattgtccctttcgctttggcaagcgtcaatgccagcattgccaacacagtgacctgtccggtaaacgctttggtggaagcgactccgatttccggccctacgtggatatacgaaccggtgtgagtggcacggggaatagaagacccgatagcattgcaaataccatatataaatgctccgcggctttttgccaattccacagcagccaaagtatccgcagtctcaccgctttgggagattgctatcactacatcctgtccgtcaatcaccggatcacggtaacgaaattcggaagcatactccacttccaccggtatgcggcagaaactttcaatcagatgctttccaatcagtccggcatgccaggaagttccgcaggcaacaataataaaccgcttggcattcaacagcttttcccgatgatcaatcacagcggaaagtaccacattgtctgcttccacattgatacgtccgcgcatacaatcgtgaatacaatcgggctgttcgaaaatctctttcaacataaaatgcggatatcctcctttttccagctggccgagatttagctccacttttttaatttcaggtgtcatttcaacattactcaaattgaccaccttcaattcttttcccaaatggagaacagcaatttctccgtcttccagataaaccaccttatctgtatattctacaatcggagtggcatccgaagcaaggaagaactcgtccgctccaatccccactaccagcgggctactcttacgggcagcaataatctcatcgggatgctctttatcaagaatcgcaatcgcataggcaccaatcacttctcccaacgccaattgaacggctgtcagcaaactgacctgattagtgactttcatgtattctattaattgaacaaggacttcggtatctgtactacttttaaaaatatagcctttggcttgaagtttttctttgagaacggcgtagttttcgataataccgttatgaatgagagcgagcttttcggaagaagagtaatgagggtgggcgttagcggaacaaggttccccgtgagtagcccaacgagtatgggcaattccgattgtaccggaaatatctttttgtgtgacgaaattttcaagatcggagacttttcctttcgtcttatacacatttaactgtcggtcatcactgatgattgctacccccgcgctatcatatccacgatactccagtcgcttcagcccttttataaggatagggtaggcttttcgtttaccaatatagcctactattccacacatattatgatatttttatttcgactgcaaatatacacattacaaataacataaagacaacaaaaagcatatttatttgacagaaacgcataaaaaagttgtaaacacatcaaaaagttaaataatatattatttttagctcaaaaagaaacaaattacaattagctcaccattaaccccaaagagctaacaaattaaaagtaaatctccttcttttaattacaaattagaagaagacaggctcttcttttaatttcgcgttacagaaaacttatattttactatcattttgaaattaaaccactaactttgccgaacaatttgacacttcaattaggtattatcatacaataaagctagtaagaatgaagaaacaagaactttttaacaacgtaacagaaggatccccttaccaacgacagcccaaacagatgggcttgtacaatgcggcatacgaacacgatgcctgcggtgttggtatgctggtaaacattcatggagaaaagtcacacgacattgttgagtcggctttaaaggtattagagaacatgcgccaccgcggtgccgaaggtgcggataacaaaaccggcgacggtgcaggtatcatgctgcaaattccgcatgagtttattttattgcaaggtattcctgtacccgaaaaaggacggtacggcacaggattgctatttttgccgaaaaatggaaaagaccaggcagccattttaagtatcattattgaagaaattgaaaaagaaggactcacattgatgcatctgcgcaatgtgcccacctgccctgaaattctaggagaatctgctctggcaaacgaacctaacatcaagcaagtattcatcaccggatttacagaaacggaaactgccgaccggaagttatatctgatccggaaaagaatcgagaataaggtcagactgtcatccattccgacaaaagacgatttttatgttgtttcgctttctacaaaaagtattatatataaaggtatgctttcgtcattgcaactgcgcaactactatccggacctgacgaatagctattttaccagcggactggcactggtgcactcccgtttcagtaccaatacattccctacatggggattggcacaaccattccgcctgctggcacacaacggtgaaatcaacacgatccgtggtaaccgcggatggatggaagcccgcgaaagcgtactctccactcctaccttgggtgacataaaagaacttcgcccgatcatacaaccgggcatgagcgacagtgcttccctggataatgtactggagttcctggtgatgtcggggttgagcctgccacacgctatggctatgctcgtgccggaatctttcaacgaaaagaatcccatcagcgaggatctgaaatcattctacgaataccactctatcctgatggaaccgtgggacggaccggctgcacttctcttcagtgacggacgatttgccggaggtatgctcgaccgtaacggtctgcgccctgcccgttatctgattactaaaaacgatatgatggtagtggcttcggaagtcggtgtgatggatttcgaaccgggagacatcaaagaaaaaggccgcttacagcccggtaagattttgctggtagatacagaaaaaggtgaaatttattatgatggcgaactgaaaaaacagttggctgaagccaaaccttaccgcacctggttgtctacgaaccgaatcgaactggatgaactgaagagcggtcgcaaagtacctcatcatgtagaaaactacgactgtatgcttcgcactttcggctactccaaagaggatatcgaaaaactgattatgccgatggcaagcagcggagcagaaccgatccattcaatgggtaatgatactccgttagctgtactttcggataagccgcaattgctttacaactatttccggcagcaatttgcacaagtgaccaatcctcccattgacccgctccgcgaagaactggtaatgtcattaactgaatacatcggggcagtcggcatgaatatcctgacacccagcgaaagtcattgcaaaatggtccgcctgaatcatccgattttgagcaatacacaactggatattctttgtaatatccgctataaaggtttcaaaacggtcaaactgcccatgttatttgaagcagcgaaagggaaagccggattgcaggaggcactgaacagcctttgtaaaatggcggaagaatctgtgacggaaggcgtaaactacattgtcctgaccgaccgtgacgtggatattacccatgccgctattccttcattgctggcggtaagcgctgttcatcaccatctgatttcagtcggtaaacgtgtacaaacagcattgattgtagaaagcggtgaaatacgtgaggtaatgcacgctgcgttattactgggtttcggagcaagtgccctgaatccttacatggcattcgccgttctcgaccgcttggttaaagacagggatattcagttggattatgccactgctgaaaagaattatatcaaatccatttgcaaaggcttgtttaaaatcatgagtaaaatggggatctctaccatccgctcttatcgtggcgcaaagatcttcgaagccgtcggtttgagcgaagaattgagtaaggcctatttcggtggactcggttcgcccatcggaggtattcgcctggaagaaatagccagagatgccattgctttccatgaggaaggattttcagaaatcaaaaatggaaatgaaggaacacaaagtaattctcaatcttctactttcaaccttccattattaaaaaacaacggtttgtatgccttccgcaaagacggagaaaagcacgcatggaatccggaaacaatcagtacactgcaattggctacacggctgggaagttacaagaagtttaaagaatatactcatttggtagacgaaaaagagaagcctattttccttcgtgactttctgggattccgtcgtaatccgatttcgatcgatcaggtagaaccggtggaaaacattctgcatcgtttcgtcacgggggccatgtcttttggttctatcagcaaagaggctcatgaggcaatggctattgccatgaataaaattcacgggcgcagtaataccggtgaaggtggcgaggacgctgcccgtttccaaccgctgcccgatggcagttccttacgaagtgcaatcaagcaggtagcttccggacgtttcggtgtaacggcagaatatctggttaatgcggacgaaattcagattaagatagcacagggagcaaagccgggtgaaggcggacaacttccgggatttaaagtgaatgatgtgattgcaaaaacacgccattccattccgggaatttcactgatttctcccccacctcatcatgatatttattcgattgaggatttggcacaattaatcttcgatctgaaaaatgtaaatccacaggccaaaatcagtgtgaaactggtagcagaaagcggtgtcggtacaattgccgccggggtggcaaaagcaaaggcggacctgattgtcatctccggtgctgaagggggaacaggtgcttctccggcttcttctatccgttatgcgggcatctcaccggaattgggattgagcgagacacaacaaacattggttttgaacggacttcgtggtcaagtagttctgcaagccgacggacaactgaaaaccggacgtgacatcatcttaatggcgctaatgggtgccgaagaatatggcttcgccacctcggcattgattgtattagggtgtgtaatgatgcgcaaatgccatcagaatacttgtccggtgggagttgccacacagaatgaggaattacgtaaacgctttcatgggcgtagtgaatatttggtaaatttcttcacattcctggcacaggaggtccgcgagcatttggccgaaatgggattcaccagaatggatgatattatcgggcgcacagacttgatcgaacgcaaatccgttaccaacgacccgaatccgaaacatgcgttaatcgacttcaccaaattgctggcacgcattgataacaacgcggctatccgccatgtcatcgatcaggatcacggtgtttctactgtaaaggatgtaaccctcattgatgcggcacaggaagctattgaacatgagaaagagatttctttagaatatacgattaccaatacagaccgtgcaataggtgcgatgctctccggagtgattgccaagaaatacggtggcaaaggattgccggaacacacgctgaatgtgaagttcaaaggctcggcaggtcagtctttcggggctttcctcgtaccgggagttaactttaaactggaaggtgaagcgaacgattatctgggtaaaggattgagcggcggacgcatctccgtattgccccctatccgcagcaacttcgaagccgaaaagaatacaattgctggtaataccttgctttatggagcaacaagcggtgaagtatatatcaacggtcgtgtaggagaacgtttcgcagttcgtaactccggtgcagttgccgtagtggaaggtgtgggcgaccattgttgcgaatacatgacaggaggtcgtgtggtagtcctcggacaaaccggacgtaacttcgcagccggaatgagtggcggtgtggcttatgtatggaacaaggatggcaacttcgattatttctgcaacatggaaatggtggaactgtcactcatcgaagaagccagctaccggaaggagctacacgaactaatccgccaacattatctgtacacaggctcaaaactagcccgtaccatgcttgacaactggaatcattatgcagaccagtttatccaagtagtacccatcgaatacaaaaaagtattgcaggaggaacagatgagaaaattacaacaaaaaattgcagacatgcaaagagactattagatttacaatttgactatttacaatttactatttgaatgtatagtctgtaaatagtcaaatagcaaatgacaagatagtctaaaaatagtaaatagtaaatcgtcaaatagtaaataacaagatgggagatcctaaagcatttctaaatatacctcgacaagaggcgggataccgccctgtaaacgagcgaatcgctgactatagtcaggtagaacagactttgaatacaaacagccgtaaattgcaggcgtcacgctgcatggattgcggtgtacctttctgtcattgggcatgcccgataggaaataaacaaccggaatggcaggacgcattatacaggggaaaatggaaggaggcatacgaagtattgtcgtctacttgcgattttccggaatttacgggacgtatttgtcctgctctttgcgagaaatcgtgtgtgttgaaactttcctgcgatcagccggtgactattcgcgagaatgaagcagctatcgtagaagcggcttttcgtgaaggatatatacaagtaaagacgccggaaagaaacggaaagaaagtggcggtgattggtgcaggtcctgctggattggtggtggctaatcagctgaatttaaaaggatatagcgttactttattcgataaggatgaagcgcccggaggattattacgattcggtattcctaatttcaaactggataaaaatgtaattgaccgacggatgaagatattggctgcagaaggaatacagtttgagatgggagtagaaatagacgttaatcatttaccggaaggattcgatgcttactgcatctgtaccggaacccccactgcacgtgacttgagtattccgggacgtgaactgaaagggattcatttcgcactcgaaatgctggcacaacagaataggattctggcaggacagactttcccgaaagacaagttggtaaatgccaaaggcaaaaaggttctcgtgataggtggcggagacactggttccgactgcatcggaaccagtgtgagacagggagccgtcagtgtcactcaaatcgaaatcatgccgaaacctcctgtcggctacaatccggctactccttggccacaatggccggcagtcttcaaaacgacttccagccatgaagaaggttgtacacgccgctggtgcctggcttccaatcagttcctcggaaagaatggaaaagtgacaggtgtagaagtggaagaagtagaatggattccggcagcagatggcggacgtcccacaatgaaaccaacagggaagaaggaagtcatcgaggctgatatggtattattggcgatgggattcctgaaaccggaacaacccaaatttgcaaagaatgtatttcttgccggtgatgccgagactggtgccagcttagtagtacgcgccatggcaggaggacgaaaggctgctgcggaaatagatgcttatctaatacaataaggtttgcaacagtgtacaacaagaagctcgattgctattatcggttcgttccatatctgtagaactaaagaataacagatatggaactaaaggaaaacagttgtggaactaaacgataacaattatggaacgaattaagaacagctagtcagcttcttagaaatagcgaataaacaatcaacagattacattaccccctctaaaaattaaagttatgtgtggaatagcaggtatactcaacatcaaagttcaaacgaaagagctaagagataaagtactgaaaatggcccagaagatccgtcatcgcggaccggactggagcggaatctatgtaggcggaagtgccatcctggcacacgaacgtctttctattgtcgacccgcagagtggcggacaaccgttatactctcccgatcgtaaacaggtgctcgccgtcaacggtgagatttacaatcaccgtgatattcgcgctaaatatgcgggaaaatataactttcagaccggaagtgactgtgaggtaattcttgccctttacaaagataaaggcatccattttctggaagatattagcggtatctttgctttcgttctttatgatgaggaaaaggatgaatttctaattgcccgtgatccgataggggttattcctttatatataggaaaagataaagagggaaaaatctacttcggcagcgagttgaaagcccttgaaggattttgcgacgaatatgaaatatttctccccggacattacttctatagtaaagagggaaaaatgaaacgttggtattcgcgcgactggacagaatatgaaaccgtaaaagagaatgatgcacaaaccgttgatgtgaaaatagcattagaagaggctgtacaccgccagttaatgagtgacgtaccgtacggagtgcttctttcgggagggttggatagttctgtcatctccgccattgccaaaaaatatgcggcaaaacgtatagaaacagacggagcgagtgatgcgtggtggcctcaactccactccttcgccatcggactaaaaggtgctcccgatttgattaaagcacgtgaagtggctgaatatatcggtactgtccatcacgaaataaactatactgttcaggaaggtttggatgccctgcgtgatgtcatttatttcatcgagacatacgatgtaaccacggtacgcgcttccactcccatgtacctactggcacgtgtcatcaaatcgatgggtatcaaaatggtgttgagcggtgaaggcgccgatgaagttttcggtggttatctgtatttccacaaggctcccactccacaggcattccacgaagaaacagtacgtaaactttcaaagttgcacatgtacgattgcctccgcgccaataaaagtttgtcagcatggggagtagaaggacgtgttcctttccttgataaagaattcctcgacgtagccatgaacctgaatccgaaagctaaaatgtgccccggaaaggaaattgagaaacggattgttcgcgaagcctttgccgagatgttaccggaaagtgtggcgtggagacaaaaagagcagttcagtgacggtgtaggatattcatggattgacacattgagggaaatcacagctgctgctgtgagcgatcagcaaatggaacatgctgccgaacgcttccctatcaacacgccacaaaataaagaagaatactattatcgcagtatctttgaagagcatttccccagtgaaagtgcagcacgcaccgtacccagtgttcccagtgtggcctgctccacagcagaagcgctggcgtgggatattgctttcaggaatctgaatgagcctagcggacgtgcggtgagaggaatacacgaagaggcctatacttaactgataagaataacagaatctgctctttctgttattcttttgtaacatttctattttaaaatctcaaggattaacgcagattagcatattattgtctgatttgcgttttcttttttataattttgaggccaaaccaaattaaatctatcaaacttttaaaagaccaaacaaatgaatttaaaaaaaatgatgatggcttctgcccttctaatggttgcttgctgtatgcaggcacagacaaaagtgatagcccaccgtggattctggaaaactccgggatcatcacaaaacagtatttcatcacttctaaaagcagattccatcggttgttacggttcagaatttgacgtatggatcgctaaggataacaagttggtggtcaaccatgatcctgtatacaagatgagaccgatggagtattccaaaggtgacgcactgaccggacttaaattatccaacggagaaaacttacccagcctggaacaatatctggaagccgggaaaaactgtaatacccgactgattctcgaactgaaagcacatagtaacaagaaacgtgaaaccaaagccgtacagggaatccttgccatggtgaagaaaatgggactggaaaaccgcatggaatatatcacgttctccctgcatgccatgaaagagtttatccgcctggctcctgccggtactccggtattttaccttaacggggaactgtctcccaaagagttgaaagaacttggcgctgccggtctggactatcacatgggagtgatcaagaaacaccccgaatggatcaaagaagctcacgacctcggcttgaaagttaacgtatggactgtggacgaagtggaagatatgaaatcgctgatcgaacaaaaggtagatttcatcaccactaacgaaccggtcatcttacaagaagaacttaaaaagcttcaataagataaaatcattacaaagtaaactttttaatatccatctttaaagaaacagctcgtttcttttaaaggaaaaatgagctttcataacaaactaaatatcaacacattaagaacacccattttttcatctgaaaaagaaaaggtcattttcatatatgccaataaaagattacaaacgatttactggaaatcatctaatacctctttcaactcttctaccgtaagctctcctacctgcctccataattcatgccccttatgcaatagaaggaaagccggtactgtttctacattatgcgcatcggcaattgttctattctcttctgcattcactctaatcaattccacagttctcttttcgtaagttcgaagcacaggccctatccactcataatgaggggaccaatcggcatagaacaccaccaacaccagatggttggttttaactgctgtttctaattgtttctctatattcatatcgctacgtttttatattaatgatagtgctaaaacaatgaatacagaaaaaggttcttcaaaacacaccgcgaacaatatgatagagaaataaggattttcactttcatatcgtcaaaagaaaaagaatatatttcttgtttttataactggttttatggattatcagaactaaatattcttcatatattatgaaagaatatacaaagcaattcgttcaaataacagtttattaatatatgaatatatataattccaaattataactaaacatagccgtatgaaaggcaattataagttcacagaaaattaatagagattagacatacttttcaataaaatataaagcaaaaagtcatatctttgcatcgtaataaaacaaaaggatataacaatcaacaaataccaatcaaaatgacaacaagaattaagttcactaaaatgcatggagcaggaaatgactacatatatgtagacacgaccagatatccgatagcagaccctgaaaagaaagcgatcgaatggagcaagtttcatacaggaatcggaagcgatggacttatattgattggtgtctctgataaagcggatttcagtatgcgtattttcaatgccgacggttcggaagcaatgatgtgtggcaatggtagccgctgcgtaggcaaatatgtatatgaatacggattgaccgataaaacagaaataactttggatacactatcgggaattaaaattctgaaattgcaggtagagggaaaaacagtcagtacagtcaccgtagatatgggcagtccgcaagaaacaggagagattgattggggaaagaaatatcctttccaatctactaaagtatcaatgggtaatcctcatcttgtcacatttattgatgacattacccgaattaatctgccggaaatcggtcctgaactggagaatcatcctctctttcccgacagaacgaatgtagagtttgcacagatcgtcggtaaagacaccatacggatgagagtatgggaaagaggatcgggaattactcaagcttgcggaacaggtgcctgcgccacagcagtagccgccttcatcaacggacttgcaggaagaaaaagcgatgtgataatggatggagggacagttaccatcgaatgggatgaaacctccggacatatattaatgaccggaccggcaaccaaggttttcgatggggaaattgttgaagaagttgagagttgagaatggaaagttgagaatgaatagtaatagaaacttaaaacaataacaatatggcattagtaaacgagcattttttaaaattaccgggaagttatttattctcggatatagcaaaaaaggtaaatactttcaggataacgcatcccaaacaggacatcatccggctaggtatcggcgacgtcacgcagccacttcctccagcctgtatagaagcaatgcataaagcggtagaagaactggccggcaaagatacattccgcggatatggtcctgaacagggatatgattttctgattgaagcaatcataaagaacgatttcgctccacgcgggattcatttctcgacatccgagatttttgtcagtgacggtgctaaaagcgataccggaaatataggtgatattcttcgccacgacaatagtgtaggtgttacagatcctatttatccggtttacatagacagtaacgttatgtgcggacgcgccggagtactggaagaagaaacgggtaaatggagcaacgttacttatatgccttgcacaagtgagaacaactttatcccggaaattccggacaaacggatagacatcgtttatctctgttatccgaacaacccgacagggaccaccttaaccaaaccggaactaaaaaagtgggtggattatgccttggcaaacgatacactgattctgttcgatgccgcttacgaggcatatatccaggacgagaatgtcccccactctatctatgagattaaaggagctaaaaagtgcgcgattgaattccgtagtttttcaaaaacggcaggatttacaggagtacgctgcggatataccgtagtaccgaaagagctcactgccgccactctggaaggcgatcgcataccactcaacagattatggaaccgtcgccagtgtactaagtttaacggcacttcttatattacccaacgggcagcagaagccgtttacagtgcagaaggcaaggcacagattaagaaaacaatcgactattatatgaccaacgcaaaaatcatgaaggaaggcttggaagccacaggactgaaagtatacggcggcgtcaacgctccctacttgtgggtgaaaactccgaacggactttcttcatggcgattcttcgaacagatgttgtatgaagccaatgtggtcggtactcccggtgtaggtttcgggccaagcggtgaagggtatatccgtttaactgcgttcggcgaacgcaacgactgtatcgaagcgatgagaagaataaagaactggctctgactgaatgaataatggatagcgggaaatagaaagttcaacatgcccccattaaacgaacatcatcattcctgcaggatcagttatccataatcagttatccataaaaaacgatagtattttgcgcgctactatataacaaatggaccgtacatccacatttttctaacttttaaaggtaaaaagacgatgaaaacgacgattaacaacaaattgggggtaataacagtagcattattactgtcaggacttgtcccgtctacaatgatggcacaagataaggtagaagcttccgttggggcagatttggtaagtggttacatctggcgcggtcagaatttaggcggggttagcgtccagccttcactgggaatctcttacaaaggtttatcactcggagcatggggatcagtaggaattgaatccaaagatgcaaaagagtttgatttaactctcggttattcaattggtggatttagtgtttcaataacggattattggtttgataaaacatatacaggagatgtagatgaatacggaaaggagatttatacaaccaataagtatttccaatatggggcctattctacagcacatgtatttgaagcacaagtgggatatgatttcggtccgctagccgtcaactggtacacaaactttgcaggtgccgacggtgtgaaagaaaacggtaaaagagcttattcttcttacctcgcacttagcgcacctttcaaattgggaggtctcgactggacagtagatttaggtatggttccctgggaaacgactttttataatggctataccagtggattctgcgtaacagacatcagtctcggagcatccaaaaagattaaaatcacagattccttctctgtaccgacatttgcgaaagtaacagtgaacccacgcactgaaggagcctactttgctttcggactaagtttttaagagagagaatttacaatacaaagagcgtatagggattagaaaaggtagttagagtttagattttatcggtttgttgtatggtaacctgctatggctaccgctaccctatacctctttcttttacaggacacactaatatttaaggtatatgaaaaagattgaagctattatccgtaaaaccaaattcgaggacgtaaaagacgctcttctcgaagcggatatcgaatggttctcttattacgatgtaagaggcattggaaaagcacggcaaggacgtatctaccgtggcgtagtttatgacaccagcaccattgaacgaattttgatctctattgtcgtgcgcgacaagaataccgagaaaacagtgcaggctatcatcaaagctgcacagaccggagaaattggtgacggacgtattttcgtcattcctatcgaagacgctatccgcatacgcactgccgaacgtggtgacatagccctctacaatgcagaacaagaacgttaaataagattatactattatggatacaaaatataaaagccatagcttcgtaaagctgtggatagccactactatattcattttgtgctgttttactactgatatgtcggcacaaaacacagctgctgccgatacagttgcagcagttacagaaacaattaccgaagtcgttaccgctcctgccgaagaaacatcagcagctcccgatacggttggtgaattagctcttggattgaatactgtatggatgttgcttgcagcaatgctcgtattcttcatgcagccgggatttgcattagtagaagcaggttttaccagagtgaaaaatactgccaacattctgatgaagaactttgtagacttcatgttcggctctttactatactggtttatcggtttcggattgatgttcggcgcaggcggattcatcggaatgccccacttcttcgacctttctttcattgataatggtttgccaaccgaaggattcctcatattccaaaccgtattctgtgcgacagcagctacaattgtatcaggagccatggcagaacgtacaaaattctccatgtatatcgtctacaccatctttatcagtgtactgatttatccgatatccggtcactggacatggggcggaggctggttgatgaacggtgaagaaggttctttcatgatgagtctcttcggaaccaccttccatgactttgccggttctacggtcgttcactctgtaggtggatggattgctttggtaggtgccgccattcttggcccccgtattggtaaatatggtaaagacggcaaatcaaaagctatcccaggccatagcctgactattgctgcactaggcgtattcattctttggttcggatggttcggattcaaccccggttctcaattggcagcagcaaccgaagccgatgctatcgccatctcccacgtattcctgacaacgaatctggctgcttgtgccggtggtttcttcgctctgttggtgagctggatgaaatatggaaaaccttccctgtcattgacactgaatggtatcttggcagggttggtaggcatcacagcaggatgtgacgcagtatctcctgcaggagcagccttaataggtgcaatatgtggtgtcgtaatgatattctccgttgacttcattgacaaggtgttaaagatagacgatccggtaggtgcatcttctgtacatggtgtttgtggctttttaggaactattcttacaggtttgttctccaccagtgaaggtttattctatggctacggtttcgggttcctcggtgcacaaatatttggagcattggtagtaggtgcatgggcagcaggcatgggattcatcattttcaaaacgcttgataagattcacggacttcgcgttccggcacgtatcgaagaagaaggtcttgatatttacgaacacggagaatcggcttacaactaatttagtgatgaacggtttagtgattagtgaaagacagctacgcacaacttactactaatcactaccccgctaatcacagaaaaaacttccggacaggtttgatcgcctttccgggaaccacataacaaagtaattatttactctaacatatttaacaacaaatcaaatcaggtattatgtcaaaacttagattcagagtagtagagacagctttcaaaaagaaagctgttgaggtagcaacacctgccgaacgtccttcggagtatttcgccaagtatgtattcaacaaggagaagatgttcaaataccttcccagcaaggtatacaatgcactgattgacgccattgacaacggtgctccgctagatcgcagtattgccgacgaggtagctgccggcatgaagaaatgggccattgaaatgggtgttactcattatacgcactggttcgcaccgctgaccgaaggcacagctgaaaaacatgatgctttcgttgaacatgacggcaaaggcggtatgatggaagaatttactggtaaactgcttgtacagcaggaaccggatgcttcttctttcccgaatggcggtatccgtaacacattcgaagcccgtggttacagcgcatgggacccctcatcacccgctttcatcgtggatgatacgctttgcatcccaactgtgtttatcgcatataccggcgaagctctcgactataaagctcccttgttgaaagcattgcgggctgtagataaagctgctgtagacgtatgtcgttacttcaacccggaagtgaaaaaagtagttgcttatttgggctgggaacaagaatacttcctggtagacgaaggattgtatgccgcacgcccggacttactaatgaccgggcgtactttgatgggacatgacagtgccaaaaaccagcagttggaggaccactacttcggtgctatccccacccgcgtagccgctttcatgaaggacctcgaaattgaagcgttaaagctgggtattcctgttaagacccgtcacaacgaagttgccccgaaccaattcgaattagctcccatctttgaagagtgtaaccttgctaacgaccataacttactgattatgtcattgatgcgtaaggtaagtcgccgtcatggtttccgcgtactgcttcatgaaaaaccttttaagggcgtcaacggatcgggcaaacacaacaactggtcgttgggaactgacacgggcattttattaatggcaccgggtaagactccggaagataacctgcgttttgttaccttcgtcgtaaacacattgatggcagtttatcatcataacggattgctgaaagcttctatctccagcgctaccaacgcccaccgtctgggagctaatgaggcacctcctgccatcatctcctctttcctcgggaagcaattgtcgcaggtattggatcacattgaaaacagtacgaaagatgatttgattagtcttagcggcaaacagggaatgaagttggatattccgcagattcccgaattgttgattgataatactgaccgcaaccgtacctctccttttgctttcaccggaaaccgttttgagttccgtgccgtaggttccgaagcaaactgtgcgtctgccatgattgcattgaactctgccgtagcagaccaattggtgaagtttaaaaaagatgtggatgctttgattgaaaaaggagaacctaaagtgtccgccattctcgaaattatccgtggatatatcaaggaatgtaaagcgattcattttgacggcaatggttacagcgacgaatggaagaaagaagccgcccaccgtggcctggattgcgaaaccagtgttcctgttatcttcgataactacctgaaaccggaaaccattgccatgttcgaagctaccggtgtaatgacaaagaaagaactggaagcccgcaacgaagtgaaatgggaaacgtatacgaagaagattcagatcgaggcgcgtgtattgggtgatttggctatgaaccatatcattccggtggccactcaatatcaaacggatttaattaataatgtctataagatgcaatctcttttcccggcagaaaaggcagcgaaattgtctgctaaaaacctggaacttattgaagagattgccgaccgcacagccttcatcaaggaacatgtagatgcaatgattgaagctcgtaaggttgcgaacaagatagaaagcgaacgagaaaaggccattgcctaccacgacacgatcgttccggcactggaagaaatccgctaccacatcgataagttggaactcattgttgacaaccagatgtggacgcttccgaaatacagggaactgttatttgtgagatagagaaaaagaacggtgaacgataaatggtgaacggtgaaccaattgcactgcaacgcatttaccgtttaccactcacagttcaccgttatgaaattatctatttcttttgttggttgttttaagtttgcggggaggggtgctgtgaagcagtcctcttcttttttattcaacaggataaaattcatttttaactaactcataaaaagccgcaatcaacttttcttttcgaggatgggaagaacttaacaagatagaaacatataattgatactcttcagtagtagccgaagcatcaaattttagaatatctttggttttaaaattagtataccaccgactaaacaatctatttcttttattttcttttccatcaatattatcgcatacaagaatcattgctctttctttactttgaaagaattctcgtaaaatcgtaacaattgttgccgctatctttggatcaataggatgaggagttgattcttccggttcaaaattaaaagtatatacttcgtcaaaatccgggtgatatacagagtaatcaacaaaataagcgatgtattttacaccgcttatcgttataaatgagtagttccaatctgattccttacagaattcatacgggagttgagaatttgatgtcacgctctttggctatttttttcaagtctccaccctcctgtatacatttccttatcgctttcttgtcctccaatactttttgaaagaaagaagaagatttgctttgtttcttttcaggcttcatacatttgtttttattataccacaaagatactctttttcagagacataacaacattacctactattttttatttttattcgattatctttgcatcctcaatatcatcatcgtcatgtaccaccggagtcttcggacgacgacgggtaaacttgaaccagttgattaattcggtaagcgaataaaccaaactactcacaccaataattataaatgcagtattacgtgctcctgtcggattaaacaaagcgatgatacccgcaataagaatcaatgaaggaaccaggtaaaacgctcccggaacgggcatccaccgacgtgccatcgataaagaagcaatctgttgcactcctcccattatcaggataaatcccaataaaaacatcagaacatctgcaaagaattcaggcatcacaatcaaccaaagtccaaataataaactgccgattccttctatcgggaaacggggagccgcttcaccttcctgtcttttccggccgaaatagccaaaaaggctgataacaccgggaatcaaaaaggcaacaccaactgtaatgacaatatagctggcagccgcatttggccaaataacgagcaccaatcctattacaagtgcaaagagaatacgaataagggaataattcattgttttcataaattctatattttttaaccgggtctgtttcaatacttttgcgaatataagtgtttctactgatatataaaaataacaaataaacattgtaataagttcgtaataatatcattatgacgattacatctcgcattgatatttctgcagaaaatttaaacagttctctttcagtatgaaacaatataagttgaaaccggaccgggccgatgttattgttcctaccatcggactgtccgacggtatcatcgatagtctgtacacgcaaaatatgaacaaggtttaattctctacaatcttgatgcatcaatacacaaagctcctgatactagtgtatattcaaactttgtatcgggagtttttgtctcatcttgctataatgcacagattcgtccttaaagagataaatattcgaattttgttctttatatttgtgcaactatatatttgaaataagatggatataaaacttagaattgagcaaccttcggattataatgaaaccgaaaatgtcacacgggaagccttttggaatcatttttctccgggatgtgacgaacattatctcctccatatcatgcgtaaccatccaaagtttgtaccggaactcgatattgttgcagaacttaatggcaagattgtcggcaatgtggtctgctttaaatcatttatcatggcggatgacggtaaccaatatgaagtattgagtctggggcccatttctgttcttcccgaatatcaacagaaaggtattggaagaaaaatgattgcgctgaccaaagaacgagctttcgatatgggatttcgtgccattttactttgcggtgatccggattattacctccggcaaggattcattcctgctgaaacattagaaattcgcactgaagataatatgtatgccacagctcttcatgtttgtgaactgtatgatgatgctttagccaacgctaaaggacgctatatagaagatgaaatatatcaggtcgataaatcagctgctaatgagttcgataagcgattccctccaaaggaaattatagttggcactccgtcacaaaagcgattcgatcagatagtagtgatgcggagaaaagcgatttaaggttgaataaacttaaatcgcttgatttgtacattatagaagttctatcgtgctatgccatcaagcaactattattcaacatagctactattctttgtctcttcatagttacaaagcattaaaatatataattgggatagagagaaaaaatgccttaacaattgatgaaacctatcttataaaaactatagtttacaaaaagtcaccattgacactttgtaattcttaatctagcaggaatcgtttctttcctcccttttattgtaataaagagtttctgccactgtagaggaatttgctcaaatcgttattctataatcaggcacgatatatacactttttgatacatcatcaaaacatttaccaccaaaagagagattatctataccaataaagttcccttttattcttttctatttatcattatcaaagaccgaaatagaaaaatcaatggaaggaaagtagaaaatactaacaatatttacgacatagcgacactatcccaatggtttgcttactctatccatagcttttggtgacattatccgcatcttttgcttactttatccttatgtttttcacaaatataacgatgcttttccgataaaaacacggtgcttttgtacaaaacaagcaaaattttcagcattttaaaggtttttgcttgctaacagagagaaataacaaaacatgtgagatagcaaaatccctgattacacaaacaatcgtcagtataatcagggattctaaaactttatgtaaaaagtatagagatgacgaaaagtttagtactgaatcaccttgtcactactaacagtcttataccaatctgtggttgagctctgatcgtgtgcccaatctgcaaatttagaatatgcattcgttatcactgttgtttctgttggataagcaaatttatcaggaacgcaaagagcccaagtattattaactgccttgattacttcgagcacttcattatctgccaattgcccattcgccgtagacgaattaaaatgagtcaaatggatttccgttctcttttgacctatcccctgataagcaatgaagaagtctaaatcatctgtcacactagggacagatattgcattcttaagtttgacgttcacttcaagagtgtatatatcggtcagaggggtactagcattccctgtattcaacatgggacgttgtgttcctgtatatccatatatataatgtgcgtctccaaacaaaggaatcacaagttcattaccattcgtttcataagatgcattttcaaatattccggaatttaatgagccagtacgttgagcggcacctgcaccaaaatttacctcttctacattatttttgtctattcctcgtattctcaaaccagcacctaattgtttcacggcaccaaccgcccgaaggtcgattttatatttcagttctttcacgtcattaccggctgcaggcaaagttacattcaacacaatatcattgaaatcgtaatcgcctgctttcggatagttatcttcgaaagcataagaataaaccgcatatcggatctctacattatccggttcttcatcagagttatatccttctttaatacagtcaccgtcagcaggaagtataaattctgctttacccgggttacaataggtagcaccttgctgcaatcctttatttactaaccatgcaaaaggagaccagtcatagtgtgcttcgcctttatatgtttgatctgttatctcacaaatgatattattagttactttagaagtagattgagccaaaccggcagtattgtctattgtgtgaattcttaataaggcagttccttgtgtcggaccggtaactgttctgaataaattagctttgcccgtacaagtcaacatggattgcgcttccatcacgatattattatcatttccattacccgtcaattctttgcaaatagcttcggaagtatttcccataacaagtgtaccaaattgtaattttcctgccttcagataacaaccgtttttaatattagtattgttgttaccatctatattttcaacttcaatcgttccatgatttatcaatgtggtaccattggtagaagcattataagaattcaatttaagtgttccataattcacaaaatcaactccacttccacctccatcaattttcaaaaagtcacaatcaatcgtaccggcattatagttcgtacgcccggccgaactatttgttatctgaatacctctgtcgcctacaatacttcctccctgcatcacagttatataagaagcttgagttaataccaggctcccatttttagtgacctctatctttccaccattctcaactataatttctgtgatattagaaaattgattactattttctataacccatgtgcttccttgaggaacaattactttcacaacttgggctccgccactgcttccagtggtagttaagcctccactaaaagtaccattcggaatcttaaaccaacgttcttgttccttgaatacaggcaaattagcatactcaaaccatccgaaacctgcccccaaatcccaaccgtttttaacttcagtagccgtcatttttttatcactaataaactctgttgtataaggagcctccataacaggtatactagtcgccacagctcgtgacatagaacgtgttggtgtacctttgtctccaaaatgcgctgtcactgtgccattttcaatcgctgccggttgaaccagatagcgtttgtgctcatctatgcgtgcaacaaacaccttatcaagcgctgttgcacaatccatcaccacattcaaagtcgtactttgattgacagttccttccgctaagagttttgctgtacttcccggacttaatggatcggcatcaaatatttgtatcttataatctactccctgatctccattaactgacacatgcgctgtcacacttcgtgacactgtccaatcaccatcaggatcgatgttttttacaggaaaagtttcttcgtaaatttgcttcagttgatctgcatcaaacagatttttctcattatcaacacaactgataaaactgatggaagacgccaacaacgagaaagtgaatacttttgcaatgttctgtttcataatcttttaatgctttagtttgttttatttgcgaaaaacataaatcactactaatcaataatcagcaatgaacgcacaaagataattgtatttataaacattatacagattacattgcattttccgatttgcagttaacatcttttaaagcacctcactctaattatttatattagaagacagttagttatatcgttgaatataaaaaaattaacactctttattcaatagtatacagcaaaaaaagagttgcatggaaatatgcaactcttcatataaagacaaagattcagtgctgcagagcactacaaaatctctatttttttcatctcccccattgacaaaataaaaatcaaagactaaaaggggaaaatcaatggcaatacaaaaatcatcacgattcccataataatctgcaacggcaatcctacttttacataatccataaaagtatattgtccggcaggcatcaccaaggcattaggcggtgtagaaaacggagaagcaaaacacatacttgcacctaccgtcacggcaaacaagaaaggaaccggactgactccaatctgtatggcactttgcaaagcaatcggagcaagcaaaacagcggtagccgtattactaataaacatcgtcatcaacgaagtcgtaaaataaatacctgccatcaatgcaatcggtccgtatgatcccaaaccgttcaccaatgtattggaaatatattccgaagctcccgttttctccaatgccagagacatagggagcatggcagcaatcaatacaatactttcccagttgatcgttttataagccgcttccacattgcggaaacatcccgtaagtaccatcaatatacccgctatcataacggctgtaaccggagctaccggaatgaaatcaaaaaccatcattgccaccattaacaccataatagcagctgctaccggagctttgtaatctaacgtaactttagctgcttccgccaaaggttgtcccaaaacaacccaatcagcatcttccttactaagacgggctatattattccatgttccttgcaccaaaagtacgtcaccactatgaatacgctcatttcccaaatcctgcaataaatattcctttttacgacgaatccccaatacgtttacattaaacttatcacggaaaccagcttctttaattgtctggtttatcaaattagaagatggcatcaatactatttcagcaataccgatatcataaaaatcaagcgaattagtcgtactttttgtttcttccgttgcatggtcgcccaaaatctccaacaggtaatcttccgcaaagagttgcaccttatcaaagtctccagtcacatacaaaatatcctctacttctaacatcgtgtccggtgcagcaaacttttgagtaatcgttttcagaaaacgatgttgcgatgcatcaccacggcgaacttccataatattcagaccatatttacgacgaatatccaaatcgattattgtcttccccaaaagccgtgaatcttttatcacctgtaaacgaaacaagttactggagagtccatattcattaaccaactgtttcaatgacttgcccgaacgtttattatcatctttctggccttttttagaaagaaaccatttactaagcggcatcagaaccagtgtaccgacaattacacagacaatgccgacaggcaggaaagagaagaaagaaagcggctcaagtccggcagaagtcaatgtattctgtatcacaaggttcggcggagtaccaatcagagtcatcatacctcccatactacttgcaaaagccaacggcatcaacagcctgctgggattcatgccggcactcatcgccagactaacaacaataggaagcatcaatgccaccgtacctgtgttactgacaaatgcaccaatggcagaagtcaccaacatcaccaatagaaacaaccggatctcactggttcccgcaagtttaagtattcgtgaactaatcatttttgccagtcccgtttggaaaatagcccctcctactacaaacaatccgatcatcataatgactaccgaattggaaaaaccggagagtgcctcgtcaggagttaatatctgaaaaacaagtaaggctatcagcgcacatagtgccacaatatccgaacgaaccttgccgttcacgaaaaagacagccgaaagaacgagaataataatggttattagcatacgtaattaaatgattgttttattttgactctatcaaaactaatttaggtgaacaaaaatagaaaatactccagcgtcattaaaacaaactaggtatgcttaaagtgcaacctctaatatcctgcgagcaacaacacctgttacatttccattctcaccatatttagcaccacgttcattgaagcggcgttcgatttccagaatagtttcctgtccgatgttctcttcatgcaaacgtgtagtcagtcccagtgaacggaaaaattcttcggtacggcaaattgcttcatcaatccgctcttctcttgtaccggaagtaattccccaaactctttcaccatactgcaaaagcttatcccctttttcttcatgaagcacttgcaacgtggcaggaagaacaatggctaacgtatggccatgtgtcaatccgtgcaaagcagtaatttcatgcccgatcatgtgagtagcccagtcttgagacactcccatagcaataaatccattcaatgccattgtagccgaaagcataaaatcagccatcagttgataatcatgctggttttcacgaattttcggagcaatctccaccagagtttgcagaataccttctgcccaacggtccataacgcgactctgtccggaagtagtcatatattgctccatcacatgaacataggtatcagccaatccacaagctacctgatgaggtggcaaggtaaaagttacttccggatcaagaatagagaagattggatagttggcataaaaaggatatttctctttcgtttcgcgacgggaaataactgctccgttattcatctccgaaccggtagcaggcaaagtcaatacagtggaaagaggtacagtatgagttaccgggcgtccggcaagtactaaatcccaggcatcaccatcatacaggattcctgcggaaatcaatttcgtaccgtcaataacagaaccgccgccaacagccagcaaataatccactttctcttcttttcccaaagcaatcgctttacggagagtttcgatggcaggattgggttcgattccccagaattctaccgtaaaatggtccttcaatgcttcctttacctgatcgtacactccgtttttcttcacgcttccgccgccaaaagtaatcataatacgtttgtcggacggtatttctttagccagccaggcaatcatcccttttcccatgattagtttcacgggattttgaaaaataaaattttccatatcttagtctattgttattattttggttattagtcactatccttgcaaagatacatgatttatccgaagcctgtcagaatcaagcaaagaattgttgtgccacggaaggaaccatagccgacaaccagggtttcatatcctctgctaccaataaccaatacaataataatataatgaaaatggcaatagcgatacctactaaaacttttctctgtttcataattgtttttgtttaaatattcaatatttataagaacagttcaggttgaaaattgttctatatcagaaaaatgaaggcaaaagagaaaaaaagtcatattttgtttgctgtttcaaacaaagtgtctatatttgcccccataaaattacaaaagacaatgagaacaatgttagtaaatacatattggtggtggcgcccgttacaactccgacagtcgtaagggagcagtgctcgtatgtatatacctcattaaagatataacaaatttgaaagagccctgtcgcaacctgcgacagggctctttttatttacccccgtttcaaaacagattcaataataacataaaaatagatataggattatgaaaagttttttagttgaccaggatggctattacggagaattcggcggtgcttacgtaccggaaatcctccacaaatgtgttgaggaactaacgaataagtacctcgaagtgattgaaagcgaagattttaaaaaagaattcgaccagttgctacgtgactacgtaggacgtccctccccactctatctagccaaacgtctttctgaaaaatacggttgcaaattgtatctgaagcgggaagacctgaatcatacaggtgctcacaaaatcaacaataccatcggacaaatcttactggcacgccgcatgggaaagaagcgtatcatcgccgaaaccggagccggacaacatggagtagcaacagctaccgtctgtgcattgatggatatggaatgtatcgtttatatgggaaagacggatgtagaacgccagcacatcaatgtagagaaaatgaaaatgttgggagctaccgttatccccgttacttccggcaacatgactctgaaagacgcaaccaacgaagcgatccgcgactggtgctgtcatcctgccgacacttattatatcatcggatctaccgtaggtcctcatccctaccctgacatggtggcacgtctgcaatctgttatcagcgaagaaatcaaaaagcaactgcaagaaaaagaaggacgtgattatccggattatctgatagcctgcgtgggaggaggaagtaatgctgccggaacgatttatcattatatcaacgacgaacgggtaggcattatcctggcggaagcgggaggtaaaggaatagagacaggaatgactgccgctaccatccaactcggcaaaatgggaattatccacggagcacgtacctacgtcatccaaaacgaggacggacagatagaggagccatactccatttccgccggactggattatccgggcattggtccgatacacgctaaccttgccgcccaaagccgtgccaacgtattggcaatcaacgacgacgaagcgatagaagctgcctacgaactaaccaaactcgaaggtattatccctgcattggaatccgcccatgcattaggagctttgaaaaaattgaagttcaagccggaagatatcgttgtattgactgtttcgggacgaggagacaaagatattgaaacctatttgtcgtttaacgaacagctataaataattagtcaaccatcattcgcaatcaataatcaagcaattatagaaatgaaaacatttaattatactacccatagcaaacaagtgctcggagatatgcatactcccgtcagcatttatctgaaagtgcgcgacatgtatcctcaatccgcattaatggaaagttccgattatcatgccggagaaaattccctgtcatttatagccctttgtcccttggcaagcatcggtgtaaacggtggcattgtcactgccaactatcccgataatagccgtacggaagaaccgctgacaaaaacattcaatgtagaaaaggccatgaaccggtttatcaatcagttccaggtgaccggagataataagaatgtatgcgggctttacggatatacgacgtttaatgccgtgaagtacttcgagcacatcccggtaaaagaaagtcatgatgagcaaaacgatgctccggatttactatacatattatataagtatgtcattgttttcaatcatttcaaaaatgagctgacattagttgaaatgttgtccgaaggagaagaaagcggtttgccggaactggaagcagccatcgaaaaccggaattatgcttcctacaatttctctgtaacaggccccgtaaccagccccatcaccgacgaagagcacaaagcaaatgtgcgcaaaggaatcgcacactgtatgcgcggagatgttttccaaatcgtgctttccagaagatttatccaaccatacgccggagatgatttcaaagtttatcgcgcactccgcagcatcaatccttctccttatcttttctacttcgacttcggaggatatcgtatctttggttcttcgccggaaacacattgcaaaatcgagaacggccgtgcctacattgatccgattgcaggaaccacccgtcgcacgggagacacagtaaaagaccgcgaattgacagaggctttactggccgatcctaaagaaaatgcagagcatgtcatgctggttgatcttgcaagaaacgacctttcacgtaattgccatgatgtacgcgtggtattctataaggaaccgcaatattatagccatgttattcatttggtaagccgtgtcagtggtatgctgaatgaaggcgcagacaaaataaaaacgtttattgacacattcccggccggtacgttaagcggtgcccccaaagtacgcgctatgcagttaatcagtgaaatcgagccacataatcgtggagcctacggtggttgtatcggttttatcggattgaatggcgaattaaaccaagcaatcaccatccgtacttttgtaagccgcaacaacgaactctggttccaggccggaggaggtatcgtagcacgcagccaagatgaatacgaactgaaagaggtgaacaataaactgggagcactgaaaaaagcaattgatttagctgtcaaattaaaaaattaaccgtcccaaatagtcagcctaaaaaataattgctgttgcctgaaaaaagattcccgttgcctaaacgcttctatttctttaggcagaaaagcagaaatagtatttgaacaaccattttacaatgacaataaaaatgaaaatattacttttagataactacgactctttcacttataacctgctgcatgtagtgaaagaattaggggctacagatgtagaagtagtccgcaacgaccagatagagcttgatgaagtagatcgttttgataaaatcatcctgtctcccggaccgggcatacccgaagaagccggcttgttactacctattattaagagatatgctccgaccaaaagcattctgggggtctgcctaggtcatcaggctatcggcgaagccttcggagcacgtctggaaaacctcaaagaagtatatcatggcgtacaaactccggtaagtatcattcgtcaggacctgctttttgaaggattaggaaaagaaatccctgtcggaagatatcattcctgggtagtcagccgggaaggttttccggactgtctggaaataacagcagaaagccaggagggacaaatcatggcaatccgccataaaacatataatgtacatggtattcagttccatcccgaatcagtattaactccgcaaggaaaagaaattatcaaaaacttcttaaacgattgaacttatgaaacagattctatacaaacttttcgaacatcaatatttgggacgcgatgaagcgcgcaccattctacagaacatcgcgcaagggaaatataacgatgtgcaagtggcctcactcatcaccgtctttctgatgcgtaatatttccgtagaggaattatgcggtttccgtgacgcactgttggaaatgcgtattccggtcgatttgagtgatttcgctccgattgatatcgtaggaaccggaggtgacggaaaaaacacattcaatatttctacagcttcctgcttcacagttgccggagccggcttcccggttgtgaaacatggcaactatggagcaacgtcggtcagtggtgccagtaatgtaatggagcaacacggtgtaaaattcaccagtgatgtagaccaactgcgtcgcagcatggaaaaatgcaatcttgcttatctacatgcccctttattcaatccggcattaaaagcagtagctccggttcgtagaggattggcagtgcgcactttcttcaatatgctcggtccattggtaaatccggtattacctgcttaccaactgttaggagtttacaatctaccgttacttcgcctttacacctatacttatcaggaaagcaagacgaaatttgccgttgttcatagccttgacggatatgatgagatttctctgaccaatgagtttaaagtggcaaccagcgatcatgaaaagatttacactcccgaaagcctcggcttctcccgttataaggatattgatctggatggcggacaaacaccggaagatgcagctaagattttcgatcatatcatgaataatacagctacggaagctcaaaaaaatgtagtgatagtcaactccgctttcgctatccatgtgattcgtccggaaaagacaattgaagaatgtattgctcttgccaaagaatcattggaaagcggacgagcattagctacactaaaaaaattcattgaattgaatagttaatttgatttacgattagcaagtctgattataaatataaaaacaaacgaactgatgaaagatatattatccgagattatagcaaacaaacgatttgaagttgacctgcaaaagcaggctatttctatcgaacaattacaggaaggtatcagcgaatctccgactccccgctctatgaagcaggcattagcctcttccgcatcaggtattatcgccgagttcaagcggcgctctccttccaaaggatggatacaagaagaagcgcgtccggaagagatcgttccctcctatgcaacggcaggtgcctccgccctttccatccttactgatgagaagtttttcggaggaagcctgaaagatatccgcgccgcacgccctttggtggaaattcccattcttagaaaagacttcatcattgacgaataccagctttaccaagctaaaattgtcggtgcagatgccgtacttctcatcgcagccgcactagaactggaaaagtgcaatgaactggcagagaaagcccactcgctaggtttggaggtcttattggaaattcacaacactgaagaactatcatatatcaataagaaaatagatatgataggcgttaacaaccgtaatttaggaactttctttacggatgtggaaaactctttccgtctcgccgaacaactcccccaagattctgtattggtatcagaaagtggcatctccaatcctgaaatagtgaaacgccttcggacagccggatttcgcggattcctgatcggcgaaacattgatgaaaacggaacatccgggagaaaccttacagaatttcctgcaagcaatgcaataaccaatcgcctaaaaacagacaaccctatgatcaacggaaaaatcatcaaagtttgcggaatgtgtgaagcagaaaacatacgggacgtagaagcgctcgaaggtattgatatgctgggatttattttttatcccaaatctccgagatatatctatgaacttcccgcttatcttcctattcacgccaagcgtgtcggagtatttgtaaatgcagataagccgacagtcagtatgtatgctgaccgttttgggcttgactatgtacaactgcatgggacggaatcaccggaatattgccggtcactacaagagaagggactgaaaatcatcaaagcattttcgatagccctacccaaagacttgacaaaggtatatgaatatgagaaaacttgcgattttttcctgttcgacactaaatgcgaacaatatggcggttcggggaatcaatttgactggaatatattgcatacatacaaaggacacgtaccttttatattaagcggaggaatccattcctgcagcgcccattctctcaagggattcagccatcccctccttgccggatacgacctcaatagtcgttttgaagtgaaacccggaaagaaagatacagaccggatccgaacattcctaaatgaattaaaatcataattaaaaaactcaataatcatgaatagaatcaatcaacttttcaatagcgataagaaagacatactttctatctatttctgcgccggtgatcctactttagaaggtactgctcacgtaatccgtactctcgaaaaaaacggagtcgacatgatcgaaatcggaatccctttcagcgacccgatggcggacggcattgtcattcagaatgccgctactcaagctttacgcaacggtatgtctttaaaacttctttttgaacaactacgggatattcgaaaggatgtaaaaattccattgatattaatgggatacttaaatccgatcatgcaattcggatttgaaaatttctgccgtagatgtgtagaatgtggtatcgacggcgtcattatccctgatctccctttccgtgattatcaggaacaataccgaatcatcgccgaacgatatggtatcaaggtgattatgcttattaccccggagaccagcgaagaacgcgtgcgggaaatcgatgctcatacggatggttttatctatatggtttcatcagcggcaaccaccggagcacaacaggatttcaatgagcagaagcgggcctatttcaaaaaaatagagaatatgcacctcaacaatccgctaatggtagggttcggaatctccaataaagcgacttttcaagctgcttgcgaacatgcctccggagcaatcataggcagcagattcgttactttgcttgaagaagaaaaagatccggagaaagcaatactcaaattaaaagctgggttgaaatgatttattgatgtggatcagcagtttactctgagtcgttaaatcctctctcacgctttgcctacatcttttataaaaagatggcgggaaatctaaaagaagcaaccatcttttttagatttcccgccacaacttattcatacaaatgaggaatccacaaaattattcgaaaactcatcaatcataaatcacaattatttcatatctttgccaatattttaacagtaattcagcaattatgagagcagagaccccttccgttttgttaatttacacgggtggaacgatcggaatgatagaaaatccggaaactggtgccttagaaaactttaacttcgatcatctactcaagcatgtacccgaattaaaaagattcaactaccgcatctcttcctatcaattcgaaccacctctcgactcttcggatatggaacctgcttactgggcaaaactggtaaagattatcaattataattacgactatttcgatggctttgtcattcttcacggaacggacactatggcttacacagcttccgcattaagttttatgctcgaaaacctaagcaagcctatcatcctcacaggttcacagcttcctatcgggactttacggacggatggaaaagaaaaccttatcacagccattgaaatcgctgccgccaagaactcggacggaacagccatcgttcctgaggtttgcatattttttgaaaatcatttgatgcgtggcaaccgtacaaccaaaatcaatgcggaaaacttcaacgcatttcgttctttcaactacccaccattagcacgggtaggcatccatatcaaatatgagcctaacttgattcgcaaacccgatccgacaaaaccgttaaagccacattatttatttgataccaatgtcgttattctgacgctctttcccggcattcaagaaagtatcgtgacctccctccttcatgttccgggactgaaggctgtcgtaatgaagactttcggatcgggaaatgcaccgcaaaaagaatggtttatccgccagctaaaggaagcgacagaacgtggaatcatcattgtcaacattacccaatgcgcgtccggagctgtggaaatgggacgttatgaaacaggaatgcatcttttggaagccggtgttatcagcggatatgacagtacccccgaatgcgccattacgaaactgatgtttctgctgggacacggattatccaaccaagacattcggtacaaaatgaactcttgtctgataggagaaatcactaaagtttgaaataggagcctattatcatacttatttgattttatttgtttaaatataggtgttattctaaaataatatctatatttgcactacttgtaaattttatgtaacaacaaacttatctataaacctgataacaaaacaagcgacagaaaggtctattcgtatgaaaaagaaaatattactagtcgacgataaagcgacaattggaaaagtagccagtgtatacttaggaaaagattatgattttacctatcgggaagatcctatcaaagctatcgaatggctgaacgagggcaatatacccgatcttatcatatcggatatccgcatgcctctcatgacaggagacgagttcttaagatacatgaaaaataatgaattattcaagtcaatccctattgtcatgttatccagtgaggaaagcacgacggaaagaatcagactattggaagaaggcgcggaagactacatattaaagccattcaacccattggaactcaaagtccgaatcaaaaagattattgactaataccagggctgctacatgcaatattttatttatataggtagagacagcaagacgatagagttgttttccaaattaaatgtaggggtattttatgctgtgccaaattgtagcaaagctattaaagcagtagacaaaatacgtgaaaaatatgatatagctctattttttgaacaagtagacctctccaaagatattgcagatgtccggtatatgcgcaagaaatatccgggactttacatggtacttgttatggattcgttgtctaaagaagaagcggcacaatatctgaaagccggaatcaacaataccattaaatttgaaatgactcatgaagccttaacagacttatcaacttttctcaaacgccgcaaggagcagaaaataaaagatctccagctcaaggcacaaaatatcaaagctttccagttacctttatggaaacgaatctttgatatattattttcgggaatggctatattatgtctttcccctcttttgatatttactgcattagccattcgcttggaaagtaaaggagcagtcatctataaatccaaacgagtcggaagcaactatcagatatttgattttctcaaattccgttccatgtatactgacgcggacaagcatctgaaagatttcaatgctcttaaccaataccagcaggaagaagaggagcccgatatatggggagaagacatcgatacagacatgaatgaagaaggcgatgaagaagaaattcttttagtatccgatgatttcgttatctccgaagaagattatattcacaaaaaatccaaagagaaaagcaatgcttttgttaaactggaaaatgatccgagaataacaaagataggacgctttatccgcaaatacagtatcgacgagttaccgcagctttttaatatcttaaaaggggatatgtcaatagtcggaaatcgacctctcccactctatgaagccgaactactgactagtgacgaacacatcgaccgcttcataggtcctgccgggctaactggtctatggcaggtagagaaaagaggtgaagcaggcaaactttccgctgaagaacgtaaacaattggatatcatttatgccaaaactttttctttctggctggatataaagattattctaaagacagttactgcatttattcaaaaagagaacgtataacttcctttaagtgatggactcttatatctacataatagatgatctggcattcttccttacagggattctgtttctatatttttttgtattatccaccgcttcacatttcagacatatcacataccctaaagctcaaaaaaaatatcgctgcgccatccttattcgtgaaagcagtccccttcccgatttatatgggaaagaatcaccctacgaattcatcacatacaacgatctatatcaaggtatcatcagtttagacaaagaacattacgacttggctcttatcctgcctgatactgcccgcactctgtccccacaactgttggacaagatttacgacgcttatgatgccggaatacaggcaatccagctacatacactcgtaaaaggctgcaagggatttcgtttcaaatttcgagtgatgcgtgatgaaataaaaaacagcctgtacagggcaggcaatacgcaattcgggttatcatccaatttgcttggaaccaatatggctattgatctggcatggttacagaaaaacctgaaaagttccaaaaccaatatcgaacggaagttacttcgacagaacatatatatcgactatctgccggaagccattgtttactgcgaatcctatccgacctctccttatcggaaacgcccccgaaaaatgatctcttatttgctcccctctctattagaagggaactggagtttccttaatcggattatgcagctattgataccctctccgctgaaattgtgcatcttcgtcggtatctatgctttactgatgacagcatataactggatgtcatcatttggctggtggagcatattattcggtttattcattgtatacagtctggcgattccggattatctggtagaagacaaaaagaagaaaaaacactcaatatggagaaaaaaacacttaagcagcgaattaaagaaaactccggtttaaaacaggccgttcaccgattcatcatgcatcctgtcaaaacgcgtcctaactggtggatacgtatcttcggttacgtatatcttaaacgaggtaaaggctccgtgatttatcgaagcgttcgcaaagatctccctcccttcaaccgattctccttaggaagatattccgttgttgaggatttttcctgcctcaacaatgcagtaggcgatctgactatcggagattatacacgaatcggattaagaaatacaatcattggtccggccgctatcggcaaccacgtcaaccttgctcagaatgtaaccgtcacaggactcaatcataattatgaaaatgtggaaaagagaattgacgaacagggtgtcagcacacaagcggttgttattgaggatgatgtatgggtaggcgccaattcagtcattctcccgggagtgactttaggaaaacattgtgttgtagctgccggaagtatagtcactcattccgtccctccctattcgatatgtgccggttgccccgcaaaagttatcaaatcatatgattttgaaacaaatgaatgggaaaaagtagaaaaatcagccatcaataactataaataatgagaatagctacgcaatataccttatataggggattgtgacatatattgagatacactatctttgcagtatcagaattgaattaattagtcataattttattacgtagccacatttaagtaaaaatgaaataggatcctgccgaagtgatttcgtcgggattttgtttttatactgacccgaaatatctactgccccaatattttgccgttttattcacaagcaataaaaaaaacgagttaattctttttttatagaatcactcgccaccgcatcagaaaagccaaaaggcttttccatagtacctcattttttcctgaaaactaatcttcttttttacctctaaaacgtctttacctattgttatcctttttacctaactataaaaactttcctattgaataaaaattttaataccttaaatctttacttaatctaataccttacattttttcttttaccttataaactaacagcaatttcccaattgcattgcaaaggtacgaataatttccgtgtgcgcaaacggttttatattttataacacttttccttgctataagcccctcacatcattcagcgtaaccaacttatttacaatagcataaatagtcaaacccgccgcactatgtatttgcaattttttgctaatatttctccgatgcgtgataaccgtatgaatagataaaaacagcttttccgctatttctttatttgtcattccttttaccacacagataacgatttccttttcccgctggctgagcgcatcctgattttccaaatcttcttcctcagaaggaacattcagcaaaccggagattttcttagacaatctctccaaatcatcaaatatagaaatagactcatcatatttgctcaacaaggaggcatctacaaaagaagtgaccaatgctatcacccgtatcttcttaccggacgtttcctctcggaacttacctatatcgaaataatcaccgaaagccggattgacaatcagcatatcaggacactgcgtccggacacagtcatgcagagcctcgatagaaagcaactctataggttgcactttcacattaggaagacgcttcaacgcagcagtcagtccgccacggataattacagaagtctcagcaattgcaatccggataacttcattatttttcattttccatcatcctcctttccaggttcaaaatagcaggaacaaaaatatagtcctctatcttgcaatgagattccagtccctcctcacaagcataaatatcaaaaagcgccgcattcagaagattctcattggctttggccggacaatatttaataatgatattcttcagttcggtcaacttctctcccacttggtcgtgatgtttggagaatgtactgatctggtagtttttcggggcatttcctgctattagcgcatccacatacttaaatacggttttctcttcataatccatatgtttacgcacttcacgggtatattcatcaaaaaacttcagaataagaaaagcaacatcgtcctgcgagcagtcaatggcttcaatcaatttgcgccggatggcgggaagagaaaaatcaagaaaatagatgtgtgcctgccgcaaataatcaatcaacgcagggatggaaatatcatctttatctccatctaaccgagaaaagccctcagccataaaattaactacaataaggaaagtacggcaatctactccattcagctcgcaaacctcctttaccgttttatctccaaaccctaacgaaagcccgaaacgactcattacctgcaacaaggaataattgtcactgataagatcaatcatcttatcagtcggcttatatttttgtaaattatccatcttacctattatatttagcgggtgcaaagaaacggaatatttcacgaaatcgcaatcaccatttataggtattttgaaccattacaatattctaaatactaattacatattactattttacaatacaagtctaggcaagcttatctttttttcgtaattttgtcgctatcaatttgtaattagcaactcataatttataattaataaaatggcaaacgaactcgaactgaaatacggctgcaaccctaatcaaaagcctgcccgtatcttcatgaaagaaggcgaactccccatcgaagtgttgaatggacgtcccggttatatcaatctattggatgcattcaacagttggcaactagtgaaagaactgaaagaagctaccggactgccggctgccgcttcttttaaacatgtcagccctgcgggtgctgctgttgcggtagaaatgagcgacacgctgaaaaagatttatttcgtagacgacatgaaactatctccattggctacagcatacgcccgtgcacgtggagcagaccgcatgtcgtcttacggagactttatcgcattgtccgacacttgtgacgaagaaacagcacgcatcatcaaccgtgaagtatccgatggtgtcattgctcctgactacactcccgaagcactggagattctaaagaataaaagaaaaggaacctataatgtaataaagatagatcctgcataccgcccggctcctatcgaacataaagatgtattcggagtaactttcgaacaaggaagaaacgaattgaagatcgatgaaagtcttttgaaagagatgcctacgcagaacaaggaaatcccggctgatgcaaaacgcgacttaatcattgccttaatcactttaaaatatacacaatctaattctgtatgttatgccaaagacggacaggcaatcggtattggcgcaggccaacagtcacgtatccactgtacgcgcctggcaggaaataaagcagatatctggtatttacgccaacacccgaaagtgatgaacttgccgtggattgagaaaatccgtcgtgcagaccgtgataacacgattgacgtttacatctcagaagattatgacgacgtactggcagacggcatctggcaacagttcttcactgaaaagccggaaatactgacacgcgaagaaaaacgggcatggttggatacgatgacaggcgtagctttaggatcggatgcattcttcccattcggagataatatagaacgcgcacacaagagtggcgttagctatattgcacaaccgggcggatcagtacgtgacgatcatgtgattgaaacttgcgacaaatacaatatggcaatggcatttacaggcatccgcttgttccaccattaaaaagatcgaccatttttattccatatatccccatttataatgagaaggagacaaatcttccattataaatggggatttcctatttctttaagcccctctatctttgcagcgttacatttaaaaacgaatcaaagatgaataaaattggtgtattttatggttctacaaccggaacaacagaagaccttgcccgtcgaattgcagagaaattagatgtaccatcggcagatgtatttgatgtatccaagctaacagaggcgttagtcaatgaatatgacgtattggtgctcggctcttccacatggggagcaggcgaacttcaagacgactggtacgatggagtaaaagttttaaagaagtgtgatttatcccacaaatctgtagccctgttcggttgcggcgactctgactcgtatagcgacacattctgtgacgcaataggtattctttatgaagatctgaaagatacccactgcaaattctgtggagcaacagatactgcaggctataccttcgattcttccattgccgtcgtagacggtaagtttgtaggtcttccacttgacgaagtcaacgaagatagcaaaacagacgaacgtatcagcgcatgggctaaacaagtgaaacaagaaattagctaatttcaccttaacataaaagaccgcagtaaaaagaaggtataaagatagcagtttaagcgataaccttagcataagtttagctttgtttgtatgtagtttgtctgaggtgaatcgtttctgagaagacagtctcctgatagtagatatactcaaaggaacaggctgtagaagaaacgattcactcaaatacaaacaaggcaacagaatagttattcatgtttcagccatgcatttggcaatacttctttttcacctttttcattcaccagttccacctgcaatacgcctccgttacaatcgaagtaacgcacttctatcggatgaagcccggctttcaaagccttctgcacaataatctctaccggtgaatgtgctccatcattatctcccaacaattcaccgtcaagcattaatgtgctaccgtcgtccgagagaagggcaaatgtatagataccatcggcaggaacttccagatagccagtcaataccagaccgatatttcctttcacctcttcgggaatggataccgattccaccacatactcccctttgacaggagctgcatcaatatccgcacaaagattaccacgaaaatcgtgccatactgctttcaagccgggctgcaaagcagccggagcagtcaccgcctctgcataaggagcctttacatacttggtacgcaccacatccgaaggagaaccatccggacggaaagtgcggaaagcgaaatccgtagtcttcccaacctccaaagcaccgttataaagagctgattctttggtaggcatactgccgtctgtcgtataccgtatttcagtaccgggtaacgggcaagtcaattccacagttgtttcatcaataaatgcattcactttatagaatccctgcaagtcaggcaccctataatttaccctcatcacatccatccgcttaaattgcggaacaagctgacgatagaattcttcgagatccggtttagctgtcggctccgcccaagctatttcactcaacgctatcatacggggaacaatcaaatattcaatgcgcttcattgtcggaatccattcagcccagagattcgcttgcacaccccagatatattccttctgttccggcgataaccgctcgtctgcacacggatcatacgcaagtattttctttactgaattctgatcctgcgcataatcgaaataaaaatattcattcggacaaacaatcactttctgcttttgtgcagttgccgtaggcaatgcatctttcgcccaacttctccaccatgtaatcgtggcatcggaagataatccgtcggataccacttcatcccagcctatgagtttctttccgttggcaaggaaaaatttctccatgtcacgtacaaaccatgcctgaagttcttctaccgaacccaatttctccgtacgaatccgtttctgacaaagaggacatttcttccagttggctttttccacttcatcaccacccatgtgcacatattcataagggaaaagttcaaaaacttctttgaatacattctgacagaactccagcgttgtatctttacccggacagataggagaagagaaagtttccccccacccgattaatccgtcgcacgccaattccggatattgaccgatagctgccaggaaatgtcccggcatatcaatctcgggaatgacatcgatacctctttgcgcagcataggcgactatttcttttatatcatcatgagtgtaataacctccatacagcgtatctccttccacaatgcgtatcttatcttccggaatcaggaaatcggtattatcttcttctttcgcacgtgccatacaggtacgatcctgcgtattgaatttacgccaggcccctttttctgtaagcaacgggtacttctcgatctctatacgccagccctgatcatcggacagatgccaatggaacttattaagtttatacaaagacatcagatctaatatatgcttcacttcttttttattccagaaatggcgggaagcatccaacataaatccacgccactcaaatcgtggcgcatcttctatttgcacgacaggaatagaataattctgtttctctccctgcacttctgtcaccgcaggaagcaactggcgaatagtagtaatagcagaaataatgcccgaatagtcagttgcctctacccgaatatactccggcgtagactcaagcttataagagccgggctttccagcagtatccttcaactgaaaatacatatctacctgactcttatcggtagtgacttcaacagaagacgatatgacattccgaagaatctcctgcaggtatccggtagccggaaacaacgactgatcggaaactccgatcttcatgccatcttttaaaacaaacgagcccgactgctcggtcagactaacgggggtaggcagaattgcaatttcttgcttgacggtaggcgtgcaagaagaaaaaatacaagctgacacaatgagaaaagagctacttagttttttgaacatgcggttaactatttaataaattaattgtcctgtttttaattgaccatctatatataatacaactaaaacgtataaactactaaaaaggcagaaaaagttttttgcgacttcatatcacagactcctattaatgtttatctttgctccccaatcccattacaaacaattataaagagtcacttcaatgtcaagagagaaaatactaatcacaacctcgtggatcagcacaattggcaatgcaatcttgtccgtatccaaaatcataatcggtttatttgccggtagtttagccgtagtcggcgacggtatcgactcggcaaccgacgtcgttatctctatcgttatgatttttacggcacgcctcatcaaccgccctccttcaaagaaatatgtattcggatatgagaaagcggaagggatcgcaacaaagattctatcactcgtgatattttatgccggtgtacaaatgttgctatcatccactaaaaacatcttttcagatgaagtgaaagagataccatcggctatcgccatctatgtcactatattttctattatcggtaaactcttactggcttcataccagtacaaacagggaaagaagatcaacagctccatgctcacggcaaacgctatcaatatgcgtaatgatgttgtcatttcaaccagtgttttgttaggattgatatttacttttatcttcaaattgccgatactcgattcgataacaggattgataatcagtctctttatcatcaaatcttccatcagcatcttcattgattccaatgtggagctaatggacggggtgaaagatgtcaatgtatataataagatattcgaggctgtagagaaagtgcccggtgccagtaatccgcatcgcgtccggtcacgaatgatagggaatctctatatgattacccttgatatagaagtgaatccacaaatcacgatcacgcaagcccatgagattgccgatgcagtggagaagagcatcattaattcggtagataatgtatatgacattctggtacatgtggaacctgccggtaaatgtcagacaggagaaaaattcggggtcgataaagatatggtttgatccatctctacacagagtttctttcactttcctctatcacctatcaccgacacttccaaaagctcttattcatggggatttcagggatggtgacaggttgtttgcaacctatcaccgcatctatcacctatcaacgcccgatcaatcaatgattaacaaggagaaaagaacaggtctctatacgacatattagtttcagccgcttgaaacttttagtttcaaggcttggaacaaagtgtttcccggtgtgaaacaaatcgtttcaccgtttgaaacaaagtgtttcaacgcaggaaacaaaaagtaccgtgccgggaaactatttttatgaccgattaatagctgatctttactccggcaaagaaacttctcggcaaagaaggaccgtaaatataaccggaatcccggttagctcctctgtcaaagtccttctgataagactcaaaaatattctgaactccgccgtttaattgcaaatcaaccgttttgtataacttgaagtcataagccagtttcactcccaaatcaaagaaacgaggtgttctgattgcttccgcttttctttcaggcatttcacccagttcggcattctcggcggtgatatccatacgttgcaccaacatcctgccggtataggttcctgacaaagcaatagataaaggtttgatgggggtacaagtagcagtgaaataaccgtatgtatcgggagtacggaaaatcttcttttctgccggtgcatcgtcatgccacttatgcggttcatcgtaccggctacgttgtaaagttaatcccgcttgtatttgcaggatagaaagataaaccactttaccttccagtgtcaatcccatcactttagcaccggggccattgctacgtgttttcactaatataccatcaccacggtcgtaaggttcgcccaatacaaaaacatcggtcagtcttgtataaaaaccctcaatcaacaaattcgtctggaatgctccgaaacgatgatacatatctgcagaaacactgaaactttgggatttctcttctttcaaatcctttgcgcgctcgatcatagccaccgttccgcccacattttcaatatgcatatcctcatcaaaagcctgcggagcacgaaatccggaagaatagcttaaacgcaggttaatattctgggtaggattaaaacgcaagttggcacggggactaaagatcacattatccaccatattatgcttatccagacgaccaccaatcagaatcccccaacggtcgttcttccattcgttctgcagaaaagcactgtaaatattcaccgtctgatccgtgtgacggttatatccccacatgttatcttttaggcggtcacggttatattcaagccctgccgtgagatcagaaggcataaaaaagcacttgtcaaacgtatgtacgtattgtgcaccacccatagcggttaaatccgttgtctttccataggctttcagaggatcgttacccggtccgtaatagctgtcccggtctgtattggcagccgatgcaaagacacttagacggttcttttcatccgaagagaaataatcgaatttcaaacttccaccatcaatagaatgttgcaactgctccgcaatatgcgcttcgtgaggaggacggttcaacatatcccctccacgacggaattcctgcatgtggtgatattcaaaggtcagtttggaataagtacttgttttcagataagagcggaaacccactgtctgattcttcaatttgggcagttcggtaaatccgtctccgtcataatcatatcccgaccgataacggttctgaccaaagatatacaatccggcacgatgatcgtccgtcaccaatgaagcattcagtgaggtgttgttatcgaatgaggagcttcctcctaaagaagttatggtgtgcgacagctgacccgaattacgtaaaggctctttggtgattatattaatcgttcctgcaatagctgaagaaccgaacaaggcggagcctcccccacgcatcacttctacacgctcaatcatactggcaggaatctgttccagtccatacactccggaaagggcgctgaatacgggacgcgaatctatcagaatttgtgtatatggtccgtccagaccattgatgcggacttgctggaagccacaattttggcaatttgtctccacacgcactccaggctggaagttcagtccttgtgataaagtggaagagttggtggtttcaaaaagtttcaggtcgacaacattcaccaaagtaggagccatacgacgtgtcgtttcactccggttggcagaaactactactccgtcgagagcaatcgcatcctcttctatttcaaaatcttcttccagtgtctttccttttttcagagttacattgcgggtcactgtcttgtaacctactgaactaacttccagtataaaatttccttccggcaaattcttcaaaaaataatgcccggtagcatcggtcacggttcctatggtcgttcctttcagtacgatagtgatgtacggaagatgttctttcgtttttttatccagtacatgacctattatattcgcatcggatttcttcaattcagggtagtccggacgttcagccaatgcgtatgacaagacacagcacaggccgaccaggactaaaagatatttcttcattgtcgttagtcttttaatgttttaattcgaaaaataataataaagggaaagggaagcagcgatcgttaatcgttgatcctaatacataaatactgttccccccaaaagataaactaagcgacaggaggtgctctaagagatattacgcccggacaagaacggtgaaaatgctctatttgcgggcggacaaacaggatgcataatagagataaagcagcaacagagaatgttggtatcaaaccgctgtcggtcaccaacacatgactcaagagatgaattagttggaattcaaccgttgtatggctatgttcgctgccttttttaaatggatgtgaatggacaattgtaaccccgttgaccacatgggagtgagtaaacaaagtgattcctgccatgtacgagataaacagtacaggcagaaaccacttcattatatgtaggtacaattgtttcattcggtcatcttgcacatttattctgtgcacctaagtcaaggtttagtttgtttttgcaaagataaggattgtctccatgcaaaacaatccctatttatgacgattttaaatcttaatcgaattttaataacttatcttcactccggcaaagaaacttctcggcaatgacggaccatagatataaccggagtcacggtcagcccctttgtcgaagtcgttctggtaggcattgaaaatattctgtacgccggcattcacctgcaagttcatcgacttgtaaagtttgaaatcataggcagccttcaaaccgatatcgaagaagtccttcgtattcaccgttatcggtttttcaaggaatcccggaactggttcgtggggaaccagcatcgaaccggtatatgtaccggaaagagcgatagataatggttttatcggggtataggttgctgtaaaataaccgtaagtattcggtgtacgcatcattttctttacagccggagcttctttgttccatacgtgcggttcgctataatggctctgttgcagggtgactcctgcctgaacctggaatttagtcagatacgccatctttccttccaatgtcaatcccatcacacgggctcccggtgcattgtagcgtgtacgtgtcagaattccatccactacctctccgtcggtaagggcaaatacatctgataactttgtataaaatccttctaccaaaaagttaacctgaaacgcaccaaaacgatgataaatatctgccgaggcactcaagctctgcgacctttcttctttcagattatcagccagttcgaccatcgctacattaccgcctacattctccacatgcaagtcttcatcgaaagcctgcggggcacggaaaccggatgagtaactgaaacgaagattgatgttttccgtcggattataacgcagattggcacgcggactgaatatcacatggtcaatcaggttatgtttatccaaacgaccgccaatcaaaaatccccaatgttcattcttccattcattctggaggaaggcactaccgatattcactttctggtctaccgtacgattatatccccacatattatcttccagtttatcctgattgaattctattccggcagtcaggtcggacggcatgaagatacattttccgaaactataaacatattgcgatcctgccatccagttcaagtcggtggtgtttccgtaagcattcaagtcttgaccgccaccataatagctgtcacgattgatatgctgcgctgatgcaaacacattgaaacgatgtttctcgttaggagagaaataatcaaatttcagtcctccgccattgatagagtgctcggtctgctccgccacattcgcttcgtgaggcgggcggctcaataggtctcctcccctacggaattcttccatgtggtgatattcaaaagtcagtttcgaataagccgttgttttcaaaaatgaacggaacccgactgtctgcccgtgcaacttgggtatttcggaatatccgtcaccatcatggtcatacgcagaacgatggcggttctgcccgaaaatatacaaaccggcacgctggtcgtccgtcacaagtgatgcattcagtgctgtactgttgtcaaaagcatcaccatcaccaatacctgttatggtatgcgacaacataccggaattacgtataggttctttggtaatgatgttgattgttccggcaatagcagacgaaccgaataaagcagatccacctccacgcatcacttccacacgttctatcatgctggcagggatctgctcgatgccatacacaccggaaagtgcactaaagatgggacgggaatcgagcaggatttgcgtataaggaccatccagtccattgatacgtacttgctggaagccgcaattctgacaattagactctacacggacacccggctgaaaactcaatccttgcgccaaagtcgtggaattggtattctcaaagattttcaaatccaccacattcaccagcgtcggagccaggcgacgggtagtctcattacgattggcagatactactacaccatccaaagcaaccgcatcttcttctatctcgaaatcttcttccaatgtgcgccctttcttcagcgtcacattccgtctgacggttttataccccaccgaactaacttcgagcacaaaattaccttcgggaagattcttcaagaaataatgcccggtagcatcggttaccgttccgatggtagtacctttcaaggcgactgttatatagggtaagtgttccttagtgtttttatcaagaatatggccaatgatattggcgtccgatttacgtaattcaggatgattaggatattcatgagcttgtccttcaagggcaggcaacaatgcgcagcacaggcagacaagcgaaaagatgtatttcttcattttccgtttgttatttgttttcgtttaatacttgtatgtacatatagataatcccctgcctcaaatgagacatggtaccatcatttaaatggcgaaaagacaaatagcaggcggagcacgcagtgctgtcactccatgataaggagcatgaaaatgtgtatgcggcaagcgtccgagcagcaaacacaatagaaaagaaacgaaaaggggaagggcaaaaacaacagttgcactatccgctatcagatgagacaggatatggatgtgcaacaattcgactgttgaatgttgatgcgccgtcccttgcttaaacgggtgcgaatggacaattgtcacgccattaaccacatggacgtgggtaaagaatgtaatacttgccaaatacgatataaaaagtatcggcaagaaatagcgtgttatatttaaaaccaatcgtttcacctcattttcactttgggacggcaaagatacaaactatttatttcacaatcaatgattagacaaaatactgttaatataccgccgaagctatgatttgtataaacagaatcaaaaataccatagcaatcggataaacagtcgcgtaagctacactaggtatgttgctgtctaccattgaatcggcagcagcaagtcccggagtactcgtcatgcctcccgttatcgttcccagcaaatcgagcagactgattttaaataccagacgtccgacaatggcggcaacgagcatcggcaccaatgtgatggctgcacctacgccaaacatcagcaatccgctttcctggaaagtggctaccagattcttaccggcagaagttcctacttcggcaagaaaaagaagcagacctaactggcgcagcaattgattggctggtccggacatagaccagatgatgggacccgtcttaccaatcgcactcaacacaagggctaccatcaacactccaccggtcagtcccggagagaatgacagactgtcagagaaagatatatttattttgccgaacagcactcccaatacaatacccatcgcaatggggaagaaatccgtatcagacagtttcttcgcattgttacccagcaggcgggctactcctttaagtccttctttctcaccgacaaccatcaatttatcgccaaacttcaaagcgagatcgggagatggagacaaatcaataccgcttcgacggacacgggtcactgtacatccaaagtttttctgtaagttcaaatcacccaactgcttatttatcatgtcctttttggtcaatagtaaagattctatttcctgcgttttatccaaaggcaactcaccttcttcacgcttgccaatcaacacggcaagctgattcaacgactcttcgctacctacggcttgtatataatctccttcacgcagcaccgtatgggccgtagggatggatatttcatcattatgtttcagacgtgaaatgacagcgcccgtcatggcgcgcgcatttatctgcatcagagtacgattgaacacatgagaattggtaacccgataaatgcaagtaatcagctccggaaattgtccacgacgttctatctccaagcggcgggcttctttatccaaatctacccgcataatcttaggcagcagtttgacaaacagaatcacgccgatcactccaaacggatatgcgataccgtaagcgatggacgccaaaggagaatgggtactgtcgatagcaaccgccagacccggagtactggtcagcgcaccggcaatcagaccgacaacgctcggtgtatcaatatcaaatgcgtacttcaacccgactgcagtcaagcaggcagaacaaataataagcatagtaataagaatgagcgtctttcctttactacggaaagaatcgaagaatccgggccccgcttgaataccgatggtgaatatgaagagcaccaaaccgaagtttcctaattctttaggaataataacaccataatgcccgaaaagaagggcaatgaaaataactgccgacacatcaagagataatcctctgatctttattcttcccagcataaaccccaacgcgactatcaggaaaagggagaaataagaggaatgcaataagtcagtaaacataaaaataaaggttagttagttaagggcgcgaaggtacggattttatttaagccgtacaatattccttctcacaagaagcgacttcctcacttttaatacctacatataactaaagcttggttatttttcatttcttttaggtattttccatccttatagttccctataactttgcaaccgaaaattaaacaatcattatctatcaaaattaacagagtatgaaaatcctgaacttttggatggttgcctttatggcactgtcactctcaacaacattgacgtcttgcagcgatgacgacgaaaagaaagaagaaacagagatgaaaacattgaccgttgacgctactgcttataatcaatgggtatatgtaaatcttaaagatggcaagacccaaaccgtaactatggaaggaagtgatgacgaatctgcagttaccattgactggcagattgccatacatcgctatacggaagtaaaaaccaatggaggctctgttgtaaaaacagatatgacggatatgagcaaggtgactacaattccgacaggcggatatgtcgcagatgaaagtgaacagaacatactcgtcagattcgctatgccgccaacagatgattgctacgtgaaaagccactgtaatactgcaatggtatggaccgaaggttcggctatggctggaacattggcaacaaccaacaatgtgttcgttctaaaatgtaaagacgggacatatgcaaaactccagttcaccgattttgcaaatgcggataatgtaaaagggcacgtcacgtttaattacgagtatcccgttaaataaccaatcatgaaaagaatctttatgatgttattgggtgtcctatccacgttgtatacgacagcggagacggggtacctctacgaaaacaatgagaacgataacgctactacgcggtgtttcaaaggagttgtattagatgaaaacggcactcccctgcccggagcgtccatcgttgtaataggtacgacaatcggtgtcggcactaatacacaaggagagtttacattaagtttaagagataaagggtttcctatcttgcgggccagtttcatcgggtatactcctgtggaatacaagattcaaaacaatgaacacaataacattgtcatacgcctgaaaccgacccaaagctcattggaagaggtcgtcgttacaggtacacggacagaaaaaccgctcaaagatgccccgatactaaccagagtgatcgggcaaaaggaaatccaggctttaaatcctatggatatagagacccttttacagtatgagctacccggtatacaattcaattacaattccatgagtaaattgccggaaatcacttatcaaggaatgagtggcgaatacttattattcttggttgacggtgaacgtataagtggtgaaggttcggatcataaccccgatttcagccgtttcaatatagatgatattgaacgcattgaagtcgtcaaaggagctcaatccactctctatgcttcaaatgctttgggtgctgtgatcaatatcatcacgaaaagcgccaacagaccttttacaggaaatgtaaacgcacgttatggcaataacagtggacaaaaatacactgtttcaggtggaaccaaacaaaaccgtttttcttctttcactaccatatcccacagaagaagagatacatacacaatttctgatgacaaagaaacagaaagaacagtcatcaatccggacggttcaatcaccatcgataaaagtgctaacagcagtaccattcggggatatcagatctgggatgcctcgcagaagttcggttatgcttttaccgaccagtttagtgcggaaataaaaggaacatattatcggaataaacgcgataatgctacggctaatgcaaaaaccaatgatatattttcaaactactcggtaaatggtaaattaaaatatttgtttaatgtcaatcacaggttggatctttcctacatcttcgatagttatagaaaggatatagactattttgtagcaggatataccaaaaagaactacgataacttcgtgcaaacagcacgtttgaactataccggaaatttcaacgaccaacatacatttacagcaggactggaggccaatcttgaatatttaaaacattatatgtttaaagacagtaccaattataaccagcaatcatacgtgttctatgtgcaggaagactggaaaatctccgagaagttcaatctgatagcgggcatacggactgattaccattcccaataccacttccgtatgactcctaaactatcggtaatgtatcggccggtagaactgttaaccctgcgtgtcggctatgcacaaggctatcggacaccgactttaaaagaactgtatgaagaatatgacatgggaggtctggggatgtttaccattcatggtgatgaaaatctgaaagcagagaatagccagcagttttccctgtctgccgaaattaacaaagacatcttttatgcctccatatccggctattacaataaattcaagaataaaattacactagcttatcttgataatattgaagacgggaaaagtatgccggacatgaaatacatgaattccgacaatgctgaaagtataagtatggaagctattgcacgagtaaaaatggattgcggactgatgttacaaggttcttacgcatacgtccatgaaaaagaagaatataaaggatacaatttatccatgacacggcctcatagtttaacattcaatgcatcctttaaccgtaaattcggtaaagtcaatacttccgtttcactgaacgggcagtggagttccaaattacacacatactcctattattccgttgacaatactataactgaatataattactctccacgtactatttgcaccttgaacactagtgcaagttttcctcgcggtatctctgtgggactgggtatagacaatttattcaattacaaagataaatctgccgattatggaatccagttaccacagcaaggtatcggctttatcggaactgtttcaattaatcttgccgatttgttcagactataacgagagttaaactacatacaaagctaaaaataagagaaatgaaaaagaaaagtaaaatcatcttaggtgtatgcatcgttgctgcagctctgatagggatgtccgtatggaatacctggttcagtcctacaaagattgctttcatcaacttccagaccatacaacagggaagtatatcgaaagccaacgacaattcatccatcaaactcagtgaagtatcgctcgacaacctcgaccgtctgaccggttacgacatggtattcatcaacggaatgggtctgcgtatcgtcgaggaacaacgtcaacaaatacaacaggctgccgacaaaggtattcctgtatatacttccatggctaccaacccagccaacaacatttgtaatctggacagcgtacaacagaatctgatacgaggttatctgactaatggaggaaagaccaactaccggaatatgctgaattatatccgtaaagctattgacggtaaaatctcttccataccggaagtggaagacccggcagaaagacccagcgacatgctctatcacgccggactcaccaacccggatgatgaactggagttcctcaccgtggcagattatgagaaattcatgaaggacaaccgtctttataaagaaggagcacgtaaaatcatgataaccggacaaatggctgatgccaccggacttattgaggctcttgaaaaagaaggttacaatgtttatccggttcagtcaatgacgaaattcatgtcatttattgacgaagtgcagcccgacgcaatcatcaacatggcacacggacgcatgggagacaaaatggtggattatctgaaagctaagaatatcctcttgtttgctccgctcaccatcaacagcctggtagatgaatgggagaaagatccgatgggaatggcaggaggatttatgtcacagagcatcgtgactccggaaatcgacggtgccatccgtcctttcgctctctttgcacaatatgaggatgaagaaggattgcgccattcgtatgcagtacccgaacgcttgaagactttcgtatccacaatcaataattatttgaatctgaatactaagccgaacagcgagaagaaggtagctatctactattataaaggtccggggcaaaatgcattgaccgctgccggtatggaggtggttccttccctatacaatcttctggtccgcatgaaacaggaaggatacaacatatccggtctgcctgcaaatgctgaagaactgggtaaaataatacaggctcaaggcgctgtgttcaactcttacgcagagggagcctttaatgactttatgcaaaaaggacatcccgaacttatcaccaaagatcaatatgaaagttgggtgaaagagtcactccgccctgaaaaatatcaggaagtggtggatgctttcggcgaattccccggcaactatatggcgactaacgacggtaaattgggtattgcccgtctgcaattcgggaatgtagtcttaatgccacaaaatgctgccggaagcggggacaactccttccaagtgattcatggcactaatatggctcctcctcatacttatattgcttcctatctatggatgcaacatggtttcaaggctgacgcactgatccatttcggtacacacggaagtcttgaatttactcccaaaaaacaagtggcattgtgcagcaacgactggccggatcgcctggtaggggcagttccgcacttctacatctattccatcggtaatgttggagaagggatgatggctaaacgtcgttcttacgcaactatacaatcatacctcactcctcctttccttgaaagcagcgtacgcggtatttatcgggagttgatggaaaaaatcaagatttacaataactctcaaaaagagaataaagatcaagaatcattagctgtcaaaacgctgactgtgaagatgggaattcaccgtgatttaggtttggacagcattgccaacaaaccatatacagaagatgaaatcgcccgggtagaaaacttcgctgaagaactggctaccgagaaaatcacggggcaactctatacaatgggagttccttatgaaccggaacggatcacttcttccgtctatgcaatggctacagaacctatcgcatacagtctgctggctcttgacaagcagcgtggcaaagcgacagatgccgtcagcaagcatcgcagcctttttacacaacaatatttgacccctgcccgtcagttggtagaaaagctaattgccaatccttcactagccacggatgaactgatttgtcgtacagccggtatcaccgcacaggaactagccaaggctcgtcaaatagaggcagaccgcaatgctccgaaaggtatgatggcaatgatgatggctgcatcggcaaagagtgaacaatccgacgaaaagaaagcaggtaaaggacatccggcatctgtctccaaagagggttctcctcatggtcaaatgcccgaaagcatgaaagaggccatgaagaaaatgggcgccaacatggatcctgaaaaagcaatggaaacggctaagtctatgggagcaagtccggaagcattgaagaaaatggaagccggaatgaaagctaataaagaaaaagctgccggatcttctgacaaacagggaaacagtggaaagcaagaaaagcctcaaggtatggctgccatgatggccgctatgggaaaagctccgaaagaatacagtaaagaagaaatcgaactgacacttgccatcgctgaagtagagcgtacaatcaagaatgtaggcaactacaagaacgcacttctgacaagtcccgaagaagagttaagcagtctgatgaatgcattgaaaggtggatacaccgctcctactcccggaggtgatccgattgctaatccgaatgctttaccaaccggacgtaatatgtatgctatcaatgccgaagcaactcctacagaatccgcttgggaaaaaggtatcgctttagccaaacaaacgattgatacttacaagcaacgtcacaatgattcaatcccacgtaaagtgagttatactctctggtcttccgaatttatagaaaccggtggggctactattgctcaagtactgtatatgctgggagtagaacctgttcgtgacgcattcggtcgtgtcagcgatttgaaactgattccttcagccgaattgggacgtccacgtatcgacgtagtggtccagacttccggacaactccgtgatatcgccgcttcccgcctcttcctgattaaccgtgcagtagaaatggctgcggcagcgaaagacgacaagtttgaaaatcaggtagccgccagtgtggtagaagctgaaagagtgttgaccgaaaaaggtgtcagtccgaaaaatgcccgcgaaatggcttctttccgagtattcggaggtgctaatggcatgtatggtacaggaattcagggaatggtggaatccggcgaccgttgggaaagtgaatcggaaatcgcagatacttacctcaacaatatgggagccttctacggtgacgaaaaacactgggaagtctttcagaaatttgcctttgaagcagcattgaacagtactgatgttgtcgttcagccccgccaaagcaacacttggggagcattgagcctcgaccacgtatatgaattcatgggaggtatgaatcttgccgtacgcaatgttaccggtaaagacccggacgcttatcttagcgactaccggaaccgcaacaacatgaaaatgcaggaacttaaagaagcagtcggtgtagaaagccgtacaacgattctgaatcctacctatatcaaagagaaaatgaaaggcggtgcttctgcagcaagcgaagttgcccagactgtaaccaatacgtatggctggaacgtgatgaaacctgccgctatcgacaaggaactttgggataatatatatgatgtatatgtcaaagacgaatacaaactgaatgtaaaagacttctttgaaaaacagaatcccgcagctttacaggaagtgactgccgttatgatggaaactgcccgcaaaggatattggaaagcttctccggaacaactctccaatattgccaaactacatacagaccttgtcagacaattcggtccttcgggcagcggatttaccggagacaatgccaaattacagcagttcatcgcctctcaagtagatgcgcaaaccgcagccaactacaacaaggaactgaaacaaatgaaacaagccaccctggacggagaagcgaccaaaggaggcatggtattgaagaaacaatctagcgatgccgtacaaaaggcacaggaagaacaaaattctttgaatggaggccttatcgcaggtattgttctggtagcatttgttgtcatgttgctaatacttaaaaagaaacggaaaaagtaatgtaatatggagttaatcattcacatattaatgctgtttatcgtgattaactgcagtttcaaactcagtttctggaaactttggcaaaccgtaatatacagcctgatagccggtctttttgtagtcggcacctggcagtatgctattctccagtcaaagacacagattgctgattatctgcagaacacggaagcattgcaaaacatggctattatcataacgcttgagtcagcactctgcttcggctattgcgtggctttcctgcgcggactttatggtaagaagaatttatggtgggcggaattacttcgctggtatcccagcttgttgctcttccccgtattattctactatctcacagaagctatcttccggttacctggcgtagacttttcagtgacagcctggtcacttgcaggaatagtggttatcactatccccttgttaagccgactgatgaagtatcttgtacccgaagatgatctccgtttggaggttcatttcctcgtcagcttattcatctgtatcctcggattactgaccacagtcaacggaaaaacaacctatgctgccaccgaggaggcactcaactggaaagcgattatcttgtccatcggtctgttcgttgtcctgtttcttatcggattcgcctggaacaagctaaaatggcctttattacaacgtagagaattaaaaaaaagaagtaaaatcaatcaataaaatattatatggaactcatctctaaacttttattctgggtagcgaacagtttacttatacccgatatcattattttgctgtgcctgttcgttcgttcacttattttgatcggaggcacctacaacatgtacatgaccaaacgtaaaaatgacaaagcactggaccaactcattaaagatgcacggatagacgatctgaaagcaactttacccgacaaagacaattcactatatatgggttatctccgcgatctgctctaccatccggccagtgcagattactctgacttcctgataacaaaattcgagaatgaagcagagaaagatgtgtctctttctaaaatgttggctaagataggtccggttctcggattgataggaacattgatttccatgagtccggcacttgtgggactttctacaggagatatctccggaatggcatataatatgcaggtagtatttgcaacgactgttgtaggtttggttattagtgctgtgggactgatatccatgcagttcaaacaacgttggtatgccaaagatgtcaacaacctcgattatgtatcaagagtattaaacgaaacaaccggagagtccaataatgaaaagaaatagaagagtcagcaaattcctcaaagaagaggataccgacccgctaagtgtagtagtaaacttgttcgacgtagcgatggtatttgccgtggcattgatggtagcaatggtgatgcacatgaatatgacggaagttttcggacaggaagatttcaccatcgtgaagaatcctggtaaggaaaatatggaaatcatctccaaggaaggaaagaaaatcaatacttacaagccttccggtcagaaagaggaggattcaggaaaaagaggaaaaaaagtggggatagcctacgaactggataacggtgagattatttatgttccggaataaaaaacaagccatcgaaatgagtcactcattccgatggcctatcccctttaaacacctttaaacaaaatgaaaatatgcctcatatactaactaaactaactaaccctcgaggcatattttaaagaggctgtcgcatcaacctctttttatcatagataagctttcgctctctaatcttatttacgagcttcggcgatataaccgagagcttcttcgcatttggcagttacataagcccagtcttctgctgccaccttatctttcgggaacagtttagagcccatgcctacacagaatacaccggctttaatccatgcagtcaggttttccttagtaggttctaccccacctgttaccatcagcttagaccatggcatcggagccatcaagccttttacaaagttagttccataaacatcacccgggaatactttgcaaagatcgcaacctacttcctgtgcaaaaccaacttccgatacagaaccgcatcccggagtgtaagcaaccgaacgacggttacataccttagcaatttcaggattaaacaacggacctactacgaagttagcacccagctgcaagtacatagcagcagtagccggatcaacgatagaaccgataccgattgccatttcaggacattcttttgctgcgaacttaacgatttcagcaaatacttcttgtgcgaagtcaccacggtttgtaaattcaaaagcacgaacaccaccgtcataacaagcctttactactttctttgcaacttctgcatctttgtgatagaatacaggaaccattcctgtagagccgatcttattcaatacggctattttatcgaattttgccatcttaatttcttattttaaatgaattggtttttcaaactctcaactcttcattctcaactctcaacttatttacctctgtacgcgaccgcttgcgtcaccaccagccaatgcttctacttcttcaacagaaacaagattgaagtcaccattgatagtatgcttcaaagcagatgcggcaactgcaaattcaagggcagcaccctgattaggtttagtcatcaaaccatggataataccaccggagaaagagtcaccaccacctacacggtcaatgatcggatcgatatcataacgttttgaagtatagaattcttcaccgttgtagatcatagctttccaaccgttgtgagtagcagagaaagattcgcgcaaagtagaaactacatatttgaatccgaattctttcatcatttgctggaagatacccttgtaaccttcagcatctgtgtgaccagcttcaacgtcagcatccggtttgaagcccagacaaagttctgcatcttcttcgttaccgatacatacgtctacaaactgcatcaacggtttcatgatagactgtgctttttctttcgtccacagtttcttacggaaattcaagtcaacagaaacagttacaccgtgacgttttgcagcttcacaagccagacgagtcaactcggcagccttgtcagaaatagccggagtgataccagaccagtggaaccagtcagcaccttccatgattgcatcaaagtcgaaatcagcagcgtcagcttcagcaatagcagagtgagcacggtcataaataaccttgctaggacgcatagaagcacctgtttccaagtagtagatacctacacggtcgccaccacgagcaataaagtctgtctttacgccatatttacgcaatgcgttaacagcagactgtccaatttcgtgtttcggtaatttagttacgaaataggcatcatgtccgtagttggcacagctcactgcaacgttagcttctccaccaccatatactacatcaaaagagtcagattgaacaaaacgagtattgcccggagttgataatctaagcatgatttcgcctaatgtaacgactttctttcccataatcttatgttttaaattctaagttattaatattatgaactttcaatttgtcattttacgcctatttctaggggtaacacactgattatttgtctgttaatctattataaggtcaacatcacatatctttcgtgtgcgggcacaaagatacaacaattttcgtaattacaaaaattgttatatatttgtatcgaaaatattaagattattattgtgtgcgagcacaaaaacctatataaataaaggttatcgtatgaataaattgcccgaaaggatcagaatcaaagacatcgcccgtctggcagatgtatcagtgggaacagtagaccgcgttatccatggacgtagcggagtgtcggaagccagcaagaaacgtgtagaagaaatcttgaagcagcttgactaccagcccaatatgtatgccagtgctcttgcatccaataaaaaatatacatttatctgtcttttgccggagcatttggaaggtgactattggacagccgtagagctgggtatccatgaagccattgctacttattcggattttaatacctcggtaaaaatcaactattacgatccatacgactatcattcttttgtcaacgccagcgaagcgatcctggcgcttcaaccggacggggtcatgatggctcccaccgcccctcagtacaccaaagggttcaccgaccggttgcaggcgtcagatataccttatatatatatagactcaaatatcaagaatgttcctcccctcgccttcttcgggcagaactcacgtcaaagcggatattttgccgcacggatgatgatgttgctggcacgcgatgagaaggaaatcgttattttccgcaaaatacatgaaggaattgtgggctccaaccaacaagagaacagagaaatcggttttagacagtacatggaagaacatcatccgtcttgtaatatattagagctcgacttgcacgccgaacgcaatgacgaagacaatgaaatgctggatgaatttttccgttcccacccgactgttaagaacggaatcactttcaattccaaagtctacatcatcggcgaatacctgcaaagtcacggaaagaaagatttcaacctgataggctatgaccttttggaccggaatgtcgcctgtctgaaagaaggaagtgtttttttccttatcgcccaacaaccggagctgcaaggcgccaatggaattaaagccctttgcgatcaccttattttcaaaaaagaagtgacctgcattaactatatgcccattgacctgctgacggtagaaacaatagattattatcataacaaataaaagagatacaactttacaagtacattacatggaaacaaagtatttaagaattaatcctgccgacaacgttgccgttgccattgttaacctcccagcaggagagcatctttctgtagatggcattgaaattacattgaacgaagacattcccgccggacataaattcgcattgaagaattttgctgaaggcgaaaatgtaatcaagtacggttatcctatcggacatgcacgaatggcaaagaaacagggtgactggatgaacgaaacgaacatcaaaaccaaccttgccggattgttggattacacttacaacccgattcaggtttctttggatattcctcataaagatcttactttcaaaggttatcgtcgcaaaaacggtgatgtaggggtaagaaacgaaatatggattatcccgacggtaggttgcgtaaacggtatcatcggtcaactggctgaaggactgcgtcgcgaaaccgaaggcaagggagtggatgccattgtcgctttcccacacaactacggttgctcacaacttggtgacgaccacgaaaatacgaaaaagattcttcgcgacatggtactccaccccaatgcaggtgctgtgctggtagtaggtttgggatgcgagaataatcagccggatgtattccgtgagtttttaggtgaatatgatggagaccgtgtcaaattcatgattactcaaaaggtaggtgatgaatatgaagaaggaatggaaatcctgcgtgatttgtatgcaaaggcttctaaagatgaacgcaccgatgttcctttgtccgaactgcgtgtaggattgaaatgcggtggttccgatggtttctccggcattactgccaacccactattgggtatgttctccgattttctgattgcacagggaggtacaagcgtattgacagaggttccggaaatgttcggtgcggaaacaattttgatgaaccgctgtgaaaacaaagatttgtttgaacagacagtacatctgattaatgacttcaaagaatacttcctgtcacacggagagcctgtcggtgaaaatccttctccgggcaacaaagccggtggtatctccactctggaagaaaaggcattgggatgtacacaaaaatgcggaaagagctatgtatccggtgtgctgccttatggcgaacgattacagaaaaaaggactcaacctgctttctgctccgggcaatgacttggttgcggctactactcttgcagcaagtggatgtcacatggtgcttttcaccactggacgcggaacaccattcggcactttcgttccgactatgaagatttctaccaattctactttagccaaaaacaaaccgggatggattgactttaatgccggtgtgattgtagaaaacgaaccaatggaaaagacttgcgaacgcttcattgattatgttatcaaagtagcaagcggtgagtttgttaataacgaaaagaaaggttatcgcgagattgcaatcttcaaaacaggtgtaactttgtaaacagcccttagccaatacaacaatttataccgaagacaaagatacatagataaaaataatagagttgctaccctctactcaacgataagtagaacaggctagcaactctttttgtatcctctcatatcaaagcctcatcctatcactcaatcacttatgatcgaaatattccggcagaaagtttgttaatcttaaatcttttcctttactttgtatcacaaagttctttttatatggataaagataaagcattagaatcagtttttgagataaaagagttgatggaaaagtcctcaaaatttatctctgtcagcggcatcgccgcaatccttgcaggtatttacgcattagttggcgcatatatcgccacacaagttattacaccgggcactcatttaattgttgcccttgaattgatggctataatagcctcgctcgtattggtagctgctgcggtcactgcttgcatcctgtcctattacaaatccaagaagacagggcaaaaatttttcagccgcctcacttaccgggcattgtggaatttctctcttccgatgctgaccggaggtgttttatgtatttccatccttatgcacgagtattatgacattctggcttctgtcatgcttctattttacgggctggcactagtcaacgtttccaagtttacttattccagcatcgtatggttaggttatgctttcatctgtttgggcgtcgtagactgtttttgggaaggtcattcattattgttttggaccatcggtttcggcggtttccatatcctctatggtatattgttctatttacactacgaaagaaagagatcataaatgatagaagcattccaatatattaataaagcattcgaaagcaaggtccgactgggcatcatggctattctgatggtaaatgaggaagctgatttcaattttctgaaagaacagctctctctgaccgacggcaatcttgccagccatacccgtgccctggaagaactgggatatatcgtatgcaacaaaagttttgtcggacgaaagccacggactgtttttcaggcaaccccgcaaggcagagaagctttcaaatcgcatattgaagccttagagaaatttctaaaatcaaaataaataatttatcaaaacactactggcttatggacgctttcaatgaaaattcaaatgaacaacaggagcagcaacctatgggatgcctccaccgtttctccaaaacaatcaaggttgtcatcatcggattattaatccttctcctgatgatccccatgtttatgattgagaatcttatttccgaacggggacgaacccaggaagaagctatcgacgaggtaagcgaaaaatggagtcttgcacagaccatcactggcccttacctgaatctccagtatccggttgtcactgaaaacaacggtgagaagaaggtttccatcaaagacctgatactttttcctgacgagcttatggtcaacggacaactgaagactgaaatcctgaaaagaagtatctatgaagtcaatgtatatcaatcggaactgacattgaaagggtcattcagttcggaagaattgaaaaagagcagaatagatatggagcaattgcagtttgacagggcagctatttgcttgaatctgaccgatatgcggggtatcagcgaacaaatcagcatcaccttgggagattctgtttatatattcgagccgggtatggacaacagaggaatagctaacaccggagttcatgcgatcgctaatttgtcggagttgaagcagaacaaaaaactgccatacgaaataaaaatcaaactgaaaggttcacagtcactcaactttattccattgggtaaaacaacccgtgtagatctgaaagccaactggaatacaccgagctttaccggaaactatctgcctaacaaccggaatattacggagaaggaattttccgcacaatggcaagttttaaacttgaaccggaattactcacaggtgatggttgacttcaacacctcaaatatcaaggatattgagagttccagtttcggtgtgaacttcaaaattccggtggaacagtaccaacagtctatgcgttccgcaaagtatgctattctgattatcttactgactttcggagttatcttcttcactgaaatcatgaacaagacccgcattcatgccttgcagtatttattggtaggactggcactctgtttattctacagcctgctcctctccttctccgagcacgtcggtttcaacccggcctatttgttatcttctgcactgactattatactggtaggcggatatatgttcggaatcaccaagaaaaagaaaccgtcattaatcatgtccggtttgttggctatactctatatttatatctttgtgcttatccaactggagactttcgcattattggcaggcagcttaggactgtttatcattctggcaatagtgatgtatttttcaaagaaaatagactggtttaatgaataatcggcttttcttctgaaacacttgacaaatggctttttattttgtttctttgaggaaacaaaagcaataagaggaatgaaaaatataagaaaaatatagacataaaaagcctttaaactgatacatttcagtattagtacagatatatcatagggcaatgatctaacgatcattgccctattttgtttatatttttacttaatccattctatagaatctctaaaaatgctcaaaatagtttttaataaactctgataccgtttataataaactatcaaaaagtttattataaacagaaagtacgtttattaagaacgtagtccttaattgtaaaaattgagaaacatgtttgcatacaatagtagctcattagtaagtctatttattcacacagtaatagaaaaggacataatcattatttcatccaaacgattggataacctaaatctcttttgatagcttccatttctgcactatgccacatttcatgtttaaagctccacgacaatgcttcatatttagtttccgcaacaggatgtttaaacgggagaggctgcaagcactctgccaaaacatcatcattcagagtttccagattctcgacacagatttgatgaacaatttccgtttgttctctcaattcagcaactggaatcaagtccttttctatggaacgatgcaatgttcccatgccattgaatattctattatatttttggataggcactaatcgccccaccttttcgttcactccggtaacagctgtcagtgtatggaaattctgcgaaacaagcaaatgtcccacttgccaaataaagttagaatctgttccttcaggaataacataccacaaatcttccggcaattcagacatcaaacgattcacaaatgtgcgagcttctataatctgctcctttaaaaagtcaattttactcataactatatgttttttaattatacatatagttagtggaaaagcaaatgagctttgtgacaacttactgcaagaatttctcccaataatttttcctcggcagttctttttcaaacttcctgtataaatcggcaagcctcatcattcgttgcaccattgtatattctttatccatatcaatagaatataccggtttgcaaatgcgacatttacaagcaccatcgggattatataacgggcaagtatcattcataaaagctgtgattttctgaatggaacgattatagatttgccgcacattactttctttcagttccatgatttcgctaatctgtcgataaggtaacccaacattttctctaaagataaaaatcagacgagcatcattattcagacaatgatttaaagccgtgatacaccagtcacacctttcttttatccattcccgcttctcttcttccccaccggaatattcgatttccggtaacgaacggaaatattcgatttctgacattttcacctgtttttcacatgctgcatatctgccaatagtgcgacgagcgatagtatatatccatgtagaaatctccgaatcacctttaaagctactaatacttttgcaaagttcataccacacttcctgtgctgcttcgcgggcgatttctttattctgaatcatccggtgagcaatcatggaaatcatatttccatattctttcaccagacgattgatatctatttccatcgttacacactaaaatgttttcttcaaatatatcatatccaccaactgcacaccatcctcatacatcggatgatcgtagttgtcagtaaagaaattctttatccggtgagaaatcgcaaaaccacaatgctcatagaatgatctggaagaaggtacatctcctgtgcccaccaacatttcagagcacttcccctgataatattcaaataaaaactctattaaccgttttccgtacccctgtcgttggaagaaaggaacagtagcaatattcttgatttcataaacaccttccccctcacgtgtcaccacacaaagagctttcagcccgtcatcataaagaacaaacatatcaccgcgttccaaatatcggtcaatcatatcctcttgttcatcagccaagagtaataaatcgaggaattcttttttatctgaaataactttttttatctccatattatctagtttgccataaagatataaaaaactaaaataccatactctactttaacgaaacttatcctgatatttggaataaatagattatctttgtctaggaaaataggaatatacaaataataggaatcatggaaaaagaaaaaaaaatatcagaagaaatagaagtcaaagccaaagcgcagaaaccaaaaaaaaagaaagtaaataagacatgggaagcatttggtaaactaaagggaagccttatagtgaacgatcctaaattcttactataaatgagatatttgatagatactaatatctttgtttatgcagtgatcgacagagactcgttagatcgtgatgtaacagctatactacaagagcctgatactgtactttatatgagtgcagaatctgttcgtgaattgattgtaggatatcgaaataaaggtttatgttccaaacgctggaagtcagtagaagcaatggtcacttcaatcgaaaaagagttttacatcaaaatacttcccctgaaaaaagagcacatgcagacttatgcacgattagaaattaatgaagcacaaggacataaagacccttccgaccacgttatcatcgcccatgccattaccgaacatttgccacttatctcaagcgacacccgttttgagttttatcgcactcaaggacttgatttgatattcaataaaaaataaagcacacgctatacatgtatttgtctatgttctaaaatagtactcatattctccaaggcccatcctaccagtccttcaatatgaggaatcaaagtgccccccatatctgtcaggcaatactccacacggggaggcacttcggcatacactttccgctccaccaatccgtctgactctaaagtacgtaacgtaacagtcaacattctttgagaaacatcttctatcgttttatggatatcactaaaacgcatagttccatttgcgttcagcgtaataagcaccagcatcgaccacttatctcccaagcggctaagcacatctcttatcggacaattccccgtcggatgaaagtttttcattctttaacgttttgtattttattgagtttcaacaatagttacctctatgtaacttccttattttcaagcacgttattgcatttctcaaacaagaaagatacatttgcatcacaaaagtaataaacttactaataataactattgtttcatttaaataattatgataatgacaaagaaagttgcagttttagcagtgaatccggtaaatggttgtggactattccaatatttggaagcatttttcgaaaatggcatttcatataaagtatttgccgtatcggatacgaaggatattaaaacaaattcaggaatcagcctgacagtagatgacgtgatcgctaatttgaagggacacgaagatgaattcgacgcactcgttttctcatgtggcgatgcagtgcctgtatttcagcagaatgctgataaaccctacaatgtagatttaatgcaagtcattaaaactttcggagataagggaaaaataatgatcggacattgcgccggcgcaatgatgtttgactttacaggaattaccaaagggaagaaagtagcagttcacccattagccaaaccagccattcaaaacggaacagctactgatgaaaaatcagagatagatggtaactttttcactgctcaagatgaaaataccatttggacaatgatgccacaggtaatcaaggcgttaaaatagacattaatcaagtcctataccacttaaagcaagtttaacataaaaaagggccagagaattcatataatataagtattccggcacatttaatcatggaaatagtttttcaatccgttttttcattacctttgtaactgtaaaggaaacaacctattaaaatatcacggacaaacatttcccatgaatataaaaaaaggcttatggctctttttttatgtttcttatctgcgccatccatccaagcacaaagaaactatatagatattccgaattatattctatgtattaactcttatgccgaatcaacaccatggagtacccgaatgatttcgactatatcagaatacgtacaaaaagccccccaactggctttgtatgccgaacacatgaacacgagacgaatacagaaaactatggggcgatatccccattgtactctgttctgaagaggcgtttcaaggaccacatgaagcctatctccaaaaacaagcaatcaaactgaaagaccgaactccgatcgctcaattctcaaagccatacaatatggctttcttgcactcagaactattaattacactacattactccgcaaaggactttccccttccatgtgtcccgcagatacatattttctacacaaaccactctcgttttgggaactaaacaaatacttcattatgggttctttatcctttatttttttacttgcattatttttcttttaccatattcacaacttgaatattataaaaagtatcattgagaataataacaccttgttattacaacttataagtgatattttggacttatcaaaaatagaagccgggacattggactttaattattccaatgtagagattaacgatttaatgagtgatttagaaaacaactgccaactgaaactaaaatcggacaaggtaaaactggagttcatcgctcccgaacaaccttgttgcgcatatatagagaaaaacagactatcccaattgattatcaattttgtaacaaatgcaatcaaattcacaaccgaaggcagcatccgattcgggttctacattctggtttacattaccttataaagaagcgagtaacataatagaaaaagctccccaaaaagaaatccagaccattgagatagaaaaagacaaactgattatcctggtagccgaagataacgaaagcgattataaactgtttgagtctattttgaaatacgattaccgcttgatacacgcatgagatggacaagaggctgtaaacctattcaaggagtacaatccgcaaatattcggccaaagtacctatcatcgccattactgcctttgcttttgcctcagatgaatagagggtaatggaaagcggctttgacggttatatgcctaaacccatcaatgccaacttattgaaggtgcagctaaaagacatcatgcagaaacgcattatcttactgtaagtaaacttctaataattcagccacatcctgaaagaagccatcttatccttactgacaataattttatctttgaagggaggcaatacgtgtacgattgctttccctaaaaaataggattcaatacgttgaattgcatcaatacagacaagagtctgacgattcgtacgaaaaaaacggtcgggatccagttgctcgcacaatctatccaaagccaaatcaataagaaattcccggttcttatgtgtcaccgcaaaggtatacttattctccgaataaaaataagcaatgtcactaacctgcaaagtcagaagtttctctccactggaaatcagaaaccgcgtacgatactttttatgcgccgacgataaagcttcctgtgcaacagaaagctgctgcaaaacttccatcatccggctttccgaattgaaatcatgaatatttttcttagtcagtccctcaaaacgtcggatagcctgcaacagacgttcttcatgaattggttttagaagataatcaatgctgttgaccgtaaaagcgcgtacggcatattcatcataggcagtagtaaacacaatcatgctttccggatgggcttgttcaataaagagaaacgagttgccatccgtcaactgaatatccagaaaaagaatgtccggatggggatgctgagcaaaccactctaccgcttcctctatattgcccggaagtaactgtacgtcccaaccaggacgcagagacaataaagtgtcgcgaagcagacgggcggccggaatttcatcctctattatagcagctttaatcttattcatagagcaaaggtatttttacagtaaactcttgcgaatcattttctatcacaatatcacgaccgcacaacaatttataccggacagaaagattcttcaatcccgtaccgaaagctgttgcactttttttcgcctgtatccggtttctaacaaccagctctttttccttttccatatagataagttcaatcgtcatcggctttcccatgtggatgacattatgttttatcacattttcagcaagtagctgtatagtcagtggtggaagctggcattccagacaagactccggaatacgattatcaatataaatacaatcccccaaccgcacccgatgtagaaagacataagaattcaaaaagtccaactcctcccgtaaggttgtcagccgttggttttggcattggagcgtatagcggtatacgtcggaaagatgttgggtgaacaattccgcattagcgggattgtaacgaatttcagaaatcaatgtattcagactattaaacagaaaatgaggattcaactgattctgtaaggctgtgtaacgtgccgtattgttttctttttgtaaggcagccgcttcctgttgcagtttcaaggcattccgtatggaacggttggccaacagcaaacctaaaatgaccagttccaccagccataccgtaatcagaatccgccaccctccattgggaaacatgaacggatgggaagctccggccagcagtttagctgttaccagcaaaccgtaattcaacaggaagaacatccccatcacaacgacatagacagatatcaatttccagcgacgatgcagattcagtgcatactgattatccacccacgtactcaaccgcatcgtcgcatatcccaacacgttgaatgccagcacaaagaaagacaatgtaccgacagaatgaaaaatgtcggcaaccttatcgggaaaggcggcataattgatcagcaacagaaaagagaacacacccaatcctgaaaataatgcggtatagaataaggtattaaacttcacattcataatattggcagttcttttcatacaaagttactgttttttaccgataatcatagccatgaagagcttttattaattccgaataatgtccctgagcggcagctttggcctgcacatagtttacctgcgaggtttgccggtaagtctgcgcatcaattacttccaccacagacaccttaccctcattatagcgttccacagctttcgcttcactttcctctgcttttgccaatgaactttcactcaagcgaacacgctcgatagcttgtgacaaagctttccgtgctacacctatctccagctcaacctgatccatcaccttattcagattatcttccgccataccgacacgaaaggacgacgcacgcttctcacttttccgctttccccattcgaagatagggacggacactttagcataaacagcgtaattggggtctaaatcttttttgaaattataaccgggagaagaatagctaccatctattcccacataaaactgcggcttaaactgtgaatcattcagtttcttcgtactctccgctatacggatccggtcataggccatccggatttcaggacgttccgcacctgtagacaaccagacagaatcttcaataacgaccatcggtatctgatcatccagttccgtcgcattttccaatcggactccgatcattgagttcagtgccattctacctgtctcgaagttactttgcgcctgtagcaattgatactccgcttcattcagtttcacctccgccattaataaatcctgcggatctacaagccccacttccaccctttctttgatggtctttaccaaagctgctatcgaattacgaaaatcttcggcaacagatacaacctcctgtcgcgctacagcactccaatattgcatatccgtctgataacagactgcgtcattcagtacctccgcctgattgcttgccaatgattgttgatgtttcgccatacggatagactccaatacacgtccgcccgtataaatcggttgcaaaagagaaagagagcctccataattcaattgctttccttccaccgtcttcgacaatccgatagaaggggcatccaaagtcaactccaacgggttgcctgtatattgaaagttcgcagctcccgaaagtttgggtttcaaatccgcttttgccgatttctctatctccacactagcggcaatattcttctcagccgctttcaaatcatgattataatccaatgccatcatccggtatttctccaacaagggactttgttgcgccataagaggtaaagacagaaaagcgcaacagcagaataacggataaaatattctctttttcatttttattttccttttactttgtagaacatagcatataatgcaggggtgacaaacaaagtcagtcccgtagcaaatgtaagtccgaagataatagtggctgccataccgccgaatgcgacatcaaacaacagcggtaccataccaaaaatcgttgtcgtagccgccatcaataccggacgggttcgggaaaccgtagcctcaacaatagaagtatatagatcaacaccactccgatgttgcacatttatttcgtcaatcagtacaatcacattctttataatcattccgagaagtcccagccagccggctatcggaaagaaaccgaagtcaaatcccgtcagcaacatccccacagcaataccaatgagcgacagcggcaagatgcagatgataataatcggttcacggaaattgccgaacaaagcaaccagaataagcaccagcgcaaggaatgccaacgggaaatatttagcaatggcctgcatcgcttctccctggtccttatattgcgcatcccagaagaaagtatatccctcagggagttgcattttctcaatctcttccctgatttctccgtgtacttccgccattgtatgtcccggcttcacgccacacatggcagccatcgaaagctgacggttgtaagtccgtatctgtggaaattcccaagtcgtttctatacgttccgtcacttgtgaaagcggagccgacctttcaccgttccagatagagaagtcgcctaaggaatgtacatcggtgatgttcacattacccgatttcagaagtacgggaactttcttctcatcatcccggtaaatgcctacaggcaagccgtcattaatagatttcacagactccatcatagccgctttcgtaatccccaaagctccggctttcaccggatcataaaccggacggataaccattgccatatttccccactcatttcgcgcatccgctactttaggattccgtcgcatcacctctatcgcctgacctaccagcgaatcgagtacggccgggtctggtccgagaaaacgagcttcaataaccgcttccgtcaatgggctcaattcaaaattattcactttaatcagaggttcgggatacttgatcgaaattgaatcttgtaagcgtgtgtgtaattggcgggaaagtttcgaagtcttgcacttcaccaatatctgcgcataattggattgaggtccgaaagccacattagacaagtaataacgcggaggtgtcctccctatataggtagataccatttccgcttcttcttgtccgcgaataaagtccgccatctctgtcgccattttatccgtttcttctatctgtgtcccttcgggtaaccacatatcaagcgtgaaatattgtttatccaatgccggcacaaatactttcgggataaatttaaaactccaggcggacaacaccaacaatataaccatacatcctacagtagcatacctgtgatgaattacccatcccaaagaagagcggaacttatcgtaatatttacctgaaaaaagtgccatcttcagttcgtcgggtcttggccgacggacaaactcctgaataaagaaaggtgtttgtgtcagcgcaaagacccaactgaacatcagcgaaacgccgataactacaaccaaggatgacaataactcgccggtaatatgcggcgaataatatattggtaaaaaagtcagaatcgcaatcacagtagctgccagtagtggcaatgcagtcgaagaacaggctctcaatatagctatccgtttacgcattccacgctgcatattgaccaatgccgaatcggaaactacgatagcattgtccaccaacattcccatagcaatgatgatagccgccaatgacatacgctgcaaagctattccttgcaccagcatgactatcaatgtggcaaagatagaaaacactaatccgctaccaatcagaataccatttttgacccctataaagaacaacaggatagcaacgaccgtcactacggaaacaatcagattcaagataaatcccttattcgctacagcggattcatatccttgatcataaattgactgcaactcaaaaccttcgggcattgtctccgaaaattgttttatctccactttgaccgcatctgccatatcgactacattacctgtgggtacagtggaaatagcaattcctatcgccggttttccgtcaatgcgcattttattgctaggcggagtctgataactttcttttatttcagcaatatccgccaatcggaaatgttctcctgtacgggatacaatagtcaaattccgaatatcatccaacgaatagaagtttccggtagactcgatacgtattctgttgacttccgtgtcgatacctccggcatccatcacccggttctgagcttcaaaggcacgggaaatatcagccgtagtaataccacttctcgccatgacggagggactgaggattacatcaatcgtaggagattgcacgccgtagatttccacttttgcaacgtctttcaccttcagcacctcatttttaatcagtttcgcctgatcttcgagttcccgatatgagtatccttctccggtcagcccgtaaaagactcccagcacatcgccaaaatcatcgtttaccactgacggacctgcaccggcaggcaatttagattgcacatcattgacttttcgacgcagtttgtcccaaagttgttgcatctcgtccgcacggatttctttctttacatagactgttattttagaaagtcccgcacgattttcagttttaagataatacagttcccccaacgactgtatagattcctccaatacatccgtcacctgtgattgaacttcggaaggcgaagcccccggataaggcgtcagcaccaatgcctgtttgatagtaaacggagcatcttccagctttcccatcttaacataggagaacagtccaccacccaataccagtagcaatagcagaatagtcaccgacttcttctgcaagaaatatttaacgagtttcatactttcctcttacttttgagcagttaccggcatttcccggttcattatttctatcggagtcccttccgacaggaaacgcagtttgctgacagccaccgtttctcccgcctgcaatccaccttttacttcgacttttccattcgggagtaactcacccaatatcaccttcttctttgatacttttctcgtagcattgtccactgtccagacataatccccttcagtaggccggtgactaagggcagtttgaggtacagtcaccattgcgacagatgaagaagccggaaagtccaacaacatctttcccgaaataccggcaggccattttccctgtttattcggtagcaatgccgtcagcaagaaagacagattattccgggtagtgtttttggaaacctccactacttttgccgaatatacttcctctgtacagacatcaaaacggacacccacttcctttattttttctgcctgaagcgctatgtcctgtgtgacataggcttctattttcaactgggtaatatcaataaaagacaccaccggctgagttgcttttacatcctgaaacttctcgatatagacttctcctacatatccgtcgaaaggagcaatcaaccgggtatcgtccaattcattcgtcgccgtctcaaaagctgtcttagctgaagtgtagtcagcacgcgctttttcataagcactggccgataggttatctttttcatacagcacctttatccgttcaaactctgctttcgcctgattgtaaacagcttccgcgcgttcttttcggatacggaaatcacgggaatctatttctgcaatgatatctccacgatgataaaaattcccggcatatacttcaaaacggtcaatcggtccgccaactctgaaagaaagctccgtctctttaaaaggttttgaaataaacgaaaactcgcgttccgaagaaggaaccaaagtttccgcctctgccactttcacccgtattggttcatctgccttttgttctcctcttccacaggaagcaaacagacaaaggcaaaaaatacataatgagaatctagtcgttgtcattctgttctaaaataaattatgttatcaacgacacgaaaatagacgaaaaaagaaaaagcagccgttttaaagtttccaagacggaaaagacagggatgaaacagaaaaagaagagatgaaatattgagccttttatcgtacttatgtgtttcattactatctttgcagctcaaataaatactgcaatattaatttatgactgaagaaaaaatacataaagaccggacgggaagttggtgggcattaagtcctttgctcgtattcttatgcctctatttggtaacatctatcctggtcaacgacttttataaagtgcctattacagtggcctttctggtctcctcctgctatgcaatcgctatcaccaaaggattgaagctcgatcaacgtatttaccagttttccgtaggagccgctaacaagaatatcctactgatgatatggatatttattcttgccggagcctttgcacacagtgccaaacagatgggagcgattgacgccaccgtcaatctgacattacgtattcttccggataacctgctgctagccggtatatttattgcagcttgttttatctccctgtctatcggaaccagcgtgggtactatcgtagccctcacccctgtagctgtggggctagcagaaaaaacggaaatagcgcttcctttcatggtggcagtggtagtcggcggttctttcttcggagataacctatcatttatatccgacactactatcgcatctacgaaaacacaggaatgcgtcatgcgtgacaagttccggataaactccatgatcgttgtcccggcagccatcatcgtattgggcatttatatctttcaaggattatccatcaccgcccccactcagatccaaacgatcgaatggataaaagtgataccttatataatagtattaggaacagccgttgccggaatgaatgtgatgcttgtattaattataggtatcctgacaagtggcattatcggcattgccaccggaagtttcggaatattcgactggttcggagctatgggaacaggaataacgggaatgggagaattaatcatcatcaccctactggcaggaggaatgttggaaacaatccgctacaatggaggcattgattttattatccggaaacttacccgccacgtcaacggcaagcgaggtgcggaactaagcattgccgctttggtaagtatcgccaatctgtgtaccgccaacaatactattgccatcataacaacaggaccgatagcaagagatatcgcccggaaattccatctcgaccggaggaagaccgccagtattctcgacaccttctcctgcctgatacagggcattattccatacggtgctcaaatgttgatagctgcaggacttgccaatatttcccctatcagtatcatcggtaatctctattatccttttacaatgggagcctgcgcattgctagccatcctattccgctaccctaaacgatattcgtaaaaaaatagcgaaatgtttgtcaatcaaaagaaaagccgtatctttgtgcccgctattacgagataatggcataattcaaatcaatcattaaaaacaattattaaaaatggcaactagaatcagattgcagagacacggacgtaaaagttacgcgttctattcaattgtaattgcagacagcagagcaccacgtgatggtaaatttattgagaagattggtacttacaaccctaacaccaatcctgctacagtagatttgaatttcgacgctgcattggcatgggtactgaaaggtgcacaaccaagcgacactgtacgtaatatcctctctcgtgaaggagtttacatgaagaaacatcttctgggcggtgtagcgaaaggcgcattcggagaagcagaagcagaagctaaattcgaagcttggaaaaacaacaaacagtcaggtttggctgctttgaaagctaaacaagacgaagctaagaaagctgaagctaaagcgcgtctggaagcagaaaagaaaatcaacgaagtgaaagcaaaagcactcgctgaaaagaaagctgctgaggctgctgaaaaagctgctgctgaagcacccgcagaagaagctgctgctccggctgaagaagctcctgcaacagaagctgctgctgaataattttcagcaggttccgaataaaaaattaggaaaaagcaataaatcctcttcggttcgccgaaggggatttttttattttctgctataaaacatagtaaataattagtctctttcaaaataaaatgcctttctttgcatcagcatagttcagcacggttaactcttataatattagcatgaaacgaactgataagaaagcaacattcggacaacaggcaactaaggtcacacaattggcagacacacttagtcaggctatttccaggaaagaatttcttgaaggagattctttgccttccatcaatcagttgagtgcacactatggagtatcgcgcgatacggtgttcaaggcttttcttgatttacgtgaacggggactgattgactccactcccggcaaaggttactatgtgaccagccaggtgactaatgtcttattgttactcgaccagtatacccctttcaaagaagctttatacaacagtttcgtcaaacgactgcctattaattataaggtcgacctgttgtttcaccaatacaacgagcgattgttcaataccatcattcgcgaatccgtaggaaaatacaacaaatatatagtgatgaatttcgacaacgagaaattcagcacagcccttaacaaaattaatcctgtacgactgcttcttctggacttcggcaaattcgagaaaagcaagtatttctatatctgtcaggattttgacgaatctttctaccaggcattactgacgttggaagacaaaatgcacaaataccgtcatatcgtattcctgttctctaaaggattaaaacatccgcaaagcagcaaagaatattttatccgtttctgcgaagaacaaggattttcatacgagatacaggaagacattgaaaatctggtagtacagaaaggggcagcctatatagccatcaagcaacaagacgtggtaaaggtggtcaaacaaggaagattggagggactgaaatgtggaaaagatttcggcctgctggcatacaatgatattccttcttacgaagtgattgacgaaggaattacctcattgactattgactgggaaatgatggggaacgaagcggcaaacttcgttctcaatgacgcctctgtacagaagtacctccctaccggagtcaggcttcgaaaatccctctaattttttttgccgcacattcagcacagttcagcacagagttcaattaaccatataatataaaaaacatgaaaaagtatccgaaaatcgggattcgtcccaccatcgacggtcgccagggtggcgttcgtgaaagccttgaagaaaagacaatgaatttggctaaagccgtagccgaattaatcagcagcaatttgaaaaacggtgacggaagtcccgtagaatgcgtgattgccgacagtaccatcggccgcgtagccgaaagtgcagcttgtgcagagaagttcgaaagagaaggtgtaggttccactatcactgtaacttcttgttggtgttatggtgcggaaacaatggatatgaacccgtattacccgaaagcagtctggggattcaatggaacagaacgtccgggtgctgtatatctggcagcagtattggcaggacatgcacaaaaaggacttcccgcattcggaatctacggacatgatgttcaagatctggacgacaacacaattcccgaagatgtagcggaaaagattcttcgctttgcacgcgccgcacaggcagtagccaccatgagaggcaagtcttatctgtcaatggggagcgtatctatgggtattgccggctctatcgtcaatcctgatttcttccaggaatatttgggtatgcgcaatgaatctatcgacctgacagagattatccgccgcatggaagagggtatctacgaccacgaagaatacgccaaagcaatggcatggactgaaaagtattgcaaggtaaacgaaggtgatgacttcaagaaccgtcccgaaaaacgtaaaacccgcgagcagaaagacgcagactgggaatttatcgtaaagatgatgattatcatgcgtgacttgatgaccggaaacccgaaacttaaagagatgggattcaaggaagaagctttgggacataacgctatcgcagccggcttccagggacaacgccaatggactgacttctatccgaacggtgactatccggaagccttactcaatacttccttcgattggaacggtatccgtgaagcatttgtggtagctaccgaaaatgatgcctgcaacggtgtagctatgctgttcggtcacttgctgactaatcgcgctcaaatattctcagatgtgcgtacttattggagtcccgaagccgtgaaacgtgtgaccggcaaagaattgagtggtctggcagcaaacggtattatccatcttatcaattccggtgccactacgctcgacggttccggtcaatcggtagacgcggaaggcaatccggtgatgaaagagccatggaacctgactgatgcagatgtagaaaactgcctgaaggcaacaacttggtatccggcggaccgtgactatttccgtggaggcggtttctcatccaacttcctgtcaaaaggtggaatgcctgtcactatgatgcgtctgaacctggtcaaaggtcttggtcctgtcctgcaaatcgcagaaggatggacagttgagattgacccggaaattcaccagaaactcaatatgcgtaccgaccccacatggcctactacttggtttgttccccgcctgtgcgataaaccggctttcaaagatgtatattcagtaatgaacaattggggagccaatcacggagctatcagttacggacacatcggacaggacttaatcactcttgcctctatgctccgcatccctgtatgtatgcacaacgtagaagaagaccagatcttccgcccagccgcatggaacgctttcggtatggacaaagagggtgcagactacagagcttgtacaacttacggtcctatttataaataagattaaaacgcagattatgattaccaacgaacatattgaacagtttctatcacaggcacatcgctatggagctgccaagctgatgttatgcagtagcggcaatctctcttggcgaattggtgaagaagcattgatttcaggtacggggtcttgggtaccgactttatataaggagaaagtttccatctgcaatattgccagtggcactcctaccaatggagtaaaaccgtcaatggaaagtaccttccatctgggcattcttcgcgaacgcccggatgtaaatgtagtcctccattttcagtcggaatatgcaacggccgtttcctgcatgaaaaacaagccgaccaacttcaatgtaacggcagaaattccttgccatgtaggttcggaaataccggtgattccctattaccgtcccggttcgccggaactggccaaagcagtggtagaagccatgttgaatcataattccgtgttgttgaccaatcacgggcaagtagtatgcggaaaagatttcgatcaagtatatgaacgggctactttctttgaaatggcttgccgtatcattgtccaatccggtggagactactcagtactgactccggcggagatagaagatctggaaatctacgtattgggaaagaaaacaaaatagtatccggaaacacataccatgaaagatacgcatagaaacacttatttagcagcagactttggaggaggaagcgggcgtattatcgccggctctcttctccacggtaagctggaattggaggaagttcaccgcttccccaatcgtcaggttaaactcggtaatcatgtttattgggattttcccgccttgtttgaggatatgaagaccggattaaaacaggccgcacaaagagggtatgacgttaaaggaatcgggatcgatacttggggagtcgacttcgggcttattgacaaggatggtaatctactaggaaacccagtttgttaccgggatgcacgaacggatagaatgccaacagaagtgttcaagttcttaaacgaacagcaacactatgccgataccggtatacaagtaatggcgatcaatacgttattccagctttacagcatgaaaaaaagtaaggatgcgcaattagacgcagcccaacggcttttattcatgcccgaccttttcagctactttctgacaggaatagccaacaatgaatattgcattgcctctacatccgaactactcgatgcacggcaacgaacatggtctttatctaccattcgtacactcggacttcccgaacacttgttcggcgaaatcatctatccgggtactatcagaggaactttaaaagaggatattgcccaagaaacaggcttaggatctgtagacgtaattgcagtaggttcacacgatacggctagcgctgttgccgcagttcccgctacggaatctcctatcgcatttctaagttccggcacttggtcgctgttgggagtagaagtagacgaaccgatacttacagaggaagcgcggctagctcagtttacgaatgaaggtggcgtgggaggccgtatccggtttctgcaaaatatcacaggtttatggattctgcaacgtctgatgagtgaatggaaaacacgtggcgaagaacagagctatgacacgctcattccacaagctgccgaagcaacgattgcttccatcatccctgtagatgatgcactattcatgaacccggtaaatatggaaaacgctcttatggattactgccgacaacacgaccttccggttccacagaacaaagcggaaatggtgaaatgcgtgctccaatccttagctttcaaatataagcaagcggtggaaaaactcaaccgttgtcttccttctccaattcgccaactcaacattatcggtggaggatcacaaaataaattactcaatcagttgacagccgatgcacttggcattcccgtatatgccggtccggtagaagctaccgcaataggaaatatcctgacgcaagcaatggcaaaaggagagatatccgatcttcacgaattgcgagagattgtaagacatagcataacaccacaagtttatcatcctaaaaaatagaattataatgaccatgaaacacactaaacagtccatcatctcaaaagatggcgtcagttatcttattccctttattctcattacctcgtgttttgcgttatggggattcgcaaacgacattaccaatccgatggtaaaggcattctccaaaatcttccgaatgagcgctactgatggtgcacttgtacaagtagctttttatggaggatatttcgcaatggcttttcctgccgcaatatttatccgcaaatactcctacaaagcaggtgtattgctagggctcggaatgtacgctttcggagcattcttatttttccccgctaaaatgacaggggaatattatccgttcctaatcgcctacttcattctgacttgcggactttctttcctggaaacaagttgtaatccttacatcctttctatgggaactgaagaaacagccacacgacgtttgaatcttgcccagtcttttaatccgatgggatcccttttgggaatgtacgtagcaatgcagtttatccaggcaaaattacacccgatgtgtaccgaagaacgggtactgctcaatgatagtgagtttcaagctatcaaagaaagcgaccttactgttttgattgccccctaccttattatcggtctgattatcttggctatgctcatcgtcatacggcttgttaaaatgcctaagaatggagagcaaaaccacaaaatagacttcttccctactctcaaacgtattttcatgaaaacacgttatcgtgaaggtgtaattgcacagttcttctatgtaggcgcacagattatgtgctggacatttatcattcaatacggaacacatttgttcatgtcaccggatttcggcatggatgaaaaaagcgcagaagtactttcccagcaatacaacatcatagcaatggtcattttctgtgtcagccgttttatctgcacttttatcctacgttatctcaatgccggaaaattattgatgattcttgctatcttcggaggtcttttcacattgggcaccatcttccttcaaaacattttcggactctactgtctggtagcagtttccgcctgtatgtcactgatgttcccaaccatttacggtattgccttgaaaggtatgggagacgacgccaaattcggggcagccggtcttatcatggctattttgggaggttccgtcctgccaccgttacaggcatgcattattgacatgaaggaaatcggttggcttccggctgtcaatgtttcattcattctgccatttatctgtttccttgtgattatcggatacggatatcgcacagtgaaaagaaactggtaaaataaagataaatatcaaccttgtactttgaaagcaaaaaaagagtatgcctctttcggaagacatactctttttttatacttttgtgaaataaccatgttatgtaaaaatgactataacggaaaacattcgaaaagagttacagactttagtagattccaagtatcaggagttccattctgccctagttcccgggacggaaaatattctaggtgtacgcattccacaactgagagtaatggctaaagaaatagccaaaagagatgattggcgtatattcatcgaggcaaccgataccaagttttatgaagaagccatgcttcaaggaatggttatcggacgatctaaaacggcacttgacgaacaaatgaaatacgtaaagagatttgttccccgcatcgataattgggcagtttgtgacatattttgcggcgagctgaagagtgccgtaaaaaaaggaaaagaaacagtatggcaatttatacagccttatttaaaatccacccaagaattcgagttacgtttcggaattgtaatgcttctccattatatagatgaagaacatattgacctactgttgaaatacgccgactcattctgccatgacgcttattatgcacgtatggctatggcttggatgatatcaatctgtttcattaagttccccgaaaagacaatggaatatctgaaacatagtaagctggataactggacctataataaatcattgcagaaaacgatcgaatctctccgcgtagataaaagaactaaagatgttcttcgaagtatgaaaagacgttgatctgcgttttattattcattatgacctctttatctttttccttctacttctgcgtctctgctgcttacggcgactgtaacgttgccatctcttataaatcatccaaccactcatcaaggcaacgacaacaaaaataaggatagtgataccgactcccagattatctcctttgatacgcgaccaaatatcaagaacttcttttgtcttatcaccaaaatcacgaatcatggcacaacgttccactactttgcgatccggatattgtatcttatcaatctgtatactatcggcatccggcccaaagaaataactcaagtcggaaaaatatgtgagagtggtgtcttgcttttcttccaaaatctcaggagtagcaaccgaacttacatagccgcagaaatccatattgcgcaaagcaatgtccggacggcacatgaagttaataaaataactggctgctttcggattcttcgcatatttaggaatcacccaaccatcgtaccatatattactcccctcttcaggaaccacataatccaagtccactcctaccgcattggcttcctcaattgcccatatcgcatcaccactccacgtcatattcagccaagctttgttttttgtcatcatttccttgccaaagtccgcttcccagccgacaatattcggtttcaactctttcagatatttctccgccaactccatcgcacgcggagagtaatcgttcattagttcctccaccgtcaccgttccttcttccaactctttcgcatgggcataaatgatagcagtaccgtatgcatcacgataactatctttcatcagtatttttccggcatacttcctattccaaagacactcccatgaggttgcgaccgaatcgggaatatatgcacggttatacaggattcctgctgttccccacatataacataccgcataacggctcgcttcctctcccggttggctcagcttattgatttgctcacggataaatggagctacattctgcatataattaggagaatgggcaaaattcgtatcaatgggcaaaagcaaatgtttcttcaacatacgctcaataatatattccgaagggcataccacatcgaagtcctcatggcctttctctatctttgtcaacatgatttcgttgatgtcgaatgtctgataaacgatacggatattctcccccgtctgctccttataatacgcttgaaaatcttcgagtacactatctccgatataatccgcccaattataaatcttgagaatccgctcacggggctcgccggagttgtaacacccggccaaactcaacactaacaggataacaggaattatctttttcatcttatttacgtagtagtacatttagtaatccgttaatcttttttcttcgctttccctgcccggtaattaatcgcaataagcaatgccagcactacaacaaaaataatggctgaaagcgggcgaagttccggtgtcagccctcctttacgggcatcggcataaatataggtagaaagcgtctccaatccttgattgccgatggtaaatacagtcacggcaaaatcatcaatagacagagtcaatgccagcatgaatccactaatcatccccggacgaatctcaggaacaatcactttccacagggcttgcataggagtagctcccaaatcgagggcagcctcataaatattcgggttcatctgtttcagacgaggtaaaacgctcaacacaacgtatggtgtacaaaaagtgatatgagcaagcactacggtagtatatccttgcgtaatccccactgaaacgaacaaaaggaaaagcgaaataccggtaataatatctccattcagaataggaatactattcacaaaaccaatcgccttacgcgaacgggatttcatgttaaagatgccgatagcggccacactccccaacaacgtagaggcggttgcagcaagcagagcgatagtgatcgtattaatcaaggcattcatcaaagagtgatgtgtgcccgtagtgaaaagcgaggtataaagcttagtggaaaagcccgtccagttgcccagtacttttgcttcggtaaatgaatagatgacaataatcacaataggagaataaagcaacaacagcaatatccataaataagcctgagccagtatcttctttaccataatcctcctccttcgttagcgttatctttatcatccgtactgaacaaggaagtagctgcaatcagcaacagcatgataagcgaaagcgccgccccgtagttccacatactattattgatattctcctgaatcgttgtaccgaaaagtttgatattgttcattgtcaacagttcggcaatggcaaaagtcgaaatcgtcggcataaacaccatcatgataccactcatgactcccggcatagaaagtggaagaaccgctttcagaaagacttgcagaggattggctcccaaatcttgcgcagcctcaatataactatgatccatcttctgcaaagtgttgtaaataggataaatcatgaaagggataaaattgtagaccataccgaatatcaatgccccctcacccagcggcacactgaaaaagtcgaataaggcaacagtagctaacgtacgcaccaggatatttacccacatcggcaggataaacagaaccaccatcgttttagaacggttcagtttactgttactcaatatccaagctgcgggataccctaacaaaatacaaacaatagtagtgataatagcaataccgatagagtagacaaaggtattgatagcttcgggatgttcgaagaatttctgaaagttggcgagcgtcaaatgaccgttatcatcagtaaatgcatacacaacaattaagaacaacggtatgaccacaaagatcgctgaaaaaataatgtaagggagagaccaactcttacgtgatgacaaaaacactaaaaacctcttattcacttcctttcctgttaatcggttattttaactacacgaatggcatccggggggatagtgatacctacgcggtcgccatcgtcccatacatcattcgtatctacaaacacattctcgtcccagtcggacaacacagtcaaatgataatgatctcctttataaaggataaacttcacctcacctgtcaacgccccgtcttcctcgttatcctgaagaatcactttatcaaagtctacttctaccttaacgtttgtgtcaggttctatgttttccaccggagtacaatcaaagctacagccaagaaattccacatgagtagcatccagcattttcccttcgaaagtattgaatacacgctctttcttcatgatatgaatatcaaacggttttaccagcagccccacttccactcctacttcaaaatgatgataatcctgcacaaggaattcataaccaccacaaagtaccgtcatttcataatgtacacctttgaatatggaagtctccaccactccggtcaattgtgccatgtcggatactgggaaaatatacaagtcttcgggacggatcacgacatctaccggaacattctcaccaaacccctcgtctacacattcgaactccgtaccacagaaacgaacgagtttatcatgaatcattgtaccattcaagatgttactttctccgataaaatccgccacaaacgagttaataggctcattataaatatcgatcggcgtacctatctgctgaatctttccttcgctcatcacaacaatcgtgtcgctcagcgtaagcgcttcttcctggtcgtgagtgacgtacacaaacgtaattcccaaagatttatgcatttccttgagctccatttgcatatccttacgcattttcaggtcaagtgccgccaaaggttcatccaaaagtaatacttccggctcattgacaatggcacgggcaatagcgacacgttgttgctggccaccggaaagagaatcaacatcacgatattcataatccgtcatccctaccatcttcaaagctgctttcactttcttctgaatggtctgtttcggtgttttcttcagcttcaaaccgaaagcaatattgtcatatacattcaaatgcggaaacagggcatatttctgaaacaccgtgttcaccggacgcttatggggaggagtttgtgttatttccttacccgaaattcggatctcgccctctgaagctgtctggaaaccggctatgagacgtaacaatgtggtttttccgcaaccggaaggtccaagtatcgtaacaaattcgcccttcttcacgttcagactcacatcatccaatgccgttttctcgccaaaatacttcgatacatggctcacctcaatgatggatttatcttcttgcatattcatactaaagtttgggttgcaaaggtacacatttctgcggttttcacctacgtgttaatctaatataacagtgtttttcgaggctagatagaaaaataatctatctttgcataaatatttattcactaatcttacaaaagcatgaaaaaattaagtcatttagtcattgcaacggtagccttaggtatggtagcttgtaccggtggaaacaaagtcggctatgttgttacaggtacagtagaaggtgcagccgatggtgacaccgtttatcttcaagaagctaatggtagaaatctgatcaaactcgatacagctgtgatctctaagggtacgtttactttcgaaggaacacaagattcggtagtaagccgttatgtcacttgcgaagtaaacggagaaccgttgatgattgatttcttcctcgaaaacggaaagatcaatattgccttaagcaaaaaagatgactctgctaccggtacagccaacaatgacgcttaccaggaactcagaggacagatcaatgatatcaacaaaaagatgaatgccatctatgaagcaatgggtgacactacattgagtgacgaacaaaaagaagcgaaacagaaagaaggcgctcaattggaggaacaatatgacaatgccatcaaagaagctgtaaaaaagaatattactaacccagtaggagtattcttgttcaaacagactttctacaacaattccactgccgaaaatacagaattgctggaacaaatcccggctaattttcagaacgatgaagcaatcgtgagaataaaagagctgactgacaagcagaaaaaaactgccgttggtacgaaattcattgatttcgagatgaagactccagatggaaaacctgtaaaactatcggattacgtaggtaaaggtaaagtggtattggttgacttctgggcaagctggtgcggtccttgccgccgtgaaatacctaacctggtagagacttatgccaaatataaaggtaaaaacttcgaaatcgtaggtgtatctctcgaccaagatgacgctgcatggaaagatgccatcaaaaagctgaacatgacttggccgcaaatgtccgaccttaaattctggcagagtgaaggtgcacaactttatgctgtaaacagtattcctcacactgttttgattgacggcgaaggtactattatcgcacgtggtctccatggagaagaactacaagccaaaatagcagaagttgtaaaataagtcaccgctattaatctgtggtggaacagactgtgttgaagctctttgtagcaaacagaaaaaatttagcccctgcatcctcagagattgcaggggctaatttttatatctaaagtagcagggagaatcctcccccctaccttacattttcaattaaacaaaccagcgaacatagcagaagtcctgacgatgtggaagttccggatttttggggaacatacggtaagacaccttgaagctacctgcattcgacaagctatgtttaacctggaatgtatacaagtcgccttctttctttatcacattaaacggctctaccgagtaaacatgttgtttaccgtctgcagtcgtataagtagtaaccaattccagtcctactgcatcattcagacctttttcatcgattacataagtgattgtatattcttttccgctttcgatatcgcctttcttcagttcttctaccttatcgcaagatacgatttcgatagaatcccatttagcaaccacttcctctttccatgctgcgatttctttcgctttcgcattgtcattggcagccaaagcgtggaaacgttttgcttgcttgcaatagaatttgctataatagtcatccaattgacgcttcattgtataatgaggagcgatttgtgcgatagaattcttcacaaccttaatccagccttcagaatatcccttcttgttacgagcataatacaacggcaggatttccgtttcaaggatactgtaaatagtagcagcatccaactggtcttgatgttcctgattctggtaagtacgtttttcagtcaacgcccaacctgcaccttcacggtaaccttccagccaccatccgtctaatacagagaagttaacaacaccattcatcaaagctttttcaccggatgtaccggatgcttccaacggacgagtcggagtattcaaccagatatcaactccggaaaccaaacgacgagccaactgcatatcgtagttttcgaggaagataatcttacccaaaaattccggacggcgagagatctcgataatacgcttaatcaaaccctgtcctgctccatcgtgcggatgagccttacctgtaaacaggaactgaaccggatagtcaggattgttcacaatcttagaaagacgttccaagtcggtgaacaacagatgcgcacgcttgtaagtagcaaaacgacgaccgaaaccgatcagcaatgcatttggattgattttatccatcaatgaaacgatacgcgaaggatctccctgattcttcagccaagtatcgcggaatgacttacggatgtagtcaaccaacttattcttcatggtcatacgagtctgccagatctcctcatcaggcacattgtagatagcttcccaaatcttaggattagactggtcgaaccagaagttttcattgaaatatttaaagtacaatttcttccattccgttgcgctccaagtcgggaagtgaacaccattcgtcacatatcccacatggctttcttccgggaagtaacctttccagatagaagagaacatttcctgagacactttgccgtgcagccagcttacaccgttcacctcctgagaagtattgcaagcaaaaacagacatacagaaacgttcgcccttgtcaccggcattgttacgtcccaaatccatcaggtcgtcccaagtgatacccattttagcaggataaccacccatatatttgccaaacaaaccttcatcgaaatagtcgtgaccggcaggaaccggagtgtgaaccgtataaagagaagaagcacgaaccaactcgatagcttgattgaaagtcaatccggtagctacataatcacagatgcgttgaacattgatcagtgcagcgtgtccctcgttacaatgataaatatctttcttgatacctagtgctttcaaagtcaggataccaccgatacccaacaggatttcctgtttcaaacggttttcccaatccccaccatagagctggtgagtgataggacggtcgaactcgctgttcatttcattatccgtatccagcagatacagagagatacgtcctacatttacacgccacacgttagcatgaacataataatccagataaggaacgtctactaccaatggcttgccgtctgcatcgagcacacggtcgataggaagctgtccgaagttctgcgcttcataattagcaatctgctgtccatccatagacaaagtttgcgtaaagtaaccgtagcgatacaagaaacctaccgcacacaaatcaacattgctgtcggaagcttctttcagatagtcaccggccaatacacccagaccaccggaatatattttcaggacactgctcagaccatattccatactgaaataggcaacagaaggacgctggctatccggcctcacatccatgtagtctctaaatttcgtataaacttcattcattcttctcagaatcaccttgtcttttgtcaaagcttccagcttttcatagctcatgcgttccaacaacagcacagggttctgtccacattctttccaaagttccggatctagatctctaaacagttctgtcgcttcaaaattccatgcccaccaaatgttgcgtgcaatttcagacaacttctccaactctaccggtatacgtgatttcacagtaacctctttccagttgggaatattcacattactaactttgattttcataatgttttttaattaacttattgataataaattttctcttaactaagttgacgcttcattgcattgcgcaaagcaatgtcataagcctcataataatattgtataaagtgtttccacaaagcctgttccgctacttctgcggcacgcttgcggatttccttcacttctttttctgtcttatcggcaaatagtgtaattgtatctttaataccatccgccacttccgaataattatagtccgaacggcgcagcacctccactccatcgttaatgcctcgttggttcttcaggctatttacccaaagtccgaatccggccagatctgtagtgattgtcggcacatggaatgcaacgctttccaacggagtatacccccacggttcataataagaagcatatacgctcaaatcctgtccgagcaatatatcataataatccttattcatgataccgtcacgaccatccaagtagcaaggaacgaatatcaccttcactttatcctccggacgattgcccattccaagatatttcagcatatccaacacctggtcatgcgtcatgttatgcagccaatgggtaatgaacggcacttcaagcggagtatcaaaactcttcttacttttcagacgttcctgcaaatcttcacgcggatcacctacccaaccggggacattgataaacgccagcacattcttatgcaagttcttatccctgttcaggcggttcaacgattccagaaatacgtcgattcccttattcttaaactcatatcttccactggttcccacaattaacgtatcatcgcccagatttgttcccaacaatttgttcgctacattcaacatcaaggtacgcgcacgtttacgctttccggtgaatgtacctcctttcggcacaaagtcatcctcgaaaccgttcataaggattacatctgccggtttatccagcaattccttacattcgttgttggttatttcgcttactgtcgtaaagcaatccacataatgcgctgtctgcttttcaatcgaatgcttcgactgcatattcagttcctgagccatctggtcaccattgtaagcaaatagataatcatacaacggtttgttgttaccagcaattgaacggccgatagaagtagcgtgggttgtaaaaatagtagccacctcaggcacagcttcctgtacataaagcgctcccattccggtcatccattcgtgagcctggtataccaccttatccgtctctgtcaagttataacgatagaaactctctaccacttttcccgcagcgtacgaaaacatggaagcttcgtcataatcgccataagcgtgcaacgaatctacttgataacgattccacatttcagtgtatatatcgttctttttctcaaaaaaaggttggaaatcaacaagaatgactatgggttcaccggggatattccatcgtccgacacgaacagaaagttcatctttctcaagcgcatgcttcttccaagcagcacacagattattcgactcgatgaacagagggttttcctttccttgccacacatcgggacctatgaaaaaaattctgtcacgaaacttttcctgcaatgtatttgcccgggtcgacaagaccgtatatatccctcctactttattacatacttcccagctggactcgaagatataatcgggggttaataaatcttttaccatataatatattaaaactctttttagtatgcgggtgcaaaagtacacattattctttgaaaaataatactttatgcaaaaaagatgagttaagaagaagaaagaaagaacctcatccagtaaaaaaagaatatccccctgcatatgcaaagctccatatacagggggattgaatgttttttattaggaatattcctgcagaaaaaattatgctaatgcactaccgatcaagaaggttgcagctagagcaacgatagcataaagttccgggaatacagcaagaatcaatgtgttgctaaatacattgtgtccctgaccgatagcagcgataccgtttgcacaaacctgtccttgacggatagccgagaacaaagccaccaagcctaaagcaatacctgcacccaaaacggcagacgcctgaatagctgtaatctcaggagttaaaataccaaaaatagtttggaacataaaataaccggcaaaaccgtaaagtccctgtgtacccggaagggctgtcaatacaaggaagttaccgaatgcactgtcgttctttttcaatgctccgatagcagcgttacctgcaatagttactccgtaagcactaccaatgcccgacaaaccaaccataaccgcgatgccaatataggcaataaacaaattcatttccataatcttattctatttttattgtttaattcttaaaatattaatttttagtttttaaaaggtttgtactctttaccgcctccttcgtatccggaattcttgaaaaactcgacaaacgtcagacgcatcgggtgaaccattgcaccgagtacattcataaagatattgatggcatgaccgataacgaatatcagtaccatcacgataggacctgctattgcattatccggactcatacctactgccagactgttgaacactcctgccagaatacctccggaaagtccgagagcaaacagacggacgtatgacaggacatcacccaacaaaccggtagccatattgtacgaatcccacaaccccagtccgatattcaggaaaatgttctttcccggactgttgtaaaggaagatcatagcagccgaaattcccagaatgataaggtgcactgtgcctcccatcggcattacttccggtaacagagccgaaacagccatcgaaaccaacaaaataatccatcctattgtcgccaccgcatatttgaagccaaactgaatcgtctgatttaccgctttcagcaccatgccgaacaaaatctggacagcacccaaaatcaacgacaactggaacatatcattgttatccatcagaacagcgtgtttcaaacgttgaacgataggccagtccagatcgtaaatattcgctccgaagaacgtacccgtcagcaaaccgcagaagaaggtcgaaacagccaatacttgtatcaatgacaagattgattttgtagatggagtcagtttcttcgctatcaaccgatatgccgtagctcccaagaacagaaataaaccatatcccgaatctcctagacaaagtccaaagaaaatcataaagaacggagcaaagaacggtgtcaagtccagctcattatatttcggaagcatatacaatttacaaatcggttcaaaccaggcaaagaatcctttgttgttcaatcggataggaacattatcgcccggaaccggatcagtaatttcataatacacatgtgcgtcattcaggtaagcctcgatttccacttgactgaatgcaggagcccatccttcaatcaacatcagtttatcaccggcggcctgttcggaactcagcacgactttagagaattcaatctgtccctgcaattctttcaaggcagccttcaaagaaggaatttccgtctcagacaatgcaacgagcttcttctcattctcttcgatcgcctgttccgtcgtatcatacatcgtttcaaggcgtgccaaagagtatgctggaagttttgcctgctccacatccaagtccacctcctgtccggctttcgttaccgtgacaaagaatactttggaagaaatacggttcacaatcatcgcattgtattccgtctcccactcttctttgtagtttccttccgagcagctataaaaaccgatcacataaccaacatctttcaatttctgaatatctgtcggctcaaagtttccccacgcttccaacgcttctttttctttcgcatagctttgtagctgttgagacaacttcccgtgttccgtttgcaaagtatccacttcatccaacacttgcatcccgcgtccggctgttccaccttccgttgcaatcacggcattcttctcatgcttctgattctggagcaacttcattgtagctgccaggcggttggaaagacggatattctcctgcagttccgtgttatcggcaaccccttgctgtttttccacaatgtggactacaccaagttcacgcagactgttcagaaaatcttcgtactccttgtgataaaccaggaatgtgagtttcttcattttcgtaatcatgcctctacctccttccttttttcctgatgggacttcatgatcttttgcgaagacttcgacagattctcttcatcttccataaatcgcttgatctttcgcaatgcatcctgatagcccggtatctgtaccttctcaaaaagattcactttctgagtggtctttttccttgcatgttctaacaaattcagcttggcgagcataaattcacgttcaatggccgtatgtgcaagctcttccaacaagtgtataccgtcggcataccatttgggagcgttaaacatactgtacggacgtatctcgaactctacattttcgagcaacggcacgcgcacacccgcaattttcttcacgccaagatgaacatcattcacctttattaatgaagcatcaaactcattccaaagggcgaacatggcttcataggcttgaatctgttcttcgagcctatcctccagatcggcagcttccgttttacagcgtttcacttccatgcggagggcgctttccttattcttgatgataggaagcgtgcgcacccgcactttcagttgcttttcgagctgctgaagagaggtcttgttatattgaaactttatagccacgttgtcaattactaattataaattattaattacaagtttattattattcgccttttggccagtattgatccaccaagtctttcttgatatttacttcttccggacggaagtacttaccaaacaagccccaagccacatccagcatttcagtagtatccagattgacatcgatagccaacaactgattggaataatcttttgcaaaagccagcgtacgctcgtcgtagttcgtcaagtcgaaaccgttttccatctttgtcttagcgttagcagcgtcggcatacagacgtacagcggcattcatcacctgtggatggtctttacgcgtcttttttccggtaaccaactgtttcaaacgagacaatgaacggaacgggtcaacaataaccttaccgatatcactgtcacgacgcaagaacaactgaccttcggtgatgtaacccgtattatcaggtacagcgtgtgtaatatctccaccggacaacgtagtcactgcgataatagtaattgaaccaccggaagggaactgcaccgctttttcgtaaatctttgccaaatccgaataaagcgaacccggcatagagtctttcgaaggaatctgatccatacggttggatacgatagccaacgcatcggcgtaactggtcatatccgtcaacagtaccaagactttctcattattgtttacagcgaaatactcggctgcagtcaatgccatatccggaatcaacagacgttccaccggaggattctcggtcgtattcataaaactcacgatacgatcgagcgcaccggcattagagaacacattcttaaagtacaggtagtcatcattcgtcatacccataccgccgagaataatcttatccgtttcggcacgcaacgccacgtttgccataacctggttgaaaggctggtccgggtcggcgaagaacggaatcttctgaccggacaccaacgtattgttcaaatcgataccggcaatacctgttgcaatcagttccgacggctgtttacgtcgaaccggattcacagaaggtccgccaatctccacttcctggccttcaatttccggacctccgtcgatcggatcaccgaaagcattgaagaaacgtcctgccaactgctcacttactttcaatgtcggtgattttccgagaaacactacttcggcattggtcggaataccttccgtaccctcaaatacctgcaaagtgacatcgtcaccggcaatcttaaccacctgcgccagtttaccatccacagtggcaagctcgtcataccctactcccgtcgctttcagcgaacaggtagctttggtaatctgagtaatcttggtatatatcttttgaaaagcttttgttgccatctttgataattaaaaattataaatttaagattatgaattgatacttctttcggcaatcagttctttcagttgttgccggaatccttcatactgctcagacttgaacttagaatagttcatctgcttacagatattaatcatcttcttgaagtaatccattacttcgttgaagttatcaaattcaaactccgtatgacaaatgtcaattaccatgttcagaatatcttcctgacgttccatcggagttaccgcatcaatttcgtcgaatgcatcctgctgcagaataacaaagtcgatcaattccgatttccagaaaataacgtgatattctaccggtacaccatcgtcaccaagaatattgatctgctcggcaatctctttaccacgctgcaaacgtgttttcagttcattgaccttaccaatccattcaccgttgatgtgctctttgatgtatgcttcaaattccggatattcgatatatttagaataagaatcgatcggattcacagccggataacgtttcttatcggcacggtcctgttccaaagcatagaaacaacgtgctactttcttcgtattttcagtcacaggctctttcaagttaccaccggcaggagataccgtaccgatgaaagtaatcgaacctgtttcgtcattgttcagtttcacatatcccgcacgaccgtagaagttggagatgatagccgaaatatccatcgggaaagcatccggaccaggcaactcctccatacggttggacatctcacgcagagcctgcgcccaacgggaagttgagtcagccatcaacagaaccttcagtcccattgaacgataatattccgccagtgtcattgctgtatatacggaagcctcgcgggcagctaccggcatattggaagtattagctatgataatggtacgttccatcaacttacgtccggtatgcggatcaaccagttccgggaactccgtaaagatttccaccacctcattggcacgctcaccacaagctgcaataattacgatatccgcttccgcctgtttggaaatggcatgctgaagtacggtcttacctgtaccgaagggtccgggaataaagcctgtaccaccttccacaatcggattcaatgtatcgattacacgtacccccgtctccaacaatttgaaaggacgcggcttttccttatagttcgtcatggcacgtttcaccggccatctctgaatcatagtaacaggaatatcgtttccttcctcatctgtcaagactgcaatcgtatcttctatcttataatcaccttccggcatgattgttttcacggtagccgttcctttcatcgtgaacggagccatcatcttcaacggctgaaagttctcgtccacctgccccagccatgcggaagcctgcactttatcacctgcatttaccaacggtacgaagtgccatacacgctctttatccaatggatatgtatattgtcctcttttcaggaaaacgccatccattttgtcaaggtcattttgcagaccgtcgtagtttttcgataacatacccggacctaacgtcacttcgagcatgtgtcctgtaaattcggcttcagcacccactttcagtccacgtgtactttcaaacacctggacatacacacgtgaacctacaaccttaatcacctccgccatcaacttatcgccgccggtcgagatataacaaatctcattctgagctaccggtccgtcaacgacgagggtcaccatgttggcaataacgccactaacagttccttttgttgccatatatttttaataatttattatctgaattctgcaggaatctgcacttcgttctttagtgattcgatgatactcctgaacaattgatttcctctttccttatccaatgaaatccaccgttcaatcatttccagctttaacaagaaagcgaaaatacgttcaatggtgaaataatcgaagaaggtagcatcttccatccagttccaccgcaaagtgtcgagcttcttctcacgttccaccaattctgtaatctcactgattttcaccaacgactcaaaaacatccacctcaccggacagtccgaaatcacgggcgctcgatgtacgtaatgcctcgcatacctccgtgtttcctacaatgttggaggcaatatcccacttgaatttacgacaggtaaatgcaacaagaatattattgatgttgaggttgaattcaaaccaggcggaaacaaatttatttccacatctcatagcatattcgtaatacaatgcagccaaataatcttcctgcaataccgtactttcagccggtgtattcaaataatcaacgataaatgtagaaagataagccggaaaatctttcggactgatttctccgccttcccttagaatagaaatatattcgataagttctccggcagagtagtttccccgtttgtctatttccgcttctttatctttgagaagtttcaacacattagcattatcaaacttcagataaaacaagtcgatcaacctccggtctgaagcagacaatccgttgtagatttcagttttaaaatcagctactgtgtagctcagtttactgtcttccagcgaaagctccggcaaacctgctactaagtaatagtacttactactcatagtcgctttttttaaaatagcatttctactaactggggacgcaagaaagctttgaagtaattcatgaattcttcttctccgaagttcactttataagaaccgtccgccggagaaacagtgaataaagtcttgataccgttcacctgctgtatagtcactcccttatccaacaatgcttttgcgtgagctgcaaaatactttttcagtgattccgcatcggcagtggaaataacaatgggttcatccacactccattttgaagccaatgcaacgataaacgcattcagataatctttatcctgagcgaagtccttcacggaagcagttactaacttgtcagttaccatagtagcaacctcagatttgagtgcatttacagcctgaccggcaaacagttttaactctgattttgtattttccaccaattcgtcagcagatttacgagaggaattaacgattgattctgcctctttgtgtgcatcctcaataattttttttgcttcttcctgagcattcgcgataagtctctgcgcttcttcgtttcctttttccacgccttcacgataaatcttatcggtcaactcttgaattttgttttccatatcaacaggagtatttagtattattactatattaattgtgtacctttcttagattctcgccaaatttacaaaaatcaatttgataaaaaagagaaagatggaaagaaaaaagtaaccttgcaaaaaaatcacagttatataccaattttattccatttttccccttttcgtataacaaaatgacatttatattactcaaacgagaaagcaaatatagtgaatctaaaagagagatgaaaacaaacaaataccgaaacggacaaacgggacactcaaacggatatatcaaagattaaaaaacacagaaagccccttgattcattttgaatcaaggggcttcttaaaaacggcggctacctactctcccactgttacgcagtaccatcggcgtgacgaggcttaacttctctgttcggaatgggaagaggtggaaccctcgtgctataaccacctgaagaaattcaataaggttatgacatgatgaaaagtaaaacttcagtgtctggcaagctaaacgtatatatcgcgccccgtacatgtccgaaagaaagtgaacgggcaattagtaatgctcggctgtgatgttaccacctttacacctgcatcctatcaacgtcatcgtctttgacgaccctaagaaatctaatcttgtggctggcttcgtacttagatgctttcagcacttatccaatcccgacttagatacccagcaatgcacctggcggcacaactggtaaaccagaggtcagtccaacacggtcctctcgtactagtgtcagagccacgcaaatttcatacgcccacgatagatagagaccgaactgtctcacgacgttctgaacccagctcgcgtgccactttaatgggcgaacagcccaacccttgggaccttctccagccccaggatgtgacgagccgacatcgaggtgccaaacccctccgtcgatatgagctcttgggagggatcagcctgttatccccggagtaccttttatcctttgagcgatgtcccttccatgcggaaacaccggatcactatgctctagtttcctacctgatcgacttgtatgtctcccagtcaagcgcccttatgccattacactctacggacggttaccaatcgtcctgagggcacctttagaagcctccgttacacttttggaggcgaccaccccagtcaaactacccaccaaacagtgtccccgtaccacgggttagaactcaaataatcaaagggccgtatttcaacagcgactccacaaatactggcgtacctgcttcaaagtctccggcctatcctacacatcaattacccaaattcaatgttaagctatagtaaaggttcacggggtcttttcgtcccatcgcgggtaatcggcatcttcaccgatactacaatttcactgagctcacggttgagacagtgtccagatcattacaccattcgtgcaggtcggaacttacccgacaaggaatttcgctaccttaggaccgttatagttacggccgccgtttactggggcttcaattcaatgcttctcttgcgatgacatctcctcttaaccttccagcaccgggcaggtgtcaggctgtatacgtaatctttcaatttagcacagccctgtgtttttgttaaacagttgcctggacctattctctgcgcccaactctcgttgggaccctttatcccgaagttacagggtcaatttgcctagttccttaaccgtgaatcactcaagcgccttagtatattcaacccgactacgtgtgtccgtttgcggtacgggtaccttaaagattaagtttagcggattttcttgggagtatgcttacacgcactattaccttattccgaagaatttggtatactatcaggttcgactctctttgtggatttgcctgcaaagatcaacatctacacccttcaacggactattccgtcagtccgcggcgctgtcacgactccgtctccacgtcactccttaaggtagtacaggaatattaacctgttctgccatcggcatcaccgttcggctgagccttaggacccgactaaccctgatccgattagcgttgatcaggaaaccttagtctttcggcgagggggtttctcaccccctttatcgttacttatacctacatttgcttttccacacgctccagcaaagctcacgcttcaccttcgacgcagagtggaatgctcccctaccgatgtttacacatcccatagcttcggtaaattgcttaatgcccgattattatccacgccaaactcctcgactagtgagctgttacgcactctttaaatgaatggctgcttccaagccaacatcctagctgtcttagcaatctgacttcgttagttcaacttagcaattatttcgggaccttagctgatggtccggattcttctcctttaggacatggaccttagcacccatgccctcactcccgggatagaactactgcgcattcggagtttatcaagacttgataggcggtgaagccctcgcatcttatcagtcgctctacctcacagtagtaattcccgaggctgcacctaaatgcatttcggggagtacgagctatctccaagtttgattagcctttcacccccaccctcagttcatccggaagcttttcaacgcttatcggttcggtcctccagttagtgttacctaaccttcaacctgaccaagggtagatcacttggtttcgcgtctactccttccgactagtcgccctattaagactcgctttcgcttcggctacacatttttaaatgcttaaccttgccggaaaaagtaactcgtaggttcattatgcaaaaggcacgccgtcacttcttacgaagctccgaccgcttgtaggcgcacggtttcagggactatttcactcttctgttcgaagtgcttttcacctttccttcacagtactggttcgctatcggtctctcgggagtatttagccttaccggatggtcccggctgattcacgcaagatttctcgtgtcccgcgctactcaggataccactacgcttcgtttagcttcgaataccggactatcaccgtctatggtcccattttccaaagggttcttctcactaaatttcttgcgacatcgtggtcctacaaccccaatattgccgtaacaacattggtttgggctaatccccgttcgctcgccactacttggggaatcattattattttcttttcctgcaggtactaagatgtttcagttccctgcgttagcctcttgccatgcaagatgtcattccttcagaatgacgggttgtcccattcggaaatcttcggatcaaaggttatttgcacctacccgaagcttatcgcagcttatcacgtccttcatcgcctccgagagccaaggcatccgccatgcgcccttgattactttctttcaaactgacttccaggcatatttaactattgctagtctgtataccggaaacgtacggttcgatatatacttttagctcttactaaaattttactttttgtatcatcatgtcaaagatcgtttctcttttcagagatcgtggagaataacggattcgaaccgttgaccctctgcgtgcaaggcagatgctctagccagctgagctaatcccccaagaggttattcaagaatgttgtttttagtttttagctttttactctcactattcctccttcttgagcttggtagtcccaggcagagttgaactgccgacctctacattatcagtgtagcgctctaaccaactgagctataggactagttcaaccttgtctacctttcgtctagactcggcttcttttttctcttgtttatctctatctataatactatagatggttgatctatatctataaataaacaagtaccagtagtacaaaaaacagaacctttaaagtctataagtgactgtcacggttatgacagttacggcatcgctccagaaaggaggtgttccagccgcaccttccggtacggctaccttgttacgacttagccccaattaccagttttaccctaggacgctcctcgcggttacgtacttcaggtacccccggctttcatggcttgacgggcggtgtgtacaaggcccgggaacgtattcaccgcgccatggctgatgcgcgattactagcgaatccagcttcacgaagtcgggttgcagacttcgatccgaactgagagaggtttttgggattagcatcctgtcaccaggtagctgccttctgtaccccccattgtaacacgtgtgtagccccggacgtaagggccgtgctgatttgacgtcatccccaccttcctcacatcttacgacggcagtctctccagagtcctcagcatgacctgttagtaactgaagataagggttgcgctcgttatggcacttaagccgacacctcacggcacgagctgacgacaaccatgcagcaccttcacatttgccttacggctaacctgtttccagattattcaaatgtaatttaagcccgggtaaggttcctcgcgtatcatcgaattaaaccacatgttcctccgcttgtgcgggcccccgtcaattcctttgagtttcaccgttgccggcgtactccccaggtggaatacttaacgctttcgcttggccgcttaccgtatatcgcaaacagcgagtattcatcgtttactgtgtggactaccagggtatctaatcctgtttgatacccacactttcgagcatcagtgtcagttgcagtccagtgagctgccttcgcaatcggagttcttcgtgatatctaagcatttcaccgctacaccacgaattccgcccacctctactgtactcaagactgccagtatcaactgcaattttacggttgagccgcaaactttcacaactgacttaacaatccacctacgctccctttaaacccaataaatccggataacgctcggatcctccgtattaccgcggctgctggcacggagttagccgatccttattcatacggtacatacaaaaatccacacgtggaccactttattcccgtataaaagaagtttacaacccatagggcagtcatccttcacgctacttggctggttcagactctcgtccattgaccaatattcctcactgctgcctcccgtaggagtttggaccgtgtctcagttccaatgtgggggaccttcctctcagaacccctatccatcgctgtcttggtgggccgttaccccgccaacaaactaatggaacgcatccccatcgataaccgaaattctttaataggatcatcatgcgataatcctatgccatccggtattaatctttctttcgaaaggctatccctgagttatcggcaggttggatacgtgttactcacccgtgcgccggtcgccatctttagtttgcaagcaaactaaaatgctgcccctcgacttgcatgtgttaagcctgtagctagcgttcatcctgagccaggatcaaactcttcattgtaaaagtatcttttcatctgttaagatgattttcttgctctgttcaggatgccgtacaatttattgactctatcttatatacctatatttattatataagcattgacggttctattttaatcttgtactacttgtattgtttatcaatatttcaaagaactaacgtggcttccgccgcgcctgctttctttgcgaaagcggatgcaaagataaggactttttcagataacctccaaacttttttgaaagtttttttgtttttattttctgaaccacttactctttagcagaatgtcaatcattaggctctgtctctctagcaaagcgggtgcaaaagtagacactttatacataacatccaaatatattcaactctttttttgaagtattttgaaagaaaaacgctaactagctgaatcataacgatgttgtagaacatgttttttcaacaggaaaaagaggaagatgggaatacacaaaaaaaataagagtaataacactaaagagtcaacctaagtcaggttatgataggcgctatggaagaacttaaaaaaagcatagctttagagagcataaagcaatgctttagcactcgtaaagcaatgctttagcattaacaaaccacccgcctgttaataacaggtgggtacagaaggtacattttttcggggctctcttacacacgcacacgcacgcgtattatatagtaccccttatcacctgtattgacaaacactctgcattcaatcaggcgtttcaatcagatgagtatagtattatttcaatttatgaaggaaaaacgagcaacaggatacaggcacacaagaacaactgaaaggtctcgcaaggtgaggtaagatcttataaaatcgacagtggcaataaacctcctttgataggtgatgataacatctttaatattgtcaatagagaccacttggtctcaagcggtactttctatacctattattcgcgcgcacgcgtgtgtgagaaaattatacggtgcatctactgtaccttttgtacccgccgggctgttcataacttttttttttggggggggggcaactctcacctagttgacatttgaaaaatattcctcctgcatttacctgcctacctcatcccatccggcagccgaatgccattgcagagtcctaaaaaaagcattccatttcaaatacctagtatccggtatataacacccaatacccgaatatatatctgaatctatatccactaatttatcatcatcaacataatccttatacacaacaactctatctaattgtccttcaaaatcagaaggaatattaccatcggtcagttcacgtataaaagctcgaaaatcatatgtcgaatgatccaaaggagatcttccataaccataatgggcttgaaaataatctattttactattatcaaacttaaccagattgccctgatactgtttcataattgaacaagtaacatcagccaatgccgatatttcattcgtttttattaccgcaatagtaccccacgaataattatattcatttttatagtaatcaataaaatcctttgcaatatttatagcactctgctctgaattatccgcagacaataaatatttcgtcatcttgaaataaggaaatcccgcactcataacctctgcaggagaaagaattaaataatcagcagcattccttaattcataagcaacctcaacttgcgacattaaacaagcatcaaatagtatataatcaaaatggataccggattgcgccaaagctttcgataaatcaggaatatttattttagctccactatcatctccaaaagaacgacttttactatcatctactggtaaccatccagtagcgtgagagccaaaaatcagactatatctttcagctggacaataagtcttcacatctttcaaaacattaactaccacctcattcgatacggaattctggctactataagtttttattacctctcttttactgacagaacctttgccatccacttcatacttaaacagagttggaacaggaaattcaccttttctactgccaccatcccaataaattacaaatgtaccaggagacgtaacttcactcaatcctcgttctactgattctatattgttgtatatctggccactgatattattatctccaacaagatacatcaagactgtttttaccgccaccggaacagaggtatcattatcatcaccacatgccgataaaaaagttgacaaacatacaaacaaaaataatattttaatctttttcataatatttctcattaataacggcacaaagataaaaaaataagagatgcaagtctgcatctcctatcacattaacaattaaaatattgttatgagtaaatatcacttatattactcttccggctttgtaaagcggaatttttcagaatcaacccgtgttactattattctattactcctcttatatttactcagaattttcgtagcctctttttccagcttctttctattttccgagaaataaatcatacaggtactattttgttgtaatctgttatcttccagataatttttcaactgatagctatacaactcacgatgtgccaagaaaccgtctttactgatctttgcactatccaatatctggatatctgtgaaatagacaaccgaatcagtaaatgaagccgaaattccaaaagcatacacaggttttgagttaccttttttcaaagaaaaagcggagcacatggtaaacacaagtgcaatggcaaatagtatttttacgtatttcatatcatataattttaattgtgacaaaggtaacaaaaaaagtcgcataagtacattctccgatatgaaaagtgttacctatgcgactcaaattcttttttctttcagaaactgatattccttacttatcccaagtaagatttgagcaatttactacgattactttgtctaagtcttctaattgctttttccttaatctgacgaacacgctcacgtgtgagcccaaacttatcgccgatttcttccaatgtcatttcctgttgtccgataccgaaaaacatctgaatgatttctttttccctatcggttaacgtagaaagagctctatcaatttccctcgcaagagactcattaactagagagcggtccgccataggcgaatcatcgtttaccaacacatccagcaggctgttatcctctccttccacaaaaggcgcatccaccgaaatatgacggccggataccttcagcgtatcagagatcttgtcaaccggaatttccagctcgtctgccaactcttcgggagacggacgccgctcgttttcctgttcgaatttcgagaaggctttgctgatcttattcagcgaacctacctgattcaacgggagacgaacaatacgcgactgctctgccaatgcttgcagaatagactggcgaatccaccatacagcgtagctgataaacttgaatccacgtgtttcatcaaacttttcagcagccttaatcagtcctaaattgccttcattaatcaagtccggcaaactcaaaccctggttttggtactgtttggccacagatacgacgaaacgaagattggcacgtgtcagtttctctaatgccacacggtcacccttacgaatgcgttgagcgagttccacttcttcctcaacagtaatcaggtcttcgcgaccgatttcctgcaaatacttgtcaagagaagcgctctctctgttagtgatacttttggtaatctttagttgtctcattctttaaaaacagatttggtgcgcaaagttacaacaaataatttgttaacatacaaatttaagcaacttttgcattatatttttcaactaataaaacaaaaagagatgccgacaagttgatagtcggcatcctttttctatttcattagcttatcctataatcttcttaccttattttatatcttcattcctgtgtcaaatcgacagcgaaatatccgcgtttgcctgatgggaatactcctgtcaagaacaatacctgattcggagatttcaccgctgctttcatcacttcttccaaatcactgaccttacgcatcggctggtcgtttgccttcaggatgataaatcctttgcgaactcccgcatcggacatcttaccggaagaaactcctgtcacttgcagaccataacccagattcaactgcttcttcaggtcgtccggcagctctttgaaagcagctcccaatatttccatacctgcatctttcacaatcttggtagtaccctgttcgttcttcaacgttacttcaacagtcttttccttcttgttacggatcagtttcactttcactttatcgcccggacgatgtttagcgatagcttcctgcaagtcggccatgttggacaccttcttgttatccaaaccgatgattacgtcgtccaccttgatatcagctcccgatgcagaaccgttttctacgatttcagaaacccaaacgccttctactacacccagttctttagctttatccgccaaagtagtaccggatttatcaatcggctgccggtcgtccatcaaactactaccgatagaaccaccacggataccaagcaacgcacgctgtactgtcccgtattgtttcaggtcggcaattacttttgtcataatgctggtcggaatggcaaaaccgtatccggcataagcacctgtcggagaagaaagcactgaattgatacctaccagctcacctttagcgttcaccaatgcgccaccactattaccttgattgatagccgcatccgtctggataaacgattcgatacctccattatagactcccaatgaacgcgctttcgcacttacgataccggcagttacggtagagttcaagttgaacgggttacctaccgccaatacccactctcctactttcaacgcttcagaatcaccaaccggaatagtcggaaaatcatcaccttcgatttttaccaatgcaaggtcagtactggggtcagtaccgatcacacgtcctttaaattcacggttatcattcagttttacactgatttcatccgcaccttcaatcacgtgattgttcgttacgatatagccgtcttttgaaatgatgactcccgaaccgaaacctacacgaggttgagattgtacctgacgttgctgtccgcgtccgtcaccgaagaaaaaatcaaaaatgtccggcgcttgctgaactgttcttgttttagcttcttgggtagatcttatatgtacaacagcatgaagcgagttttccgcagcctgggtcaaatcgatcggttgagcgttcacagcatcaaaagcagccaatttcacattgggattctgcttgaacatctcattaaaagatgtctctgtggcagccttgttagattgcaacaatttgtaagttgtcaaccctgcaactcctgagctaagaagaacgattgctcctattcccagaatgttctttgttgtctgtttcatgatttataattctttaaaatgttaatattcgacattgttttaacttttacgacgttaaaataataacaaatatcgttcacttattctacttgtcactcttttttgtccacttttaacagagaatatttggagcttaacagcgcttaacgacaacaactgacaaatttacattcgttgtatgtcagatggctttaacactctgacattcattcagtaaagtcagattttcacgacaccgataccgggcagttcgttcagagtgattctacctttcaccacttccacccctttaaaacggtcattagagatgagcaggttaccatccaaatcagcaaaatccactaacggagagaactgcgacgctgccgatatagcgcaggaagtctctgtcatacatcctaccataacacgcattcccagtgcatgggccaaagtcaccatttcccacgcttcacgcataccggtgcacttcatcagtttgatgttgattcccgtgaaagcccctttcaaagccgccacatccgctaggcgctgcaaagattcatcggcaaatatcggcaacgggctctgttgcgtgatccaagcaatatcatccaactgctctttcggcataggttgctctatcatcactattcctttttctttcagccaatgaatcatatccaacgcatacagacggtccttccacccttgattcgcgtcaacagctataggaaggtccgttaccgaacgaatggtttcaatcatttccttatcattgtcccgtcccaattttacctttaatatattaaaccgatctgcgcactcttttgttttctcacgcaccacatcgagcgtatcaatccctatcgtaaaggtagtggaaggcgttttttccttattcaacccccatattttataccagggagcacccaacagttttcctaccagatcatgaagggcaatatcaaccgccgctttagctgccgtatctttcggtgaaagactgtcgacgtatgacaaaatgtcatctaactgaaacggatcattaaattgttccagattcactttcttaaggaaattcataacggactccaccgtttctcccaagtaaggcggcatggaagcttccccgtatcctgttatcccttcatattctatttccacctgcacgtcgggagtcgttgtacgcgaataagtagctaccgtaaatacatgtcttaacttcaactcataaggaaagaatttcattttcatctttcctcccaaaccaagcttatttatattataaggtaatgattctccagccaacgtctgacgtacaaccaacccggaacccagagcagccaaagccgccgtcttcaagaaatctcttctgttttgcataaaataaataaattaatgaagaattcttcattttaattgccgtaatagggattgcgatccgtagtattcatgcctttctccttattaatataaggtaagaaacggactgcaaaaagcaaacgtcccgtattgaatgcatcataattcttatccgaaggttcaaaactgcttacatgcacatcccccaaagcatggataaaacgcttgttgccgagatagatccccacgtgtgagattccctctttttgttcgcccgttgccttccgaccgaagaaaaccaagtctccccgctgcacattggcaaaatcggaagctatttcgatacgttcgcccacatacgcctgttgcgacgcatctctcggaatgatgatatcatgcataaaaagcactgtccggaccagaccgctgcaatccactccttttgaagaagtgcccgcccacaaataaggaactcccatcattgtataagccgtctcgataatgctttcaacatcttgtttcaacgaagctctccatcggttttcaggctgtgaaatagatttcggaatataagcctgtctgccgtccggataagacactttataaaaatgtcctttgccaccttcccacttcagacgattaccagccactacatcagacacggtttgggaagttgcatccggtttctcataagtaaatccgtaatgtgaagttacaacaatcttttccgcacggttccattcatcatatttctcttttgacataggagtaatcaccatccggtgtacccagccggtatagtcatccggagtctgaatctcgtaccaaccggtgtattgcagaactttgaccggcatacccaataatgcttgcgtgctcataccggaggtaaacttgccttcttcgcgcatattacaaacagaaatatgcactaccccatacgcagaatcagcaggcatggggcgtatctcctgagctttcagactgagtgtcgccattgccagaaaataaaagaaaaagagaatgttttttttcattgaatcatgttttaatgatagcaaagttagaaaatatttctatttgtgatactttctttagctaaaacaaaataaatgacgtatttttgcagtctaaagcagttggccggtctgtcgcgtgcacgtcagcgtgcaggaggaaagtccgggcaacacagagcatcctacttcctaacagaaagctgtccgcgagggtagagtaacgtagaagaaaataaccgccactcctttcggggagaggtaagggtgagaaggtggggtaagagcccaccagccgtatggtgacatatcgggctgtacgtcttaggagttgtaaggtcatgtaaaccggcgttatgagagttgctcgctccatgtcggagggtagaccgctaaagtgtcgtggtgacacgtcactcagataaatgacaggcactttttataagtaaaattatagaaggtacagaactcggcttataggctgactgctttttctttttttaaattctaagccatgaagaagaaattcaccgatatatggaaattcctcacgtatgacatctggcgtattacggaagatgaagtgacccgaaccaagttctcactttacaatattataaagaccatctatctttgtatcaaccggttcaccaaagaccggatggccaacaaagcctccgcgctgacttacagcaccctgcttgccattgttccgatacttgccatcctgtttgcagtggcacgcggttttggatttaataatttgatggagcaccaattccgcaacggattcggaggaaacacagaaacaacagaagctatcctctcatttgtcgattcatacctttcgcagaccaaagggggagtattcatcggaatcggtctggtgatgttgctatggacggtcatcaatctggtcagcaatatcgaaatcacgttcaaccgtatctgggaagtaaagaaagcccggtctatgtaccgtaaaataacggactacttctccatgttcctgttaatgccgatcttgattgtggtctccggcggtctttccatttttatgagcaccatgctcaagcagatggatgattttgtgttgctggcccctatcatgaagttcatgatacgtcttataccctttgtactgacttggctgatgttcaccggactttatatcttcatgccgaatacgaaagtgaaattcaagcacgcgcttatcgcaggtgttttggcaggaaccgcctaccaagctttccagtatctatatatcagcagtcagttgggagtatcaaaatacaatgccatctatggtagttttgccgctttacctttattcctgctttggttgcaaatatcctggactatctgtctgttcggtgcggagctggcctatgcaggtcagaatatccagagtttcagtttcgaccaggatacccgcaatatcagcaggcgctaccgggactttatatccatcctcatcatgtccctcatcgccaaacggtttgagaaaaacgagccgccttatacagccgcgcaaatttcggaagaacatcaaataccgatcagactcactaatcaagtactttatcaattacaggaaatagacttgattcatgaggtagtcacagatgcaaaaagtgaggaaatcggttatcagccgtctatggacatcaatcaactaaacgtagccatcctgctcgaccgcttggatacatacggctcggagaatttcaagatagacaaagatgaagaattcagcgacgaatggaaagtgctgaccgaatccaaagaagaatactataagaaggcaagcaaagtgttactcaaggatttgtagcctatttatagctgttgtaggaaatcactttttctttcggttttctcatcttctttcttttctccttcaccggatagcctatcgtgatatccagcaatacacgtttggacgaagggatgcctgtcagccgcttcatttccttttcgtcaaaccagcctatcatacacgagcccagtccttcactttcagcagcaagggtgatatgcgcggcggcaatcccgatatcaatcaaaggaaaatgtttatctttcacttttcccccgagcattgaagtaatattggccgactcttccacaactaagatatgcacaggcgcatctttggcaaacttattcattcccagtcctgctgcagccttgccaatcttcacagccagttcacggtcggttatcaccacaaacttccagggttgggcattgcaagcggaaggagccagacgacctgcctccaaaatccgctctaacttctccgtctccaccggacgttctttatcatacgcccggtcactctgacgggaaagtactaattgcagaaaatcactgtattccatcttatttatattgaatcatccggctgatatacttaccgataatgtcaaactctatattcaccacactaccaatggcaaacgtatggaaattggtatgctcgtaagtataaggaataatggccacctggaacgtatcatccgtgggattgcatactgtcagactgacaccgtttaccgtcaccgaacctttatccacagtaatatatccacgtttcgccatttccttatcaaacgcataacggaatgtaaaataccagcttccttccgcatcctttatgtcaacacaagtggcggtctgatccacatgtccctgcacaatatgaccgtccaaccggccgttcatcaccatgctgcgctccacattcactttgtctcccactttcagcagaccgagattggaccgttccagcgtttctttcatagcagtcaccgtataggtgtcatccgtcatacttacgactgtcagacatacaccattgtgagaaatactctgatcaaccttcaactcattcacaaacgaacacttcaatgtaaagtgtatattctcctggtctttcaccagcgccaccaaagtagcatattcttctacaattccggaaaacataattctacttattatttcatgatttactattctacgtttaaaagcactcctttaatgcaagggtcaaagatacgaataagcaaggaggatagaaaataagagcataaaaaattcacattacacacagacctgtgacaagagagatgataaaaaaggcagcagatgaatgtctcaaatgctgccttataatccgaaagggtggaaatttacatacgtttatatgtcattttacggtaaaagtctccatcttcgtcagtttctttttgtccaactaccaattgactggaattaacaacaagtaatttgacagaagtaaattctgtacctcctccatccacaggaatcagattattgccatctaaagtaaatttctcaatatcgttttgatgccactggttgttgtaataataattgagatgcaagtgcgaggaacacaacatggaaaattgcacacttcttaataaacagattggcaaagtagacaaactgtccggttcttatactgtccaaaatgtatattggtagacattaaataaggacataaaaaaatggggcttttcacaaagctccattcttcagttttcaataggtattagttttttttaaggtaaaaagattgttttcaggataacggtgcaaatataggggcttttaccgatactatccaaattataaaacatgtcatataacatctttttgaaaaatctttggatttattatcatttgacgcaaaaactcctgtaactagcccgttacaggagtcaaatataagatattttttaaggagacctaatttctgtttaaaaattcgccccaaattacttctccggataattttcgtccgtttttccacgatgttttaacactttggcatcaatgaaaaatacgatttcctcagcaatgttggtgatatggtctcctgcacgttccaatttgcggaacacgctgaccaagtccacacccgtatgtaccgcttccggatgttcggtaatatagtccgcaatgatacctgttgccccagcattgatctcatccagcaaattatctttggcaaagacacctgccgccagttcaatactctcctcattcaaggcacgtttcgccaactccagcatggacaaaacctcagcctgcatctccgccagcctaagacggttcaacagttctgcatccaacaccggttctttactacgaatcacaaagcgggcaatcccttccgcaaagtctcccaagcgttccagattcgtattgattttcagcatagccagcacaaaacgcaggtcgatcgccaccggattatataacgcgataatatcttccacatcactgtctatcttcagctcaaaggcattcaccctacgttcgcgaaccatcacctgctgagccaactctttgtcaagagtcaatacagcctctccggcacggtcgagctggttgtacaccaacgtccacatctcatcaatttccttcttcaatagaacaagttccgattctataaactttaccatagtctacttatatataaatgattaatattctgtttctaacacaggcaagggggaccgttctatccgaagcgacctgtaatataattctgcgtagcctctttctccggatttgtgaatatcttcttggtctgatcgaattctaccatctcgcccatataaaagaaagccgttttgtcgctgacacgggccgcctgctgcatattgtgcgtcacaatcacaatagtatagtcttttttcagctcgtgaatcagctcttccacttttgccgtagagatagggtcgagcgcagacgcaggttcgtccatcagcaacaccgaaggagacaccgccatagcacgggcaatgcaaagacgttgctgctgtccgccggacaaggcataagccgattccttcaacttatttttcacctcatcccaaagtgccgcccctttcagtgtttcctccacacgctggcggatgaaagcgttatctttcactccattcacacgaagtccgtaagccacattctcgaatatgcttttcggaaaaggattaggacgctgaaacaccattcccacattcttgcgcagttcgtccaccgccacgcttttagaatagatattctgcccgtcaatacgaatctccccttccagacgggtggcgggaatcagatcgttcatccgattgaaaagccggaggaaggtagacttaccacaaccggaaggcccgataaaggcaacaactgacttctcttcaatctgcatactgatacctttcaacgcatggaaatcaccataccagaaattcacgtcgcgcgcatctattttcactgtatccatatatactaactcaattcgtttttacccttttctcaaaatactttctcaacgcattcgccagcaaattcaccagcagaataatcataatcagtaccaatgccgtaccgtatgccaatggcagctgcgcctccatatccgttccacttgtagaaatcacatacagatgataaggcaacgccatacactgatccaaaatgcttgccggaagatgcggaaggaaataggcggcacaggtgaacagaatcggcgccgtctctcccgacacccgtcccaaagcaagaatcagcccggtgataatattcggcatacccatcggaagaatgacgtgccagatcgtctgcaacttcgtcgctcccagcgcccggcttccctcacgcatactgtcgggaatcgccttcaaagcctcttccgtcgtccggataaccaaaggtacacaaagtaagcctaatgtcaaagaaccggccagaatactatcaccgaaccccatataattgacaaaaagcgccataccgaacaaaccgaacacaatagagggaataccactcagattgttcgtcatcacccggataaagcgtaccaatttgcctttcggcgcatactcgttcatatagattccactcatcacccccaccggaaaagcaaatagcgcactacccaccatcagataaaaagtaccgacaatagccggccagatgcctcctcccgtcattccatccgtaggagacgaagtgataaactcccagctgatggcaccgattcctttatagatgataaatcccagaatcacaaacaatatcagcacaatgcaaaggctcaacaatcggaataggccgaaagcgatcttctgcgaacggtgcttggctttattattactccttacttccatattatttacttcgttttagtcctttagaagaaatgtattccacactaaagttgatgatcagtgtaatgaagaacaacacgacacctaacaggaataatgcctgataatgcggacctcccgccggtgcttcccccaattccgccgcaatggtggcaggaatcgtacgcaacggttccagaatagtggtcggaatcacggccgcgtttcccgtcaccatcaataccgccatcgtttctccgatagcccgcccgatacccaacaccacgccggacgtaatgcccgagatggaataaggaatcactaccttatatatagtctgccactgtgaagcccccagcgccagactcgcttcacgcatggcgcgcggacaattcctcatcgcatcttccgtcactgttataatagtaggcagcgccattatagccaacacgatactccctgccaaaccgctttctcctaccggaagatcaaacaatttctgaatcaacggaacaatgacgatcaaaccgaaaaagccatagacaacggaaggaatgccactcaacaattcaatgaccggcttcagccagttccgtactttcggatgggctacttcggacatatagatagaaaccgaaagtccgaaaggcagcgcgaaaagaatggcaaacaagctcacccacaacgtaccgccaatcaaaggcaggaagccgaactgtgcggccggagtcgccgtcggaaaccattcggctcccgcaaagacatctttcacggaaatggtgttgtcctctataaaatgcaccgcatccggatgaacgataaactgctgcggaacaaaagccacaatgcccggtgtcttccccaccagttccgttaccttatctcccgcatactcataggcagctccgagttcctcctccgtataatattgtgtaatatcctccagacgaaaaacccggatagggagatcttccccaccgagttccttccaattggttatctccccgtcaaaaacattctttatctgagccggactcagaacgcttaccttattacttttattcagcgccagcacataaccttcctcgatcactttgcttctgaatagcccgaaagcctccgtaaacaggaagagtacaatcagcagaatcgtaatacttgttacgaaaccgctgcaagtcagaatcccttctataatcttttccaaaaactttttcatacctgtcgatttctgatgcaaagaaagcggctctttattaaagaggtgtgactaacgtttgaaggaaatgtttcaatcttgttacatttatgttacaaacaccttttacccgccagatgcaatagaaatgtaacatccgattgctttatttgcatccgtattcatttacatccgtacaaaaaagaagatttatgaaagtgagaagaagtttattaatagccctgtccttattgtcaatcagtgccagcgcgcaacgcatcaaaggcagtgatacggtactacctgtcgcccagcagacagcagaacggtttatgaaccaacacccagacacccgtgtcaccgtgaccggcggaggaaccggtgtaggaatttccgcgctactggacaatacgacggacatcgcaatggcttcccgccctatcaagttcagcgaaaagatgaaaatcaagagtgcgggagaagatgtagccgaaatagttgtggcgtatgacgcccttgccgtagtagtgcatccttccaatccggtaaagcaactcacccgccaacaactggaagacatctttcgggggaaaatcaccaattggaagcaagtaggcggtgacgaccgcaaaattgtggtttactcccgcgagacctcttccggcacttatgaatttttcaaagagagcgtactcaaaaacaaaaactacatggcgagcagcctttccatgcccgcaacgggcgccattatccagtcggtcagccagaccaaaggagccatcggatatgtcggacttgcctatgtgtctccacgtgtcaaaaccctttccgtatcctacgacggaaaacactatgcagcccccacagtagagaatgccaccaacaagacttatcccatcgtccgcccgctttactactattacaatgtaaagaagaaagcggaaatcgatcctttgattcagtacattctttctcccgacggacaggacattataaaaaagagcggttatattccggttaaataaaaaaaatgtcctacttttgtagcctgaatcatgtattagcataaaacgttatgacagatattaaaaacgaagaagtagcaagtgaaaaaaagagcttgaactttatagaacaggcagtagaaaaagacttgaaagaaggtaaaaacggtggaaaagtacagacacgtttcccgcccgagcccaacggataccttcacatcggccatgccaaagccatttgcctcgatttcggcattgcagaaaaacatggcggtgtatgcaaccttcgtttcgacgacacaaaccccaccaaagaggatgtggaatatgtagaagctatcaaagaagacatccaatggttaggctaccgttggggaaatgaatattatgcttccgactacttccaacaattatgggacttcgccatccgtctgattcaggaaggtaaagcatatatcgacgaacagagctccgaacagatcgcgcagcaaaaaggcactcctacccaaccgggtgtggaaagcccttaccgcaaccgtccgattgaagaaagtctcgaacttttcaagaaaatgaatagtggagagattgaagagggcgctatggtgcttcgcgccaaaatcgatatggccaacccgaatatgcacttccgcgacccgattatttatcgtgtggtgaaacatccgcatcaccgtaccggcactacatggaaagcctaccctatgtatgacttcgcgcacggtcagagcgacttcttcgaaggggtgacccattcactgtgtacgcttgagtttgtagtacaccgtccgctctacgacctcttcatcgactggctgaaagaaggaaaagacctgaatgacaaccgtccccgtcagaccgagttcaacaaactgaacctgagctatacgctgatgagcaaacgtaacctgctcactctggtaaaagaggggctggtgaacggatgggacgatccccgtatgccgaccatctgcggtttccgccgtcgcggttactcgccggaatccatccataagtttatcgacaaaattggttataccacatacgacgcactgaatgacatcgcactgctcgaaagttctgtccgcgaagacctgaacagccgcgctacccgcgtgtccgcagtaatcaatccggtgaaactcgtcatcacgaactatccggaaggacaagtagaagaattggaagccatcaataacccggaagatccggaagcgggaagccacttgattgagttcagccgcgagttgtggatggaacgtgaagacttcatggaagatgctcccaagaaatatttccgcatgacacccggacaggaagtacgtctcaagaatgcttatatcgtgaaatgtaccggctgcaagaaagatgaaaacggcgtgatcacggaagtgtactgcgaatatgacccgaacacccgcagcggtatgccggacgcgaaccgcaaagtgaaaggtacgcttcactgggtgagctgcaaccactgcatacaagcagaggtgcgtttgtacgaccgtctgtggaaagtagaaaatccgcgtgacgaactggctgccatccgcgaagcgaagaattgcgaggcactggaagccatgaaagaaattattaacccggactcattgaaagttctccctaactgctacatagaaaagttcgcagctacactgcccaccctctcctacttacagttccaacggattggatatttcaatattgacaaggactcaacaccggaaaatctgatcttcaaccgcactgtgggattaaaagacacgtggggcaagatcaataaataaaatataaaataatgagtagaaaaaacattccgtctgaaaaagaagaactggaaaaactaatcacaaactacgaggctgcaaaagccgaaaacagacaactctatctggatggagaccaattggctgatatctccgattggtatgcctccagaagtaaatttgaggaagcgcaagaagccgtcacttacggacttcaattacatccgggaaacaccgacctgctagtggaacaggcatacctttatctggacacccggaacctgcagaaagcaaaacaggtgttggattccatcaccgaagcgtatgatcccgaagtgaaaatgctgaaggccgaattgttactgaatgaagggcaactcgaagaaacccggtcactattagctaccattgaagatgcggacgaactcggcagaatctgcgaggttgtctatctctatctggagatgggatatcccgatatggcaaaagaatggatggaaaaaggggagaaaacatactctgagacaaaagagtttatggctctccaagccgattacgcattagccacccaacaattggactcagcaatcaagatatacaatcaattacttgatatagagccttataataccccttattggacaggactggcaaagtgctacttcttccaatcaaaatggagcaaggctatcgaagcctgtgatttcgcattggcagccgatgaatctgacggagaagcatataccaccaaggcacattcctttttccaactgaacaacttcgacaagtccatcgaaaattataagaaagcgatggaatacaaggccgtctcccccgatatgggctatatgttcatcgggctgtgttacagcgccaaagaagattgggaaaaagcgaatgagtattatgacaaagtaatcgattttttagaaaaaaacaatggtaatgagtctgctttatcaatagacatttataccaataaagcgaatgccttagccgaattgggaagatacaaagaagcacatcagacttgtaagaaaataagcaaaatccatccgaaagacgcgacaatcctcctgaccgaaggcaaaatctacttgctggaaagaaaacttgaaaaagccagaatctgcttcatcaagttatcggatatagattccagcatagatatgtattacatgatagcctgtgcctatatggagaacaactatgagatcgaaagtcaatattacttagagaaagtatatgctcttgatccgaaatttgaagacgttgcggagaaattgagcgtttgcagtctggcttacggtgacatagaaagttttttcaaatataacaacgactgcgcgcatccggtcacagaggaagcccttgcgggtttgataaattatgcgtgtcagaacgaagaacaacggaaaatattcaagaagatactggcacgtatgaaaaaggagaaaaaggagaaaaaggagagtaagaaaaacaaaggaaaataatcatcaatttaataaaccctagccctaaaaatcatggaatcagtagcttttatccagtggtgtctggatcatttgaattattggactatcactttattaatgactatcgaaagttcctttatccctttcccttcggaagtagtcatcccgccggcagcatataaagccgcagtcaacgacgagcttaatatctatctggtgattttgttcgctaccatcggagccaatatcggagcattgattaactattttctggcaaagtggttgggacgccctatcgtctataagtttgccaacagccgtttcgggcatatatgccttattgatgaagccaaagtgcgcaacgctgaaacttatttcgacaaacatggtgcgctttccacatttatcggccgactgattccggctgtccgccaattgatctccatacctgccgggctggcacggatgaagttgaccactttcttgctatacaccactttaggagcaggattgtggaatgccattctagccattatcggctaccacttgtccaaagtgccgggaatcgagagtgaggaacagttgattgccaaagtaacagaatacagccacgaaataggctatggcttcattgctctcggtgtgtttatcgttgccttcctggtttataaaggaatgaagaagaaataaacttcaaaacataaaacgcagctaaacgcggattttcgcaaatagaaataatcttttgcgttaatctgcgtttagctgcgtttaatcctaagcaatcatccccctaatttacagtgcagccaatgccttatcgtaatcaggttcctgcgtaatctccggcacaagttccgtataggccactttgccatcctttccgatcactaccaccgcacgagccaacagccctgccaacggaccgtccgccatgcgcactccatagctttcgtcgaaatcggagaaacggaaatcagacaatggaatcacgttctcaataccttccgttgtacagaaacggctgtgcgcaaaaggaaggtctttggagatagccaataccaccgtatctttcagtccggcagccatcttgttaaatttgcgtaccgaagtagcacaaacactggtatccagacttgggaaaatattcagaatcacattcttgccattcagatctttcaatgagaaagaagacaaatctgtttttaccaattcaaagtcgggagcgactttacctacttgtataaattcaccgatcagttttaccggttgtcctttgaaatttgttgttgccataatgcatatctatttaaaaattactttatatagaaacaacaattacccaaaatatgttcacggaaaaccttttccaaattgaatttgttatctcacaacgaaattattctagtaacaatttaaaatagaaaatgtatggaaacagtattcaatgagattcaacattcagtaaagaactggtggacttcccttcttctgggaatcgtgtatattatcgtagccctttggctcatgttctcccccgtaagcagttacatagctttaagtattatcttcagcgtatctatgctgttcagcggaattttggaaatcattttcgccatcagcaacaagaaaggtgttcccagttggggatggtacgttgtaggaggaatcatcgaccttattctaggcatttacctgatcgcttacccgatggtcagcatggaagtcattccgtttatcatcgccttctggctcatgttccgtggtttctcttctaccggctattccatcgacctgaaacgttacggaacccgcgactggggatggtatatggcattcggcattctggctatcctctgctcattgctgatattgtggcaaccagccataggagctctttatgcagtctacatgatctctttcacattcctcatcatcggacttttccgtgtcatgctttcatttgaactaaagaatttacataaaagaaaataaaaatctttcggcacttactttggtattttgtttatctttgtaggcaatttacatgaatcaactaattaaacagaaagaaaattatggcaatgcatacatggtttgagtgcaagatccgttatgagaaagtaatggaaaacggaatgcagaagaaagttacggaaccttatctggttgacgcactcagctttacagaagcagaggcacgaatcatcgaggaaatgactccgtttatctccggagaatttaccgtttcggacattaaacgtgccaactatagtgaacttttccccagtgacgaagaaagtgccgatcgctggttcaaatgcaaacttattttcatcacgctggatgaaaaaagcggcgcggagaaaaagacatccactcaagtgctggtacaggctgccgacctgcgcgacgcggtgaagaagctggacgagggaatgaaaggtacaatggccgattatcagatcggaatggtatccgagactccgttgatggacgtctacccttacagtgccgaaccgaatgacaaaccggagtttgaccccgcaaaatcataaatgacaatgagtattgctgacaatttaaagcaagtactggccgagctcccgcaaggagtccggctggttgctgtctcgaaattccatcccaatgaagcgatagaagaagcatatcaggcgggacagcgtatttttggagagagcaaggtgcaggaaatgacagctaaatacgaaagtttacccaaagacatcgaatggcattttatcggacacttgcaaagtaacaaaatcaaatacatgataccatacgtagcgatgatacatggcattgatacctataaattactggcagaagtcaacaagcaggcaggcaaagcaggacgtaccgtaaactgcctgttgcagatacacgtggcacaggaagaaacaaaattcggtttcagccccgaagaatgcagggaaatgctggatgccggagagtggaaagcattggcacacgtgcgtatctgcggcttgatgggaatggcaagcaacaccgataatatcgaacaaatcaaccgtgaattccgtttattgagcagtctctttaaagagattaaagaaaactggttcgctgactcggacgtctttcgggaattgtcgatgggtatgtcgcacgattatcacgaagccattgcctccggaagtacgttagtacgggtaggaagcaagattttcggagaacgagaatataatatttaaccaattattatcaccatgaccgatttaaaaactactttcgcagggctttccctcaggaaccctataatcatcagtagctcgggactgaccaacagtgtcggcaaaaacaagaagctggccgaagacggagccggtgctatcgttctgaaatcactgttcgaagagcaaatcatgctggaagcagaacaactgaaagatccagctttctatccggaaggcagtgattacctggcagagtacattcgtgaacacaagttatccgaatatctgactttgataaaagaaagcaagaaggtatgcccgattcctatcattgccagcattaactgttacagtgattccgaatgggtcgactttgccaaacaaatagaagaagccggagccgatgcgatagagatcaatattttggctttgcagtcggacatacaatatacatacggttcttttgaacagcgtcacattgatattctccgccacatcaaaaaaacggtaagcattccggtcatcatgaaattgggtgacaacctgactaatcccgtagcactgatcgatcagttgtatgccaacggtgcggcggctgttgttctcttcaaccgcttctaccagccggacatcaacattgaaaagatggagcatatctcaggcgaagtattcagcactgttgccgacctgggcactcctctccgttggatcggcatcgcatctgccgcagtagacaagatcgactatgcagcttccggtggcgtggctaacgcagaagcagtagtcaaggctattcttgccggtgcttcagccgtagaagtttgcagcgcgatctaccagaatacaaacgcattcatcggcgaagccaaccgcttcctctccgcatggatggaacgcaaaggcttcaacagcattgcacagttcaaaggcaagctgaatatcaaggatattcaaggcattaatacttttgaacgtacacagttcttgaaatacttcgggaagaaagaataaagattaaaggaagaatttattttaaacgaagaataaattttgaatgaagaatgaagaattatctgcgctctaatgccgcatagtaaattcttcattcttcattttttaatttttaatttcttctacagcaggttacttgccagctcgcttagctcgctccgttctccctttaccaagttcacgtgcgcaaagattttctggtctttcatacggtcaatcatatataccaggccattggactggctgtccagatacggctggtcaatctgttggatatctccggtaaacaccatcttcgtaccttctcccgcacgggtaatgatggtctttatctcattcggcgtcaggttttgcgcctcgtcgatgatgcaatacatttcgcttaagctgcggccacgtataaatgccaaagcctcaatgaccaactgttcacttttctgcatatcttctatacgcttcacttcagtagagttggcagcaaactggcgttttatcacgttcaagttgtcgaatagcggctgcatataaggagccactttctcctgcgcgtctcccggaaggaaacctatatccttgttggaaagcgcaacgacagggcgtgccagcagaatctgcttgtaatcggtcagtttgcccaaagcggcagccaatgccaacagcgtcttacccgttcccgcctttccggtcaacgctaccagcttcacattcggatcattcagaatctcaaaagcaaaactctgttccgcgttgcgtggttcgattccgtaatttttacccttcatcacccggcagatagaatgagtaaaaggattgtaacgtgccagcaccgtattccggtcactcttcagtacgaaacattcgttaggatgaatcagatccttaaaatcaaattcactcaagtcgataccctccttagaagaataaatacggtcaatcaatgccggatctatattttcaaagatttcattggatttctcaaagacatccacattcaccaccttgtccgtgatataatcctcgcacagcagaccgatggaacgcgccttcatacgcaggttcacgtctttggtcaccaataccgttttcattttcggatatttggaggcaagaaactcggttgccgccaaaataaaatgatcgggcttcttcgccggaaaagcagcccatacttcgggagcctccacctgaccggtcaccacaaacaggcgtcccaagccttcgcccagcttcactcctttcgagaaaatctcgtcactcgtcagcgtatccaactcacgcacaaactcacgggcattgaaattaatctgctcgtttcctttcttgaatttatccaactcctcaagcacgacaaggggaagataaatatcattttcctggaaattcttcaagcaattataatcgtgaagaataacattggtgtctagcacaaaatttttcttagttcccatgatttcttagatttaaatgttgatatttgcaatctcaattcgtcaacctcacttatcgcagtccggttgacggttctaaagataaacaaattagcgggcaataaagattgcccggcgttaaatattataaaacatggactatcagaacactttaaagtacttatatgaaagtgtacctatgtttcagcaagtagggaaagaagcatataagccgggattggaaaccacacaaaaattagacgaatatttcggccatcctcatcgacaattcaaaacgatacacattgcgggtacgaacggaaaaggttcctgttcgcatactatcgccgccgtattgcaatcggcaggctaccgggtaggattattcacctccccgcacctggtggactttcgcgaacgcatccgcgtcaatggcgaaatggtgcccgaagaatacgtagttgactttgtggaaaagcaccgtcctttcttcgaacctctccaaccttcgtttttcgagcttaccaccgctatggcattccgttattttgccgacagaaaagtagatgtagccgttatcgaagtaggaatgggcggacgtctggactgcaccaacatcatccgtccggacctatgcgtcatcaccaacatcggtcttgaccatacccagtatctgggcggtacactcgaaaagatcgctgaagaaaaagccggaatcatcaaggaaggcgtaccggtggttatcggaagagccagaggagcggtgaaaaaagtattctccgcgaaagcagaggagatgaacgcccccatcacgtatacgaaacagactgccgcgagcaacgacgtcgctatatatagctatccggaattacagaaagaaaggaacaacttttacgaaatgacgcggcaaggcctcgaaatgttcaaaatgctacaagacaaacaccggaaaaatgagaagtctctggagaaattactgtctacgttcaatctggacaatgccctacgcgcgatggacagaatactcgacaaaagaaaaagcgcgataaaactcagcaataatcattttcaggacggtatttttctggaacttaccggtctctaccaagtcgaaaacggctttactatcctgaccgcccttgacgaactggtgaaaatgggataccacatctcacccaagaactatttcgagggcttttccaatgtatgcgaactcaccggactgatgggacgctggcagaaagtgtacagctatccggatatcatctgcgacaccggacacaatgtcgacggaatcaagtatatctgcaagcagctcgaagctatccgggcaaacgacggaaaaaagatccatatcgtattcggtatggtcaatgacaaagatatcagcggtgtactgaaaatattgccgaaagacgccacctattatttcaccaaagccagcgtgaaacgcgcgcttccggagaacgagttgcaggaactggctcagaaagccggattgaaaggcaacgtttatcccactgtggtagaagcggtgcaggcggcaaaaaaagactgccccccgaaagacttcatctttgtgggaggcagcagtttcattgtcgccgatctgttagcgaatcgcgatacactcgatctctactaacgcgttctttggcagagcttttacggcaatcgccgagcgtgccgggaaagttctgtcaaaataagtgacatacacaccattcatccccgcaaaaagggacatatcctgaagaaacacggtggttttgacaatgtcgtccattgtcaatcccgcctcttcaagaatgtactttatattttccaacgactggcgggtctgtccttctatcccttccgccatctgccccgtagcggcgtcaataggcaactgtccggacacatataccactccgcccgcttccatcgcctggctgtacggaccgatagctccgggagctttctcacagcaaattacttttttcatatttctataattgttatttatataaggcacaaagttatagaaatattctatcccctctcataaaatatcgtttttaatatatccagccgtctcttttattttggcttttccaatataagtagatttctctcattgatatcagaaaacgaaacataaacaaaaaacctcctgtgagattcgtttcacaggaggttttttattatttgttcgaaaagattattccgctttttcttttgcaggagtttcagcagatgcaggagcagcttcaaccggtttttcaacctttacctcttctcttgatacgtttaccgtaacgttgacagcagaaggttgtccctggtaaggcatacggttcttcgggtcagcaccatattggttaggacctacagtaccgtcagcaaacaacatataaagtccgaaaatagcattcacgataggaatgaacatcaacagaatcaaccagccggatttattcaagtcgtgcagacgcttcacgccctgtgccagagagaaccacacagaagcaaccaaagcagcaaggccgatcaacaagccgaatacagagccaccggcagaaccgctggaagcaccaaaaataaaagtacctacacccaacagcatagcgatccaagttactataccaccaacaataccagacaggaaatattcgattctacgaatacgaccgtcaaaagaaaaaggagctttgaacataatttataaaatttatattaataaataagtgagttgttcatcgtgcatttattacatggaagcaaagttataaaaaaaataaaataaaaaaagttctttaaggaaaagaataaaaaaataaccgaatcccgtgcagtatttcctatttccctgcatttaacctatgaaacaaagaaaaagtagcaaatcaaaccatgtatcattaacctacaacctgagcttgaacaaaaggggaaaaattaaaagagaaagagagagtttttttaattaacgtccccaaatgaaaggggaaggtttgaaaccttccccttttccctttcatcacaatcgagggtgcagttcattttgcttttatttgcagtatttttgaatcagctcatccacattcggatctcccagttccttagctttcttaaagttcccgcaagcctcgtccttcttctgcaactgtatctgacaaagccccaacaagcgataggcttcggcatatttcggatctgttttcagcatgtcattcagaatacgaaccgcctcttcataacggcctacgcgcaaattcaccactgcgtgttccgcctgataagtcaagtcggcaggattcagctcgatagccttagcgatatcatccaacgcacgctgatactggcgggctttcagtgccgcctgctcacggtaataatagaatacatcattcacttgtcctttcactgcggtatgataggcgtcataatcaagcatggcattccgtgcctgaccggccgccatattcatttgcgcacgttccagcagataaggagccaactcagcggttatcggctgcggacaacgggcaatgcaactatccatcaaggtcaagacctctttcgggtcgcttttcatcaattcctttgtcttggcggcactgaagaaggtagcgggagaagcaagattgctggcgtttactttctcataagcagccaaagcgcctgcatagtcttgcttggcaaacaggatatcgccttccatctgaatgtaaacaggcaacggatcaatagctatcgcctgacggacattctccaaagcggtatcatacgtccaatccttatacgtcttttccggcttggacagttggtaagaatacatcatcttacctatattataatatgcatcgtctttcttctgagccaccttcaacgcgcggttaaagtcgtcaacggctttatcataccaagactggtcatccttgcctttggctatatagtaattcgcacggcggagatacccgtccgcgttgttcgggaactgagcgataaaatcatccaagagttctccatagtcgtctcccgacatctgagaggaagccataaacaaatagaccaatgcctggtcttccgtttcgggcaatcccttccggataccaatgcttctcaacgttgcatcccccagagaaagggcattgatcttctgcgccatcgcaaaagccgcccctgccgcataacaagtggttatcgtgtccagtcccgacgacttctgcgcaatgccgaacacctgtccttccgcgttcatcaccggacagctcaccatcttgtctttcatccgcatactcaatgtataataatggtgctctcccgccactttggatacctccttcaccttgccggaaacgcaggcgatactcttctgcgtggaataaggaagcatccacgcatcacttcccactgccggagcagcagtcgccaccaccagcgcaggcactttcttttcagtaattcctacacggaactttatgacatcatacatatcattcgctcccaatatccggctgaccggcatttgcttaccgtccgccgtcacgaccaccgcacgctccgctcccttgaaaagagaaaaatcggataatgccagtccgtcttcggagacaaaaaatccgttaccggtattcagcattttatcattcttatcgtaggtcacgaccgagaagaccgcacgtttcgccttctctacccatttaggggtctgcgccatgcttccctgcaccagaaagaaaagcgccaaaggtagaattaaaatcttcttcataatattactcattgtttctttgtttcaccgcctcgtaaatcaagatacccgcagctacggagacattcaatgactcgatagtgcccagcatcggtatcttcacccattcgtcgcagagcgccaggttatcgtatgacacccctgtatcctccgctcccataatgatacacaacggtcccgtataatcagctttcgtataatcgtaatctcccttttcggtagccgccacaatacggaagccactgtctttcagatactgaagcgtcgagcgcaagctctgttcacgacatacgggaagcgtatgcaacgctcccgccgatgttttcaccgcatcggcatttaccgacgcgctgccacgcgcgggaataatcaccgcatctacggcagcacattcgcaagtacgggcaatcgcgccgaaattgcggacatcagtcactccgtccaacattacaaaaaacggattcttgccttgctcaaacaggaaaggaacaagatcctccgtcttctgataagtcacggaagaaatgaaagcgatcacaccctgatgattcttccgggtgatacggttgatacgctccaccggaacacgctgaacgggtatcagcgtacctttcaaagctgcaaaaagctctttggaaagatcactctgaatatctttcttcacgaggattttatctatttcttttccagcctgaatggcctctatcacggcacgaacgccgaaaatcatttcacttttgtcaagcatcttatttatttactattgtactatatttacgaattactatttatacattaccgtaacggcaatgccccaccgctaatcgctgttcaacagcgccttagcgttgctgagcgcggcttcggtcaaagtggcgccactcaacatatgggctatctcctccacccgctcctcatcagtaagacggcggatatggctgttggtttccgtatcgctatcttttttgtacaccttataatgcgcccgtccacgagcggcaatctgcggcaggtgggtaatgctgatcacctgacggttctgctcgcccatctcctgcatcatatccgccatgcggtcggctatctcaccggaaactccggtatctatctcgtcaaacacgatggtcggcaacttcacggctcccgcaatcatagctttgatggaaagcatgacacgagctatctcaccccccgaagccacagaagaaatattctgcaatgtaccgttcttgttggcggaaaacaagaagctgaccgtatcttctccctgcaatccgggttctttcttcaatcccatctccacctggaaacggacattcggcattcccaacggaatcaggcgggtggccaactgcttttccacctcacgggcagccttgacgcgggctttggtcagcaaggcagcctgctgcttcacctgtttgaactgttcctccttgcgggcggtccattcggcaatccgttcatcgtatgaagtgatgtcggacagtttgacacggtattcttccgtcaaagccagcaactcatcaagcgtctgtacccgatgtttctgctgcaaggaataaatcaagttcagacgctcgttcacttcctccagccgtgccgggttgaattccaccgattcaccctgcgaagagatttcatacgcgatatctttcagttcgatataagcgctctccatacgttccgccagttctttggcaggctggtagactttttgcagattgttcagcgtgttcagattgtccttcagataagaaagcagtccgccttcgtctgaggcgaacacctgctccacccggtaaagccctgccttgatttcctccgcatgactcagtatttcagcttcctgttccaactcctcctgctctccttccacaagacgggcttcttcgagttgctccaattggaaacggatgtaatcttcgtccgaacggcttttctcggcaagcgagactaagtccgccaattcgcgttccgtctgcttccatccggcataacaggtgtggtatttttccaacgcagtgtcgttatgcgccagaatatcaagcacattcaactgaaagccttccttgttgagcaacaggttctgatgctgtgagtgcacgtcaatcaaccgctctcccaactccttcacctgcgccaacgaagcaggcgtatcattgataaacgcccgactcttaccggacgcctgcacttcacgacgcaaaatgcactcttcatcatattccagctcattgtcttcaaaaaacgggcgcatcccataagccgatatatcaaaacgagcttctatgatacatttagaagctccgcgacgaattgactttacatcggcacgctgtccgagcagcagcccgatggctcccagaataattgatttcccggctcccgtctcacctgtaataacggaaaagccggtgtcgaaactaatatccagtttctctatcaatgcgtaattctgaatgtatagtgaacgtaacatttgaataagttgagagttgagagttaagtgttgagagttaagtgttttaattcatcagacaggcggtcgatgatatcccgtgccacttctgtcttcgacttgagcggatagtcggtacggcctttccggtcgatgatactgattttgttggtatcatgacggaaaccggctcccgcgtcgttcagagagttgagcacgataaaatcgaaattcttccgttcgagttttccttcggcattctgctgctcgttgttcgtttcgagggcaaagcctaccaacaactggtcttttcttttgacagcccccagactggcggcaatatctttggttgcccgaagatgcagcgtcagctcttcttctttctcgcgcttgatcttcttgtcggccaccatttccggacggaaatcagctactgcggcacacagtatggctgcgtcggaatcgaagaaacacgcttgcgaagccgcatacatttcctccgccgattccacatcgatccggcgaatacgggagtgccgcgtttccagttgcacaggacccgcaatcaacgtcacctccgcaccacgacgggcgcattcttccgccaaagcaaatcccatctttccggaagaatagttgccgatgaaacggacgggatcaatcttctcgtacgtcggtccggctgtaatcatgaccttctttcctttcaactcaccgtttgcggcaaaaaactcgtccaatacccggatgatattttccggttcttccatccttcccttccccaccaagtggctggcaagctctcccgtgcccggctcgatgatatgattgccgaacgaacggagaatatccagattcttctgggtagaaggatgcgcatacatatcgagatccattgccggagcgacaaacaccggagctttggccgaaagataggttgtaatcagcatattgtcggctatcccgtttgccatcttgccgatggtagaggcggtggcgggagcaatcaacatggcatccgcccacagccccaagtctacgtggctgttccacgttccgtcgcgctgtgcaaagaactcgctgatgaccggcttgctggtcaacgccgaaagagtgatgggagtaataaattcttttcccgccggagtaatcacgacctgcacttccgctccctgcctgataagcccacgaatgatgtagcaagccttgtacgcggcaatactgccggtaattccaagaattatcttttttccttttagcattatttcgttatcagattgctcatttcacgcagacggatttttgtcaataccgctttcgtattcagcgtgaaatcactgttcaaaatccaactgtaatatccgggatctttcttcaagacctcagctacagacattcctttgtactttccgaagttgaacacttccactccattatcatcatagaccatgcgaccggcaaagtctacattcttggaatagctggagtagtccgccaaaaacgcaatatcattctgcaactcgtcatagcggtcgagctgcgctttcagcacctcataagtggcacgtgtgtccgcctccgccgtatgcgcatcctccagattcttttcgcagtagaatttgtaggctgccgaaagggtgcgttgctccattttgtggaaaatcacctgcacgtccacaaatttgcgcttcgtcatgtcgatatccactcccgcacgcagaaattcttccgccagcacaggaatgtcgaaacggttggagttgaatcctgccaaatcgcatccttcaatgtcacgggcaatgttctttgccacttccttgaaagtagggcaatccgctacgtccgcatcgtaaatgccatgcacggcggaagaggcttcgggaatatgcatctccggattgatacgcaaagtcttggattcctcattcccgttcggataaactttcaaataacagatttcaacaatacggtctgtgttgatattggttccggtcgtctcaagatcgaaaaagacgatgggatttttcaaatttaatttcatttctggttattttttcgtttcaccacagaggacacagaggacacggagggttgtttaataaatattcaaaattttcctccgtgtcctctgtgtcctctgtggtgaataattaatcattcaacatcatcggcatcagcaacatcagcaagtcttcgttctcttcctgctctacgggaatgattactccggctcgtgagggatcggccaattcgataataacttcgtctgcggaaatgttgttcaggatgtcgatcaggaacgtagatttgaatccgatactcatggcagctcccgcatattggcacacctgtgtttcttcggcagaggtggagaagtcgatgtcctgtgcggaaatgacaatctggttttcctgcatacggagtttaatcaagctgcttgcctgcgaggagaagatagacacacggcgcaaagctcccatcagctgctggcggtctacggtcaacttgtgagggttattttgaggaattaccgagttgtagttcggataacgcccttcgatcagacggcaaaccatgcgatagctttcgagcatgaacacggcgttgcgttcgtcgaattcgattgtcaccatgccctgttctttcggcagaagattcttgagcagcgtagccggtttcttcggcaggatgaacgccgcacgctcgttgcctttagccgccaatgtcttgcaacgcaccagcttatgaccgtccgatgcgaccatcgtgatgtcttctgtcgtaatatcaaaataaataccgttcatcaccggacggagttcatcgtcggcagttgcgaataccgagcggttgatacctcccagaagcacttccgcttccatctccacgcgaactgcattgtctcccaatgtagccgactgagggaattcgtccgcattctgtcccatcagactatattttccgttctgatactgcaccgtaatttcataattgtccgggttgacatcaaacgtcaatggctgttccggaatctctttcagtgcatccagcaacgttttcgccactacggcaaaacgtccgttcgtatcgctttcattcacttctacggtagtaaccatcgttgtctcgctgtcggatacggtgacagacaatgttccatcttccagttcgaagagaaaacaatcgaggataggcaatgcgtttttcgaattgatcacgcggcttatagcctgtaaatggctagaaagagcagtacttgaaacgataaatttcatatattttcgtgtatttaagttttaaatattctaacgcacaaagttacgaaaaaagattcgggcagcccaataaaacaaaagaaaaaacagtctttgtgtgagggatattcctaaaaagtcgtaacttcgccgcagaatttaaattaatcgcaatggaatttacaggaaaaatcatcgctattctccctccgagaggtggagtatcaagaacaagcggcaacgagtggaaatcgcaagagttcgttatcgaaaatcacgaccaatatccgcgtaaaatgtgtttcgacgtattcggcgcggacaaaatcgagcagttcaatattcagatgggcgaagaactgaccgtatcatttgatattgacgcccgtcaatggcaggatcgttggttcaacagtatccgtgcatggaaagtcgaacgtgtaggcgcaggcgctccaatggctccgggtgctcccgttcctcctccggctccgtccgctactccggaatttactctgggcgacgcgaaagacgatctgcctttctaaacaaaaaaaatcaaggcgtaacgatacgcactgaaaaactcccggtgaatttgatttctgccgggagttttttatgcccgcactttgtaaagattccgcccacaggtaaacacttctcagcccacagatgaacaacacccggacacgggctcaggggaataagcccacaggtgaaaaaaggtcagcaataacgtcggcaaccaaaacccagaaatactatcgctgatagtatttctattctcttctaatctcttcttttctcttctcttgggttatggttgggttatggttgggtttttgcgccctgccagaaggcgtttcagcgcttttagtttttgcaaaaacagtgttttttcgcaggtagttttttcacctgtttttcctcttttcaaatccggtttttctccgttcggaaatctttttccaatcaacccgaaatgatttttccagcttgtctttagtcggctttatacttcaaaacgatggtgggatatgccacttcatcagcacaagtaaactgagcaaaaagtatgaaattgcgaaaaaattccgcattgcgcacaaagaaatcgggcacgaaacagacctgtttttccacttgccggaagaggtgttcgaaatctgccatcagcataaaatgataagaatcggacaggttactcatccccgctttataggtaacagcactgtcaagcacttcgcctttatccaaccggagtatatagtccgacagactgtcttcgtccggtgctaataataaacgaccggcataaaaggcagcgtacagctccgaagccgactccacgaaactagaaagttgcgtaaacaacgttgtctgaggcagccggtagacaggataggctttatccgcagtataacaaaaagttatacggggattcttatgcctttctacagaggatgccgtatttgtcagggagcgcatcatcctctcagcctccgtcacatcgggcacagaaagactcagcacagacgccgcgtcccgcaatgtatcttcccgctggaaaagacaggtcaccaaatcatgcccggtgttttccatcagataacgcgagatttcacggtttctttcctgcattccgctatcatcgtccatccctgccggtatatattcacgactgtcgccataggcaagcagagagttccagtccgtgacactttgtttgctaaaatagaaagtggtggaaggcaacacttcgcccggaaatcctttgacagattcttgttgccgaagctggttgataaaggcgatacaggtatccggatcatgactgacacctgtaaaatagacataatcgtccttcatcttcatgtcaaactccgtccaccctatcatgccgttcacacgggtataaatggtagcgaccgctctgctttttttcggtgcgtttatctgcatgaaagcaggatcatccgccagagaatctcccttcttgtaggtatcaatgacttcttctatcagttttttctggaagctcaacaccatgaaatcggacgtgagatagcaagcgaggaaatcaccgtccgccatcgggtagattattatcttttctcctttgtaatcgaaggttttcggcggatagagtgatgaaatatatttttgcacgaatctgtctatcagctctttatcaccttctcccaatctgcaatagagcacttggtcgcgttcgctgtccggagcatggaaacttatcagcatttgattcatttgccgactcaatccgtggggactatcttcggaaagttcgtacagggaatgttttaagtaggaaaacagcttggatacatacaggtattgccgttctttgctgcaagtcagattatcggtttcagtcacaaactcaagcacatcatcggtagcaaacactgccgaagtagtggcggggaccagctcgtaaagattgaaatttctctgtccgtcagccgccgacagcctgaaaaaagagtacatgacgaaacctgcgcacagaagtacaacagaagaagtgaccgctattttcactatcgtacgaagtttcataatatttgctgtttatctgctcggtgcaaaaataataatttctacaaagaaaacaaaacttttgctaaaaaaacaccggtaattaaagaaggatttccaatccgtcaaatgccaggtgaatattctccggaagtctccgttcagcttcggcatgcaagcccatatcatgactcatgtgtataaagtatgtcttctttgcctgaatgcgccgcgcaaccgccaaagccgcctccagattctgatgtgtaggatgcggggctatgcggagtgcattcacaatcagaacatccacgcctgacaattgttcataggattcttcgggcatggtcagcatatcggtgatataaccgagttttccgatccggtatccgaaaatcggcaaccgcccgtgcatcacacgcaggggaagcacttcggtatggtttatgtaaaagggttgtcccgccacaatctcttgcaaaggaatattagggacaccgggatacgaatgttccacaaaacaatagggcatacgcgaacgcaatccgcgtgctacgtattcttccgcataaataggaactgaaccaaactggcagaacggacgaagatcgtccagaccacccacatgatcgtaatgctcatgcgtaatgagcactccgtttatcttcttgaaagggagatgcagtacttgctcccgaaagtcgggaccgcaatctatcaatatgcgcgcatcttccgtctctacaatggcagaggcacgcaacctgttatctttcggatcggcagaagtacaaactgcacatgtgcaaccaatctggggcactcctgtcgatgttccacttccaatgattcttaccttcatacttcattaaattacgtttacttccgggtggatatcgataccgaatttatcgcgtactgaagcccgcaccgcatctgagagtgcgacaatgtcactgcctttcgctccaccccgattcaccagcaccaatgcttgtttatcgtggacggcggcaggtcctaaggattttcctttccatccgcattggtcgatcatccatccggcagggattttcacacgcccgtcaggaagctcatagtaaggtatgcggggataatcccgctgcaaggcttccagcttttctttcgccacaatggggttcataaagaaactgcctgcatttcccatcactttcgggtcgggcagtttactttcgcgaatctcaataatcactttacggacaatgggcaacgtcggtgcaggatactttgcaagctcctggcgaatcgttccatagtccagcgtataccgttcttctttactaagacggaagcggacataggtgacaaaaacggatttgttctcaggacgcttgaaaatgctgctgcgataggcatactcgcattcttcgacagagtaaacacgcccgtatccttgaacgttcactgtctctaccgccgttatcaggtctttcacctccactccgtaggctccgatattttgcacggcactcgctcccacctcaccgggaatcaacgaaagattctccgctccataccatccatgctccacgcaacaggctacaaaatcatcccacacaactcccgcgccgacacgcagggatacggtctgagagtcttcggccgtcacttcgatacctccgatgcgggaatgcagtatcagcccgtcgtagtctttggtaaacagcagattgctgccgccgccaatatgcaaaaaaggtgtcgtaacggcaccttgcacaatatactccttcagttccgctactgaggcgtattccagaaaacgggaggcactgacatcaatgccgaaggtattgtagggcaaaagagaatacataatctatctgtttaaaaaagttatatactggtgtcttcaaacttatacagctcccatcctccggctttccgacggaagtacaggatgttggagaaaccgttgccgatacctttcaacgcaagaatcttcgttgtcgagttatcatcgtttctctgtccgtagttgatattggagagacgttcggaaggaagttccggtttgaaggcaaaccattggtcccggtcgagcgttgtctccaaaatggagaagtcgtcatccggatcgcaggtaacaaaaatcaacggttcgcgtatgcgccgactccggaaaaggctgtcgacggcaaaacggccgaagaactccacaaagtcctcattgtcgtcctgctcgataggacgcaaattgatggcttccagcatccacgctcctttgaggcgttcaaagtaatactttttcatcatccgtgtcttcacgaatatccactccacttgcacagaggtaagcgcagtatctcctactaaatccatatcttcttctttatcaaacaggagcgtatagtaatgctgcttggtaaataagtcgtcatgcttccaatggtgttcgtcgatgttcagcttcttgtctccattgtagtagggcaacggaaacttcacacgctgacgctgcaacacgtcgtcggaggcaaaattatagatgaaatcgtcgaaagactcgtcggcctgtataggctgcggctcttccggcaattcttcctggtggactgaatcggttttgtaccggatggaatccacctcttttgtaatagatgcgaaggggtcaatcttagctttcttgtttccacaggaactcagcataccgagcagtatgacccctgcaattagttttttcattattttaatttctctcgtaacttttcaagcatatccaccgtcatgctttccaaatcgtaggcgggcttccatccccactcttcgcgagcacaggtgtcgtccagactgtcgggccagctatcggctatgcgctgcttcaaggggtctatttcataaaccatctcaaactgcggcacgtgcttcttgattgcctggtatatcgtttccgggtcgaaactcatggaagcgatattgaaagcattgcggtgtatcagtctttccgactcagcttccatcagtgtgatcgccgcgttcagcgcatccggcatatacatcatatccatcaaagtgccttgcttaatggggcacacaaacttctctcctttcactgccgaatagtaaatatcgacagcatagtcggtcgtgcctcctcccggaggggtcacattcgaaataatgcccggaaaacggacagcacgggtatcgacaccatatttattaaaatagtagtcgctcagcaactctgtcgttactttcgtgactccatacatggtacgcggacgctggatcgtgtcttgaggcgtcttggtgtgaggcgtacttgcaccaaacgagccgatagaactgggagtgaacaccgcgcatccttgttcacgtgccacttccagcacattccataatccatcaatacctatcttccaagccaatttgggtttcgactcggcaactacggacaacagggcagccaaattataaatcgtatcaatgtgatactcttttaccacagatgccaccgcctgcgcatccgtcacatcagcaattgccgaaggaccggactctttcaattctcctttaggctctgcacccggtatataacctgctacaacatttgtatttccatagcgtttacgtaactccattgtaagttcggacccgatctgtccggtagctccaataatcaaaatgtgttccattttttttctgacttagaataataagcttaaatagtgcgcaaagtaagcacttttttttcagattttaatcaaaaagacattgatattccaagaaaaattgtgtcctttgcaatataacttaatcacataaacaccatgtacggtaaaatgcaagaattcctcagccagacattggctgaaatcaaggaggccggactttacaaagaagaacgcctgattgagagtgcgcagcaagctgccattacagtaaaaggtaaagaggtactgaacttctgtgccaacaattacttgggactgtccaatcacccccgattgatcaaggcttcccaagagatgatgaaccgccgcggatacggtatgtcgtccgtccgttttatctgtgggacacaagatattcataaagaactggaagcggctatttccgactatttccagacagaagacacgattctatatgctgcctgcttcgatgcgaacggcggggtattcgaaccgctcttcaccgaagaggatgcgattatctcggactcgctgaaccacgcttccatcatcgacggcgtgcgtctgtgtaaagcgaaacgctatcgttatgccaatgccgatatgaaggatctggaaagatgtctgcaagaagcgcaggcgcaacgtttccgtattgtcgtgacggacggtgtgttctctatggatggcaatgtagctccgatggatcagatttgcgatctggccgagaaatatgatgcgctggtgatggtagacgagtctcactcggcaggagtggtaggcgccaccggtcacggggtcagcgaattgtataagacacacggccgcgtggatatctacaccggaacgctgggcaaagctttcggtggtgcgctgggaggatttacaacaggccgcaaagagattatcgacctgttgcgtcaacgcagccgtccgtatctgttctctaattcattggctccgggtattatcggcgccagccttgaagtattcaaaatgctgaaagaaagcaatgcgctgcacgacaagctcgtagagaacgtgaattacttccgcgacaagatgaccgctgccggatttgatatcaaaccgacgcagagtgcgatatgcgctgtgatgctgtatgatgcgaagttgtctcagatttatgctgcacgtatgcaggaagagggtatttacgtgaccggtttctattatccggtggttccgaaggaacaggcgcgtatccgtgtgcaaatctctgcaggacacgagaaagctcatctcgacaaatgtatcgctgcctttatcaaagtgggtaaagaactcggcgtattgaaataaaactttttcatatcttccattgttattatcggggtgcattagaagtgccgacaagataacaatggaagatttttttatttatatatggaagaattgactctcacgactcctgcccttcttttctcggcagtctcactgattttattggcttacaccaatcgtttcttatcgtacgcacagcttgtgcggcagttacgcgaccgctatatggagaatcctacggatatcacggtagcacaaatagagaacttacggaaacgtttgaatctgacccgcaccatgcaaggactgggaattgcgagcctgtttctctgtgtggtcagtatgtttttcatttatatcggactgcaactgctgtccgcctatgtattcggagtggctctgctgttgcttatcgcttcattgggcgtgtctttccgcgaaatacagatttccacccgttcgctggagatttatctgggaacgatggagaaaggaaagaataaagacagaaaatgacctgtaaacaaaaaagagggtgtgtcgaaaccctcataaactaaaaggggagttttgacacatcccctttcataacttttatttgtagcttattaagtatgtgtaacttattaacgctgtcccaattgtgagtctacaaagaaaattccggtatcaccggctttcttgattttgtcaacaatgccttgcactgtagcttcttcttctacttgttcgcgaacgaatccccacaagaaatcctgtgttgctttgtccttctcagcagcagctacgtctaccagtttgtctaccaattgagaaacatggcattcatgtttgtaaacgtgctcgaatacttccagcggactaccccaaccgttaggaacaatatctattttatcaactttagcggttcctccacgtttgataatataatctgccatagcataagcatgcgccatctcttcctgagactgcttcttcatccaatgggcaaaaccactgaaaccttctttctcgaaatagaaagacattgccaaatacaggttagcagaccacatctcagcagtaatctgttcgttaattgcattttgtaatttttctgaaatcataatcgtatcttttattaagttgttaatgtagtttctttttgaactcattacaaaaataacaagatttcagttcagattgttccatgtaccccgtatttttaaactacattcacactttgattgtagcggtttattttttatttacaccagctcgtcggaagtatatcctttcggaagctcacgacagttatagccggaagccattatttcaccgtatgcaccggcagaacgaagggctatcaggtctccacgcttgactttgttcagatcaatcgcttttccgaaaacatcggatgactcacatatcggacctactacatcgtacgcttccaccggttcttcggaagtcaggttttccatcttatggtatgcctgatacaaagccggacggatcaaatcggtcatacctgcatcgaggatagcaaatttcttcttggctccttgcttcacatacagtactttggatatcaacgtaccgcattgtcccacgacggcacgccccaattcaaaatgaagtgtttgataaggacgcagtttcagttgtccggcataggtggcaaaataatctttgaagttcgggatagcctgacggttaggatggccgtaatctatccccagaccaccaccgacatttatatgttctaccagaatccgatgcgcttccaacttgtcctgcaattcattgacacgattgcacaaagcgacgaaatcgcccatatcgagaatctgcgaaccgatgtggaagtgaaggccgataaacttgatattcttcatttccaaagccacgtctatcactttatccatatcctgcatactgataccgaatttattttcggcaagaccggtagtgatattggcgtgagtatgcgcgcctacatccggattgatgcggaaagcgacattggctattttgttttgagcggctgccagctcgttgattacttcaagctcgggaatagattctacattaaaacagaagattccatattctaatccgagattgatttcccagtctgctttacccactcccgcaaaaacgactttattggccgggaatcctgcacggatagcggcacggatctctccaccgctcacacagtcggctcccattccgctttcacggatgatggcaagtaccttcggattggcattcgctttgacagcatagtgtactgaataattaggatatttggcaacctcatggttaatagccgacaatgtatcacgcagcactttggtatcgtaataatagaaaggtgtctgcaaagtgcggaatttatcgattggaaatattcccttcataattcaaaaacttgtttagttggttaaaaaaaagcgcttttatcagttcggtaaaagcgctcatattattgatggaattatttgccgttgaaaagcatatcgctcaacgactgtaaagccgccttcttgtcacactcccgaatgaggaaggagatattgtagttgcttcctccgaatgaaatcattcgcaccggtatgtcgcgcatcgcatcaagcgctttggcttcaaaaccgacattttcccattccaagtcaccaacaacgcagatgatacacatttctttatcaacggttaccgttccatatttcttcaggtcatccagaatttcattaagatgtttcgtgttatctatcgttacagaaacaccgacttctgacgtacagatcatatcgatggatgtctgataactttcgaagatttcgaacaccttacgcaagaaaccgtgagccaataacatacggctggatttgatcttgatagcagtaatgttatctttggcggctactgctttgatttttcctttctctgtatcattggaaatcaatgtgccgggagcggtcggatccatcgtattcagcaaacgtacaggaatattggcatatttagccggctggatgcaggtaggatgcagaatcttcgcaccgaaataagccaattcggctgcttcttcgaaatgtagctgacgcaccggagctgtcttgtcaacgatacgcggatcgttattgtgcataccgtcaatgtctgtccagatctgaatttcggaagcattcaccgctgctccgatcagagaagccgtataatcgctaccaccacgttgcagattgtctatctcaccataagcattgcggcagatgaaaccttgcgtgatgtagatatccatatccggataaagttcgagctgtgcctgcaacttctccttaatatatacggggtccggctccgcgttcttatcagtacgcatgaattccaaagccggaagcagtacggacttcgcaccgcattcctgcaggtagaagttcaccattgccgtagagatcagctctccttgcgccaaaaccactttctcttcaaacaaagtgaaaaggtctttcgtataggagcggatgtagtcgaagtgagacttgatgacttcgagacctttctgtttatattcctgagttgcgaatagctcatcaacgtgctgtttatatttagcttccagcttattgataatctcgttggcaccctccggattcttcttatacagatagtccgaaatttccaccaatgtgtttgttgttcctgacatagcagaaagaacaacaatcttctgttcaccatcggtaatcaatttggctacttccttcatgcgctgagcagaacctacggaagttcctccaaactttaaaactttcattttcgttactgttttagttatctatatttaaatctatttctattgttctctgccggggcatatattcatcggtcacatctacaatctgatggttggcacaacgatacacccgacccggatattctttcaataattgcagattgtgcgtggtcatcacaacggatgaaccggaactgcaaatattatgcaacaattcaacaatcgatttccccgtttccgtatccaggtttccggtcggttcatccgccaggatgatggacggagaattgagtacggcacgtgcaatcacaatgcgctgctgttcgccaccggaaagttcgttcggtagcttgtatcctttattggacattcctaccaaattgagcacttcttcaatacgttccttgatttcctgtttgttcttccagcctgtggcacgaagtacaaattccaggttattgtaaacggtacggtccgtcagtaactgaaaatcctggaatacaatgcctaacttgcggcgcaattgcgggatatgcttacgtttgatagaccgcatattataatccagtactttagcctcaccgtcaattacatccagttcgccataaagggtcttgagcagactcgtctttcccgaacctacttttccgatcagatagacaaactctcctttgtgcaattccagatttacatcactcagcacacagagttcctgttgatggatttctacgttcttatatcgtatcaacgccccgtcatccatgccgactcccgctttaatttttaattattaattcttatttatttaatgcttcttccatgtactgctatgcctttcctgcaattcacgagcaagatcttcgatacgatagccttttgaagtcagcaatacaatcatgtgataaataaggtcggctccttcgtagatcaggcgttcgtcagtgccgttggttgcttcgatcactgtctcgactgcttcttcacctactttctgcgccatcttattgattccggactcaaacaggctggttgtataagagcctgcgggcatttcttcgtgacgtttgtcgataaagtcttgcaatgctttcaggaacatcacaggttcttcattcttctcgccccaacaggtatctgtacctgtatggcacacaggccctgccggattaacctggatgagcaacgtatcattgtcgcaatcggccttgatagaaacaacatgaaggaaattaccgctttcttcgccttttgtccacagacgattctttgtacggctaaagaatgtcacttttccggtttctaccgttttatcataggcttccttattcatgaagcccaacatcaagactttgcgcgtctcattgtcttgtatgatagccggaacaagtccattcattttctcgaaatccaattccattttattcaatatcttaatttactatttacgcattataataccttcgccgcaaagatacgattttaaatcgggaattttaatttctccgaaatgaaaaacgctggctgccaatgccgcatctgcttttccttgcaaaaagacgtcacggaagtgttctttactgcctgctccccccgatgcaatgataggaacagaaagctgtccagccaaaacggcaagtgcttcgttcgcatagccggtcttcacaccatcatgattcatactcgtgaagagtatctctcccgctccgcgttcctgcgcttccttagtccactcgaacaggtctttatccgtttcgatgcgtcctccgttcaagtaacatttccaaccgttctcggtctgtttcgcatctaccgccaacacacagacctgtgagccgaaattctttgcaatctcatcaaccaatcggggattacggatagcggaagaattgatggaaatcttatccgctcccgcattcagcagacggtccacatcactcaattcattgattcctccccctacggtaaacgggatattgatattagcagcaatccgttttaccaattccgtaaaagtcttacgtccctcatggcttgcagtaatgtccaggaaaacaagttcatctgctccctgttcactgtaagcacgacccagctccaccggatcaccggcttggcgcaagttgacaaaattcgttcctttcacggtttgtccgtcttttatatccagacaaggtactattctttttgctaacacaatcttattttatttactattcaacaatttacaatctatatgcctaagcttgcttcttaaatttttcttattacatcaaatcctcttatataacttctccttattatataaggtatattctgatatgcgaattataaaaagattctcaaatcttgtaaggtaatatggccttcatacaatgccttaccgaaaataactccgggaacaccggcctcatccaaagcaacaatatcatccaccttgcttaccccgccactggccatcagatagagatcggggaatttagccaacatctctttatacaaatcgatagaaggaccactcagcattccatcacagctaatatccgtacagattacttttcgtatacctttatccatataattttccagaaacggaaaaagctcacaggcgctttcgtctttccaaccattgacggctatcttatgatcttttacatctgctcccaaaatgatcttctcactgccgtatatttccagccaatgacagaataattccgggtctttcaccgcaatgcttcctccggttaccatctgcgcaccgctctcaaaagcaattttcaaatcttcatcgctctttactccaccgccaaaatctataacgagagaagtacgtgtcgcaatctgttccaacacccgatagttaacgacatgatgagaagcagcaccgtccaagtctaccacatgaagcctgcgaacaccgttcgcttcaaactctttagctacttccaccgggttctcattatatacctttttactatcataatctccctgggaaagacgtacgcactttccatcaataatatcaatggctggaataatttctatcatctatttatttactatttgacgattcactaaatatttatttcaaacatcgaaatgtttttcatgacacatcatccatactgttaccggcagaggttcaagaaatttgtcagaatcttctctcctgtcttgccgcttttctccggatggaactgggtagcataaaagttatctttatgcaacgcagcactgaacggatgaatatagtcagttgtagcagcagtaaagtcgcaggtcggcacatagaagctatgcacaaaatagacaaactcctcttcggtgaagctttcaaacaatttgctattcgtttgcccaatggtgttccatcccatgtgaggcactttatcttcatgtttctgcgggacaaaacgtttcacatccacatcaaagatattcaaacaatcgacttctccttcttcggaataccggcacatcaactgcataccgagacaaattcccaatacaggctgacggagattctttatcagttcgtccagtcccgtagctttcaagtggttcatggtagtttccgcctctcccactccgggaaaaataactttatcagccgattggagttcttctttatcagcagtaatcaccgcttctacacctaaccgctttaaggcataatctacagaacgaatattgccggcattgtattttacaactgctactttcatcagctaaatattacagttttatttttgtaagtcaagactttgcgctcgatgtgcttctgcactgcacgcgaaagaacgattttctccaaatcctttcctttatttacgaggtcttcaatggcgtctttatgagtgatgcgcactacatcctgttcaataatcggtccggcatccagctcggtcgttacataatgactggttgcaccaataatttttactcctctctggaaagctgcatggtaaggcttcgcccctacaaacgcgggaaggaaagagtgatgaatattgataatcttattcggataagcgttaatcatctgttcggagatcacctgcatatagcgtgccaatacaataaatgtaatcttatgtttggcaagcagttccatctctttgcgctcctgttcttctttcgtctccttggtgatagggaacagatagaaaggaattccgaaacgttctgccacgtgctgcaaatccggatggttacttataataagaggtatctctacattccactctcctgccgtataccgggccagcatatcgaaaagacagtgcgacagcttggatacgaaaatagccatacgtggttttacatcagagaaataaagacgaaaatccatttcatatttttgcccgtagagtgttctgaaataatcttcaattttttcctgtggaaccagaaaatctttcagttcccattcaatacgcatgaagaagatgttctctacatgatctacatactgatccagatagataatatttcctttgtttaccgtaataaagtctgtcacttccgcaaggattcccggtttgtcgggacagtgcaataacagtttggctgttgtcatcattctttttactaattaacgattccaggcagaatcttttctacctttttaattttagtccgcaaaaataacgatttattgcaaaattacgaattaatcaagcagaaagttgatataaaaacggtgatttcttacagatagaaagatatcgagagttattttcaatgaaaagaatgataaactttaggatagtgatgccattgctttcggatagtgacggtattccatcgtgatagcgtcactataacgatcagataccgtcactatccgaagagaagaaaaacgaatattttttttcattacaaaagtactcaaaatgagacactaagcatttttcttgttttttcttgaaaaaaacttttctcaaaacgcttgcaggtttacaaaaaacaactacctttgcacccgcaatcgagagagatgcagattaataaattgaaattctggtgcgttagttcagttggttagaatacatgcctgtcacgcatggggtcacgggttcgagtcccgtacgcaccgcttctttcattaagaagcaaagagaatagaaatgagttaatccaattaaaattttggtgcgttagttcagttggttagaatacatgcctgtcacgcatggggtcacgggttcgagtcccgtacgcaccgcaatagatactgattatcagcaaattacaaaagacacacccgattttacccccataagtaaaatcgggtgttttgttttatttatctcgccatttgtttgaaacaagataaagagatccccagcaacttacctgccatttgccgtacagcattacatcaatctcatagaatagatttgaaacagacagtaattctacgctcttccatgcagttacctgattacttgtcttgcccactctcccgcttccttgccacttccgttcagcaactggctttctccccatacgattttgggataaagtttcttgagctgttttacactgttagctatcgagcttcctccggaagtagcgaacggaataacggttttaccggaaaaatcatatttctcaaggaatgtattgaccggacgcgggcataaattccaccatatcgggtaaccgagaaataccacatcataatctttcaaatcaagcacatctccacccaattccggacgtgaattttcagtcgtcatttcaattgaactacgactacttttgttgttccagtcgagatctgccgaggtataggctgtagcgggagttatcttataaagtttgccgccaaccgtttttgcaatgacatcagctactttttctgtagttccagtacaggaaaagtaggcgactaggattttcttatcagatcgtacattggcatctgctgtctggttttgcgcttttgatgaacagctaaagcaaaggagactcataaatatgaatataatctgtttcattttatttaaattttaaatatttcttatcactaattagtttaaacattgccacgatggagtaaccccacagacattttcattcttctattactttgataaaatgtgcaggaacaccacctacaaccgtattcgctgccacatctttcgttaccacagctccggcacctacaacggcattatcaccgatagtcactccctgaagaatcgtcgcgttagaacctatccatacattcctaccgagtacaataggtgcaggataagtcgttttacggtctttcggaaccaacccgtgattaagtgtagcaaaaacgacgttatgcccgatttggcaaccgtcgccaatagtcacgccaccatgatcctgaaaatgacaacaagcattaataaacacaccctcaccaacgacaatattcttaccgaaatccgtataaaacggtggaaagacacggagcgacgacggaacccgataaccgaacaacccggagagtaatcggcgcacttcgtccggtgtatgatatgctgtattcagctgaaaggtgatacgtcttgcctcattgctcatatcatccatcaaacgatgtatttcttctgtattgagcgccttgcgcgtctttacatattccttaaattcctcggtagtcatattattactttttaaaagataaaacagaattagcaaaaatcattacttagtccgttcgagtttatcgtactcttcatccgtaaccgattcaagccactcattggaagtgttttcgccggaaacctcgaaagccaaatgagcaaaccaactgtcagcagcagctccgtgccagtgtttcacgttagcaggaatatgaataaccgtgccaggcagaatctccaccgccggtttgccttcttcctgataccagccgcgaccagctacaccgataagcatctgcccgccacctttcgtcgcacggtggatatgccagttattgcggcaacgcggctcaaaagtaacgttagagatgttcacctgctcgcgcgaaaccggagcaagatagctgttaccaataaaatactgcgcataggctgtattaggttccccgatggggaaaatcatctcacgctggaaagctgctttggcatcttcaccagcagtatcttcagaccatactccttttgccaaattgaacgctgcccacgccttcggccaacctgcatagaaacctatgtgagtgataatctctgcgatctccgtacgggtgatgctgttcttctttgctgactgaagatgatatacgagcgaattgtccgtgattccctgactgataagagaggtaatggttactaaactgcggtcacgcagactgagtttatcggtgcggctccaaacttctccaaagaggacatcgtcattgagttccgcaaacttgggggcaaacgttcctaactggtcgcgtcctgccgtctgtactatcttttcctgtgccataacattgagtgttaaaatactgaatactgaaaataataggagtttattcataatcatttcgttttttcattgttaaacttctgattgcaaatttactgcgataaaacgagtgagcttgtatatgatttactgatatttgtacccaaatcctcgattctgtaataaagtcatacataattcaaatgaaataagttatatttgcgataaagaaaattaaagaaaggattatggaagaggttattaaacttgatgagatagataaatacaacaaacttttcggacttgaaacacgacacccgttggttagtgttgttgatctgtcaaaagcaacgcaatggccggaacattgcaaaatcaactacggtgtatatgctctttacctgaaagatacctactgcgggaatatcatgtatgggcgtcagagttacgactatcaggatggtacgattgtcagctttgctccaggccaaatagtagagacaaagatgattaaagatgtccaaccaaacgctcatggcatcctgtttcaccccgatctgattcgtggcacggcactcggtcaggagatcaagaactattctttcttttcctacgaaacccgtgaggcactacacctttcagaggaggaacgggagaccgtgatggattgcctgcataagattgaaatagaactgaaacacaatatagacaagcacagccgtcggttaatttgtgccaatatcggactactgctcgattattgtatgcgtttctacgaacgacagttcgcaacacgcgaagaagtgaacaaagacatcatcgtccgtttcgagcggttgctggatgaatatttcgacaacgagactccactacgagagggattacctaccgttaaatactttgccgacaaagtatttctatcagccaactatttcggagatatgattagaaaacagacgggacaaaccgcctcggaatatatccaaaataaactgatcgaacgcgccaaagaggatttgctggcaacagacaagactacaagtgaaattgcttacagattgggattccaatatccgcagcatctaagccggatgttcaaacgggttacgggttgtactcccaatgaattccgctcacagaattagtctttatacgaaaataacatctatgagtaactcgctccatatttatttatagaatttatatagagggcatcaggcagaagaaaaatataagaaatagaattataccaactaattattatatctttgcgcaaagcacttttatcgattagagcatggaaagaactcagccccataaaagtcataaacaatagataaagtaaactctgataagtaacaaacttatactaaacaattatacaataaatatggaaaatgaaaagaaactgacccgatcttccaatcgaatgattgcaggtgtatgtgccggaatagccgaatattttggatgggacccaactttattaagaatcgtatacgtattagccacattcttcacagctttcgctggtgtaatcatctatattatcttgtggattgtcatgccttacaaaatgccttcagacggatatgaaaaccgcatgaacaacagattacattaagaccaagagcccatccgatttcttatcaaacaataatcaatcgaatgtggctcatttttatacccctccattaaggactagtacaattccaatccgaactcgtctttcaactgcattaatgcctgattcttttgagccatcatctgaaacttttctacacggccgacgggacgtaccgtttctgttggttcactaacccgcactgtcatcaccactttactattctttaactggacacgaagataattctgcaattcaggaatcagatttctgaaatcctttgcagcaatctcattgtccactactacctcaaaagtcgtcgagttattgagcagtaccggatgaagcatctgcatacgtttcgtaagagaatcttcctctttcggtaactgaccggcatactgctgccaatagaaattcaaatcacggtcattaaagataaaatcctcttctacagtctgttgtactttaccaggctgtggcatcatttctttctgagtaacctgatcacgctgcggattcttgatagatacccccaggctggacatcttcatgacaggaatcttccgttctccctgccctctctgagcaattcccgcactttgagacggaacggaagtagtggaattcgaagaagaagaagaagatgatgatgatgtagacgatgataccacctgcgctgccacaggtgtctgcggctgacgaacaggcgtttgttgatgaacagcagtctgagacgctgaagcagcagaagtcacctgcggttgctgtgctgcggcaggttgggtgaatacgggttttatagtctttttagggctacgcccaccactcacatcatccccctcaatggtaagctgcgcaacctgtattaaggtcagttctaccagcaaacgcttatttttgctgacacgataattcaaatcacactcattacagagcttcatcgcccgatacaaaaaaggcaacggacatttctgtgcctgctcctgatagcgttggcgtatgctcgctcctacttccaacaaaggcaatgtcactgcatctttagctaccagcaaatcacggaaatgagaagacaaaccggttataaaatgactcccgtcaaaacctttgttcaacacatcattgaaaagtaacaatgcatcacttaccttattttcaagaaaagaatcggtcagacggaaataatattcgtaatcaagtacattcagattatcaattacactcttgtatgtgatattacctccggtaaaacttaccacctggtcgaaaatagacaaagcatcgcgcataccaccgtccgccttcatggcaatcacattcaatgcttccggctctgccgtaattccttcttttgaagcgacataagaaaggtgattcacagtatcttccacgctaatccggttgaaatcataaatctggcaacgggaaagaatggtcggaagaatcttatgtttctccgttgtagccaaaataaagatggcatgacggggaggctcttccagcgttttcagaaaagcattgaaagcagacgcggagagcatatgtacctcatcgataatgtataccttatatttaccgatctgtggcgggatacgcacctgctccaccaattggcggatatcgtccaccgaattattggaagcagcatccagttcatggatattgtacgaccgttgttcattaaaagccacacaagactcacactgattgcaagcttcgccatcagcagtaggtgtcatgcagttaatggttttggcaaagatacgtgcgcacgtagtctttccgactccgcgtggcccgcagaacaaataagcatgagcaagtttctgagtagcaatcgcatttttcagcgtagtggtcagcgcccgttgtcccaccaccgattcgaaagtagacggacgatatttacgggctgatacaatatagttttccatatccgggattcctctatttttctttattttttgctttcagtgcaaaagtacataaaaaagtgataagtaataagggatagagaaagaagttttaaagcggaagagataagtttttaagttattagttttatctttgcggatatttataaaggtaggttatgagtaagctaatcagtatttggaatttcatatgcagacggaagtatcttattaccattgtcgcattcgctgtcatcataggttttctggatgagaacagtttggtgcgccgtctcggatatgaacgcgaaatcagtcagctaaaagaagaaatagaaaagtatcgcacagattatgaagaaaatacgaaacgcctcaacgaaataagtaccaatccggatgcaatcgaacagatagcccgcgaaaagtacttgatgaagaaacccaacgaagatatttacgtttttgaagaagaatagagaatgaaacaattaatacccgcactgttcgttgtcggcgccataatggctcttgccggagctgccgtatttatcaccggatgggcgtatgctccctacatatacactgtcggtgccggttttatcgcactggcacaagtgaacacacccatcaaaggtaaaagcaaaactttgaaacgtttacgcattcaacaaatattcggagcattagccctgattctcaccggagcattcatgttcacaacacgtggtaacgaatggattgcttgtcttacaattgccgccatactcgaactttatacagctttccgcatcccgcaggaagaagagaaagaaaaagccaactaaaaaaagttttgcgcattttaccctcatactctcataaatcacctgcattcctttattcatcggcttttcagttatgatagcaagcctgagggttacacttatgctctcaggtgtctcatcatttaacatatagtcattccacagatactttcttaacattctcagtaaaagctcttgatatttacaagagctcactaatgtgaacaaataagctaacatcaatggacatatatatccactagcgttagcctttcagctcacaatagtgagctcatagaaataactaatatccaaccaaagaacaatgctgtattatcacaagaatgtaggaagaataaggcaacaaatacccttattgcaagtgaaatgaccgctcattcaactataaagtaaaggtcataaagaaagacttacacaagtaaggaaggaaaaacgacaacggactgttgtgtagctgacccagcgtctgtcatgcagcagaacaaacgtatataaaatattcgataaatattcagtggacaccgacacattagctagaatatccactattttagaatttgacttcttctcgccctattcaaaagaaataaaaaagatgcgaagcaagaataaacacatacataaacgcttttattgggcaatatgcactaaaagtgtccccgattgattaacgaatcggggacactttttattatacatcatggcagagtattactgattttaggcatcattttagtcgcattggatattttcacagccatccatgcatggaaaaatatcccggtatccaaacggataaaagtactcagttgcatagccatgctatttctcggttgggtagcaatgatagcctattggcttatatattttctcattatcaaaaagaataacagtactgtccaatatggcacaacgcttacatctcatgtcccgatagacactacagtcaaccctttcaatccaccggaagaaaacaatgacgaagacgagaaagccatgcggtctttattcaacgaaaccatgaatggtccggaagggaaaaaactatctaaaagttatgatggagagaggggacaaactacttgaaatctccggtgcactcgaatatatgcagaatcaccgtatagatgatgtaacgacattgatagaaaacgtaacacttacaaacaagaaaggaaaagcggtcaaaagatgcacatataccctttatatgacggaagcccgcaatttaaaccgcatttattgcaacgagcacataaaagggaaagccgtaatgtcgatagacatagaccaaacaggtatcaaatcgacttttgaacgtgccataaaggaaggaatagactatgtcgaaatactatttcacagcgaagaaccgttcatgacatcccgcaaattaaaaaaatttgcgaatggttatgggcgcaaacatagccgaccaaatatatctgctacgcaacaaccaacggtacgctcatacatggagctattaaggactggtcttctcatgaacaaagaaaaagagaaaggtataaaaacggacaacatcgatctatcctccccttgttatctgtcggatacgcgatgcaaaggttggatacttgaaccggtatgccctacgtattctggtggaaatttattacgaacagagatatatacaaacgtaattcctatacgtgtatgattacaaaaatccgtgcattgacaacttcatggatgataggacgatggtttacgcagcccatcatgccctgatggaaacaaatgcaaaaaacaacgcaagcaacatggtagctttcttcgatgcggaagaagaaacaaattctgcattaggaggggcggatactccattctttaggaatgtattgactaaagcatgaacggagacgaggatgatatgataaaaatgctgcataatttttttaccgtatcgctgaacgtatcttttgctactcatcccaattatagggaatgtgaagatccgacttgctcacctgtaatcaacaaaggtataacgattaaatatgacgccaatatgcactatgctaccactgctttatcctcagcagtatttcaagacttatgtaaacaggcaggtatccctttccaaaaagaaacatcccactctgatttcagaacaggaagaacaattagcgcctttttacagacccagacagaaatgagatgggtaaaagtgggaattccttgttgggctatgcactcttctcgagagagttgtggaacaaaagatttctataatctaatccgttttttagttgctttttggaagcatccaacaaaaaatacggttaattatccttaccataaacaggatatatcatcattaatactcaaagaaatgaactttaaattaacaaatcttgctgccatcaatgagaaatatggtaggacaatggaacaattgaaagacacaacttgggaagtatgcaccaacagttgcggctgctccggtgattgtggttctaactggatgcgcagttaattctacaaaaccattaaacgaaaatggagatgaaagaaaacattctcttttttctccatttttcacatttattcacttcgaagtaaaacaagagatcaagaaatgtacctttctataaaaaatagcattacatctaaatatttggatattattgttatcttacaagaatattaatctatttaaattatgaaagcatgacagcaaagaaaacgattaaagaaattaccattatgtggaaagaagacaaacgtaaatatgtgaaaagctcaacatattcagcgtatgccctaatcttagaaaatcacatacttcctacatttggagataagtatgagttactcgaaaacgaagtacaagagtttgtcttacagaaacttcagcaaagactaagagcaaaaatggagtaatatgtattcggaaaacaattgaacgaatttatatattggacggagaaaaaatacatacggaaatcattatcggcacacctaaaactcagaattctattcgtgacattcctatgaacaaggaattattaaagatgctacgcccgttaaaaaaatcgtaaatggcaagttctatgtacttactaatgaagagaaaccaactgagccgcgtacctatcgtaactattacaaacgaatgatggaacaactcaatattcccccactaaaatttcacggactgcgccacagtttcgccacacgttacattgaaagcaattgcgactacaaaactgtaagtgtaatacttggacattcagatatcactactacattaaatctctatgttcatccaaacatggaacagaagaagcgatgcattgataaggtttttaaatctatcaagtaatacgaaaataggataagtctagcaagtatggcacttatcctataatcttatattctttaaaaaggactcatttcataaacacaaaatacaccgccgcaatcagacacacaaatgcagctaaatgattccaatgcaacgcatctcctttaaagaacacagtagtaaacaatgtgaagatgattaaagtgataacttcctgaatcactttcaattgcatcaatgaaaaagggccaccattacctataaacccaatgcgattcgctggaatctgacatgaatattcaaaaaaagcgattgcccaactgaatgtaattactcctatcaagggcaaagcggcaaaccaattatactcctgtctcattttcagatgtccgtaccaagcaaaggtcataaatatattggacacaatcagtagtaaaatagtatagaatcctttcataactcaatcaattttattcggtaataaatcttcctgtatattcgccatacttccccaaaggctataacgcgcttccgggttcatcgcttccaattgccgtaaaatgcctttcatatcactacggctggattgcgattcataagggcagttcttcatctgcttcagataatgatgcaaagctgccaattctattaaatccgattcgtgaaccagacacatcggacggataatcgtcatatcgaatttattcatcaccaatcggggcggcattgtactgaatgccccttgataagtaatattcatcaataaagtttccaaaatgtcgtccatgtggtgtcctaaagcaatcttattgcagccatgttctttggccaccgtaaacaatgctttacggcgattccaagaacaaagaaagcaaggagatttacgggtgtctgtagaaggatcaaaagaagtttcatattgcacaaaagccactccattcgcttcgcaatgcgctttcaggtattccgtatcactctgataaggaatattcgtcatcaccacatgaactgcaatgacagaaaagcgaggtttgtagatacgtgcgcgttttcccagcagctctacaagcgccaacgaatctttcccgcccgacagtccgatgagtattctatccccctcttctatcagcccatattgcaccactcctttgttaaaccgccgttcaatgcggcgaatggctttctcttcttcggtaaattgtgtcatatcttcaaaaatcggctgcaaaagtaagcgaaaagaatgatttaaagaagaattaacataatagaatctctgaaaaagggtttatttctaataaatttgtacttttgagcaattgattagttggcagacttccaaaagcaacaatacttttaaataatctgccacccataaatgctaaaaacgatgaaaggaaaatatattctatttctattttgtagtctcttcttatgcgaagtttctgcgcaaacattggaacaggcacgcgctttgttcacaaaaggcgaatatgagaaagccaaacctgtctttaaaaggtacgtaaaatctcaaccgtccaacggaaactacaactattggtatggcgtgtgctgcctgaaaaccggagaagccgaagaagcggtgaaacctctcgaaatggcagtcaagaagcgtgtagctagcggacagctttatttaggccaggcttataacggaacatatcgtttcgaagaggcagtagaatgttttgaagagtatatcgctgatttgaagaagcgtaaaagagcaaccgaagaagcagagaaactactggaaaagagcaaagctgatctccgtatgttgaaaggtgttgaagatgtttgtattatcgacagtttcgttgtagataaagcaacgtttctgaatgcttataaaattagtgaggaatcgggaaaactgtttactttcaacgagttcttccaaacaggaggagatcacgaaggtactgtctacgaaactgaaatcgggaataaaatctattacagcgagaagggtgaaagaggtagtctggatatactttccaaaaacaagttgcagaatgaatggagcaacggacgaccactgccgggtagtatcaatgatgcaggaaacgcaaactatccttatgtaatggcagatggtgtgactatttattatgccagtgacggtgaaggattgggaggttatgatatttttgtcacccgttacaataccaataccgatacttatttagtaccggaaaacgtgggtatgccgttcaattctccatacaatgattatatgtacgtcattgacgaatataacaatctaggctggttcgcttccgaccgtttccaaccggaaggaaaggtatgtatctatgtattcattcccaataattcaaaacagacttacaactacgaagcgatggatcggaagcagatgattcggctggcacaaatccattctttgaaagaaacctggaaagataaacaaacggttgcagaagccctgcaacgtctggaagccgctatcagccataagcccaaagaacgtcgaaaggtcgattttgaatttgtcattgacgataatacaacttattacctgatgactgactttaagtccgccaaagccaaacagcttttcctgcgttaccgacaaatggaaaaagatcatctgcaacaggaagaaaaactgaacaacttgcgacaacagtattccactgacaataaacaggaaaaagagagaatggctcctgctatcctcgacctggaaaagcggatattgcagatgtcagaggaattggcagctctcgaaataaatgtgcgtaatgcagaaaaacaaaataattaataaccctgaactatggatatactcattatcgccgttctcattattaccgcagttatactgttcctggtagaactgttcgttattcccggcattagtctggctggaatctcagcactgggatgcattatctatgccaactattatgcgtttgcaaatattggaatggcgggaggatttatcactttgggcatatcggctattgcctgtatcggttcactgatctggtttatgcgctcaaagatgctagataagctggctttgaaaaaagacatcgattcgaaagtagaccgcagcgcagaacaaagtgtaaaagtaggtgatacaggtataagtactacccgcctcgcacaaatcggttatgcggaaatcaatggtaacattgtggaagtaaagtcgatggacggttttctggacgaaaagactccgattatcgtcaaccgtatcagtgacgggacaattatggttgagaaacacagaaaataattattcttttgcagaaataatattcacttaatacaaactatcaatggaaacatctttctatttgcctatctttctgatagccggaggtattatcttcctgataatatttttccattacgtgccgttcttcctgtggttgtcggccaaagtatcgggagtacacatctcgctgatacaattatttttaatgcgtatccgtaatgttccgccgtatatcatcgtaccgggcatgatcgaagctcacaaggccggtttgaaaaacatcacacgtgatgaactggaagcacactatctagccggtggacatgtcgaaaaagtggtccatgcgcttgtatccgcatcaaaagcgaatattgagctgccttttcagatggctaccgctattgacttggcaggacgcgacgtatttgaagctgtacagatgtccgttaacccgaaagtgattgatactcctccggtaacggctgtcgcaaaagacggtatccagttgattgccaaagctcgtgttacggtacgtgccaacattcgtcaattagtgggcggtgccggagaagatacaatcctcgcccgtgtaggtgaaggtatcgtttcatcgatcggttcttccgagaatcataaatcggtactcgaaaatccggattctatctccaaacttgtactccgtaagggactggatgctggaactgctttcgaaattctatctattgatatcgcggatatcgatataggtaagaatattggtgccgctttacagattgaccaggctaatgcagacaagaatatcgctcaggcaaaagcagaagaacgccgtgctatggctgtagcttccgaacaggaaatgaaagcgaaagcacaagaggcacgcgcaaaggtaatcgaagcggaagcggaagttccgaaagcaatggcagaagctttccgtagcggtaatttgggtatcatggattattaccggatgaagaatatcgaagctgacacctccatgcgtgaaacgattgccaaaccggcagcaggcaatgcagggaatcagcctttgagcaaataagttacaacaaacaccggaatctgatttcatttcagtctcaagatgtactcccctttcctaacggaaaagaaagagtcttcttctgaacttaaatccggttccggtgtttttatttttatagcaacaacatattgtaaaactaaagccttttaatagcatgaaaaagtactttccatcctctgaattaattatcaacgaagacggttcggtattccaccttcacgtaaaacctgaatggttggcagataaagtaatcttggtaggcgatccgggacgtgtagcactcgtagcttctcactttgaaaataaagaatgcgaagtggaaagccgcgagtttaagacggttacaggtacgtataaaggaaaacgaatcaccgtagtttccaccggaataggttgtgacaacatcgatattgtcatgaatgagttggatgcactggctaatattgatttcaatacacgagaagaaaaggatgagttccgtcaattggaattagtacgcatcggtacatgcggcggtttgcaacccaatactccggtaggtacattcgtttgttcccagaagtctatcggcttcgacggtttattgaatttctacgccggacgcaatgaggtatgtgatctgcctttcgagcgtgcttttcttaatcacatgggatggatgggaaatatgtgtgctcctgctccctatgtaattgatgcaagcgaggaactgattgaacggattgcccaagacgatatggtacgtggcgttacaattgccgccggagggttcttcggtccacaaggacgtgagctgcgtgttcctttggcagatccgaaacaaaacgacaaaatcgaagcatttgagtataaaggattcaagattaccaatttcgaaatggagagttcggctttggctggtctcagtcggctgatgggacataaagctatgactgtctgtatggtgattgccaatcgactgattaaggaagccaacaccggatataaaaataccattgatacgttgattaagactgttcttgacagaatataaatatataaaaagtcagcgccaccattctgctatgatggtgacactgactttttatcgtttatccgatataagattcaattgtctctttcagtttttccaaagaataaggcttggagatcacagcattgcatccggcttgaatggcttgttgctgttccgtataaaaagcgtatgccgtaaccgcaattaataggtacggaaagggaaatggtacgtatcttttcagtagcttgaataccgtccatcaccggcatacggatatccatcagaatcaaatccggcttttcacgaactctttatggcattcgacaaaaaattgaaaagtacctgcatcacccggttacgatcggtagatgtccaatattctccttccgggcggataactttcaataagtgcatttccgattttccggattctatacgtgacaagtccagaatatcattaatcaactgtaacagcaaattgctattcttttgaatgatctccaaatattgcagcttttcttcttcgttctctgtcaccgcaattatctccgaaaaaccgacaatagcattcaacggagtacaaatctcatgactcatatttgccaaaaagacagacttcatcttgtcagctttttccgcccgccgtttagcttcgatcaactcttgcgaacgacgaatccgatcaccgatatcgtgtatcagagcaagtaccttattcccttcaaagggggcgatacgtgcctgaaaacaattcggcttccatctacttcaagtgggtattctatttcttttaattttccatcttgcaagcactcccgaatattacacagaaacagatcactgacttcgggagaataaatatctcgcccatctacaccacgtaacacttccaccggatgaagcaaaacggtatccggtgtcatcagcacatcggtaataaaaaattatcatcaaaaataaaaatgaattctagcaacgcctctattatcttacgattgtgctcttccagatgattgatatgctgttctttctcacattgcgaagtgacgtttaccgtatatgccaataatttatcagcaagacgtccgtcctgagtacccttataagacagaaaatgatcttccagccagatcacttcaccatgcttgcctacacaacgtactttaatctgtgatatttttgaatccgatgcgagcatcttggaaaaagcagtttgataggccttcacatccttcggataggcaaagcgataaaagtcatcgatatctttaaaaacaattccagcttctttcaagcctaatgtacgaaaatagtcatccgtgaaggaacactttcctgtagatatatcatattcccacaaagcaatttggtgtgcagcaagtacagagagtattttctgtgaattttcccgtatgatttcactattctcactttgggaatataaatttgtgtctggctccataagcattatattatttcatttggcatatcaccgcacacagcaaatataaacaaataaagtacaagttgtacagaatcttatcttttttactcagaaacaattatctttgcagtctccaaaaagaaatatgatgaaccaagatactatctgtgctattgctaccgctcaaggcggtgctatcggaagcatccgtgtttccggtccggaagcaatttccatcaccagccttatattcaaaccggcaaaaccggacaaattgtttagtgaccaaaagccatattctttgacttttggacgtatatacgacggagacgaaattatcgacgaagtacttgtcagcctttttcgcacgcctcattcctacacgggagaagatagcacggaaattacttgtcatggttcttcttacattcttcaacaggtgctacaactgctgatcaaaaagggttgccgcatggctcaaccgggagaatatacgcagcgggcatttctcaatggaaaaatggatttaagtcaggcggaagccgttgccgatttaatcgcatcctcatctgccgctacccatcggctagccatgagtcagatgaggggtggcttcagcaaagaattaactgatttacgcaacaagctattgaacttcacttctatgattgagctggaattggatttcagcgaggaggatgttgagtttgcagatcggtcggcattaaaaaagttagcagatgagatagaacaagtcatttctcgtctagtacaatcctttaatgtgggtaatgctatcaaaagtggtgttcccgtagcaattatcggtgaaacgaacgcgggaaagtctactttattgaatgttttattgaatgaagataaggctatcgtcagtgatattcatgggacaacacgcgatgttattgaggatactattagtattggaggagttactttccggtttattgatactgccggaatccgggaaactaatgacaagatcgaaagtttaggtattgaacgtactttccaaaagttagagcaagcagaaattgtactctggatggtggattctgtaaacgccgcatctcaaattgaacagttatcaaaaaagattatcccacgttgtgaaggaaagcacttgatcgtagtattcaataaagctgatttaattgaagatgtacaaaaaagtaatttatcagctttattggagaatttcccacaagaatctacagagcatatttacatctcagctaaacgaagagagaacactaatgaattacaaaaaatgcttatcaatgctgcgcatttgccaacagtaacacaaaatgatgtcatcgtaacaaatgtaagacattacgaagccttaagcaaagctttagatgctattcatagagtacaaaatggacttgactcacatctttcaggggatttcctttcacaagacatacgtgaatgtatctttttcatttccgatattgcaggagaagtgactaacgatatggtactgcaaaatatctttcagcacttttgcatcggcaaatgatggcttggaaacagccgtaaccaactataatcatttagaataaagtcgctgtatatcagcgacttttctattttaacactttccagtccgtatttggagataacggtttttatccatatttttctatcatatttctaccgcgacagaaattcacggttagcccgaatgtcacagtgacgcattagttgacgtgtgttgacaatggtttacatgtgtagacaaaaagggaaataaaaaaacagagaaaatgatataggaaatatggaagtaaagagaatttgtcaatggtgcggaaaaccattcatcgcacagaaaacaacgacctgttattgtagccctcaatgctcgaagcgaggttacaaacatcgtatcaaggagcgcaaaatggaactgcgccatattcaagaaatgcaggagctgcgctccagtctggagaagcaggaatatttcactttctcgcaggctgcccgattgatgggcgtaagccgtcagtacatttataaattagtcaaagaggataaacttagagcatcccgaattagcggaagaatggctttggtaaggcgtgcagacatagagttaatgctcaaaagcaaaccttacgaacgactggttgcaaaaaacgacttcaacatctccgagtattacaccgccgaagagattgcggaaaaatataaagtcaacgccaaatgggtgtggacttacacacggcaacataaagtgccgaaggtgagaatacgccagttcaactattacagcaagaaacatatcgatgccgcctttgccaaatacgaggtggattccgaccttaccgaatggtacacaccggaagagattcaggagaagtacggcatgacacgtgtcgccatccgttcgcaagtgtatcggaacaacattccctccaagaaagagcatgggcagatattctactcaaagctccacttcgacctctcgaagagttccgaacaggagagcaaggcggaatactacaccgtcaaggaggcgatggagaaattcaaactctctcgtgattcagtttacggtattctgcaattccatcagatcaaccgtgagaagaacggacgattcgtcagattcctgaaagtggagtttgaccgggtaatgggtgtccgcaaatagtctaatttatggctatccgtaaattattcaaaaaattaatccctgctgtaggtaatctgcatgattacattatagagtttcgccgacgaattaataataaccataaaatataacattatgcatgaatgcaagactgtgacattaaggacacgtccgctaaaaggcaggatgatgtctttctatctggattattatccgggatatcgagacaaagagacaatgaaagttatccgtcatgaatcgcttggtatttatatctatgccaatccgagaaacaaacgtgaacagaatttcaacgaggtaatgaccgagaaagccgaagctatccgttgccgcaggttcgagtcggtagtcaatgaacggtatgacttctttgacaagtacaaactcaaggcagactttctggagtattatcgcaagcagctccgtaagcatgaccagaaatgggagtttgtctatctgcatttcaataacttcgtacatggcaaatgcacctttgaagagattgacatcgacctctgtaacaagtttcgggaatatctgctgagtgccaagaagctaaggcgtaatggacgtatcacacggaactccgcatcaggatattggtctactttcagaggtttcctgaaaatactctaccgtaatgggatgataaagaccaatgtcaatgacttcttggaaaagatagagacagaagatgtaatgaaagaggccctgtctgttgaggagctgtacaaattggccgagacaccttgtaagaagcctattctgaaaacggcatcgctgttttcctgtatgaccagcttgcgtatcagtgatattctctcgctatgttgggaagacatcgtggactattctgccggtgggaaatgcgtacacatcattacgcagaagaacaaagcggaagacatcattcccatcagcgaagaagcattgggattgataggttatagttctgaaaagaaaggtttggtattcaagggacttatgcgtagttggacgcaaataccgatgaaagaatggattcgttctgccggaattaccaagaacataacatttcattcataccggagaacatttgcaacgctacaagcagctgccgggacggacatccgtaccatacagagcatcatggcgcacaagagtatcaccaccacgcaaaggtatatcaaagtcgtggatgccaacaaacgtgaagccagtaagaaaattaccctgacacgacaagactgacagctgctttgtccccgatttctgcggtcagagtatgattttaggtgaaaaatcatactctgaccgtgatatttagcatgatacgtggtaactatcaatctttttattgcaactatctggaatatcgattatatctttagcgcaaaacgattccaaatacttgcagaccatgacgaataaaaaacaaattcagactaaaaagataagttttatcctcgcactgtccgttatcatttatgcggccatagacacttatcttttcctttgccatgacatcaatatcatgcgcataacgactcctgtcatccttaaactggtaatagctatcatattgtgcggactcctgcacaaatttttctataaatggctgacaaaaaatcctatcaacttctcttttggcgagccatctacccctattgtaaaatcagagaacgccatagaatctatggatgctactgaaacactgtctatcgagcaatcgatgggtttggctgaacaggagtgtcctccgtcccaacagtcaaatcaaaatactgtaaactctgattgtccgcaagattctcatttgaataaatatgattccatattggtggaactcaaaaagaaagaaattgaaaggcaagcggaaattatggatgcgattcgggaatacgtaaccgtcaagactgccccctatctctccaaagaggatattgccaccctcatttccaatatagagcatatggcttacggtcaacctgagtcatataaaccgattcgttccaatatagacaatccgctgaggtcgccggggcttcgccatttggcatggaatgtcggtgaacgcttgggagtgcccttagcgaaaagagccgtttttatcaagaaatcatttccatacgaactcgtaaacgcgacccttgaatatcttaaacttaatttacgggataatgtctcaagccagattcccattgatgtaccagataaaggcgactatcgcttccatttagatgtagataatgatgactcgcaataaaaaaaatatgcagacgaaataattaatccggtctgtattgttctgcaaggtttcattgagttggttcgcagcatgttaaacgattaaaatagtcataatatggaaaaagaccaactgacattcaacgacctgccgactgtggtaggcgaactatgcgacagaatcgcaagtatggaaatcctgcttacggagaaactttccaagcagtacgaaaccaaagagaacacgcacgtccccatgaccgtacaggaggcttgcaactatcttaaaatgccgttgtcgaccttttattacaaggtcaagaaggacgatattccggttataaaacaaggaaagcatctctacatctatcgtgacgaactggatagatggctggaatcttcccggaagaatccagttccgcaaagtttcgaggacgagaatgagtccttgctcgcctcccatcgccgtaaaccgaactctaaaaactggtagcgatggaaaagacggacactattattctttctccggaagaattggccgcttatatggcggagtcaacaataagcgtaacaagtacatacgaacactccccggtgattctgatggtggacgatactgttatcggaacattgggaaacttcagcgcttccatcgggaaagccaaaagcaagaaaactttcaacgtttcagccattgtcgcatcggcattgagtggcagcaccgttcttcattaccggtctatgttccctgagaataagcggaagattctatatatagacacagagcaggggcggtatcattgccaacaggtattgaaacgcatcttacgtttggccgacttgccggaatacaagaatccggataatctgattatgctggctctgcgcaagttttcccctaaactacgtctggcgatagtcgaacaggccattggcacaataccggatttgggattggtcatcatagatggcattcgtgatttcctttacgacatcaattcctccagcgaatccaccgacatcatctccaaattcatgcagtggacggatgacaggcaaatccatatccataccgtcttgcatcagaacaagaatgatgaacatgcccgtggtcacatcggcacggaactcaacaacaaagcagaaaccatcatgcaggtcgaagtggacaaagaggacaagactgtaagcgtggtcgaagccgtccatatccgtgaccgtgagtttgagcctttcgccttccgcataaacgaggaagccatgcccgaaccagtagagtcctatctgccaaaagagaagaagaccggacgaccaaccaaaggaccgttcgatccagacaaggagattccaaagaatgtacatcgtccagcattggatgccgtttttgccaatggcaacatcaacaattacgatgattatatagaacgcttgaaagagggttacggattacagggtataaaactcggttataacaaggcggtaaaggtcgcaacattgctcagcgacaaacaaatggttataaaagaagggaaagattatgccttcaatccagaataccattattgagttcaactttactttattgttggggcgtatatataagaataaagcaaagtcggaggaagacatcatgtgagatattcatattctcccctcttttagagactcgtatcatcctatgtttcctatccgagtgccagttcactatacacatccgatatggcttgccgtgaagcatcaacaggtaactgttgcgagatatgccaaggtataacctcactgcgttacggttgtacattggcgctctcgtctgctcagttccctcgccgatgcggtactcgcaagctcgcacctattcaaccattataaaacgattcaaatgaaagaagatattaacaatacatcggactcctcgaaagaaaccagaagtgtctttatcggagctaaagtcactcctactcagaaggagcatataaaatcactggccggacaatgcggcatgaccgtaagtgactacatattatcacgtgcgtataacttcaagcccaaagcgaggctcacgaaagaagaagcggtattgttacagaatctggacgattgtcggtcagacctcgtaaaatacacctccgccctacacggaatgtccacaaagcaacgcatggtaatgttcaatcagattccgttcatggtcggctggcttaaggaacttggcaatgtggccgaaaatatctgccagttcctgaatgcagtaaaagagaagaataaaattccgtccaaccctaaatccgaagaagaatgattgcgaaagccaaagccatatcgcacggcataaacgacctccgttacattaccggcgaatcacagcataagaagcatccggagaaaatttatcgggtattggacaatctgttgccctcagaaccggacgctatggggatatggaactccatgcagttgaccctatcccaacatcgaccgataaagaactccgttatcagaatcgagttgagcccatcgcccgaacatacccaattctatgacatcgaagattggcaaaagctctggcaggaattcgccgaggagttcgacaaacaagtgattaccggcaaggatggaaaagtccgttcctgtccgaccaatttggcgggtagcaaatactcggtttggcttcatacggaatctaaaggcgaagttccccaccttcatactgcggtttgccgtttggatgaagacggcaatatcaacaatgaccacaacattcatcttcgggcgcaacgtgctgcagagcgagtggcaaagaaacgaggctggacgactgcggcacaaatcagaaatcgaaacattccacaagtgaaccgagactgcatgaatgtattgaaagcaatgccatcgtggtcatgggatgagtacaagaatgctcttatacggaaaggttataccgtccatgaaagagaggacaagaaaggtattcttcgtggatatgccctcatggatggaaacaccaaatacaaggcttcagaattgggaatcggcagaaacctgatggtctcaaaacttcctgcgacatggaagaaactacaccatcagccagctaccgtcattagaaataatactccccaaaccgttcaacaggcagcgatacataaggttaatcctattgactatacccaatatctcacatatagtcaggatatgatttcctataccctcagccatgaaggcaaagattacaaattctatatccccaaaaaagtacttgactgcttcaatgacgagttcgattacaggttcgtttccaactgtcaggaacttaccgatatggcggtagctttttttgtcgggttgcttgaaacgccgaatgttgcaaccggaggtggtggcggaggttcgcaaagcgagcttccgtggagagacaaggacgaagacgacttacaatgggcacacagatgcgctcgtgctgccagtcgttcgttaggaaagaaaccgaaaacaggattaaaacgataagtctatgaagccaaacctgaaaaagaaattcgatttttccgtagaaatgagtgaagcggaatccataaaagccactcccaagaatgaatatctggaggaagaaaagcggttactcgatatcaacgcaagggaacttgccagcctgaatgacaacgtgttcaagttgagaacagaagttgaaaatctgtccggctctatacgtgagtgcaaacctatcatttctaaagaaatgcagaaattagcagtagaattcggtgcgacccttctatgcaattttctcaaccagattgagagcaaatgtaaggaagccgagcggagaataaagaaagccgacaatgccatccccatcccaaatacggcattctacattttgattatcattgtagttgctctatcttcctttttcatgtgcatgatagtggctaatgcagcgattttgcattccggattgatttggaaagcagttatctgctgtattctcattgccgttttaggaattggtatagcgttaatagtacagaagtttttggatagaggtaaataaacgaaaagtctcaatcggataggattactattggttgagactttattttattcgttatcaaacaatcccttttctttccataactttagttataaattcctctattctcttgcatttgatttagtgattacgtttatgacttacacgaagtttatcatcatcttctctatatgatgagatatatccaatagtttttagcttccctaaaagcatttcattcatgtgattattttctatagtagccttttttgatttatctgtaatacttcgataagaatcgcctaaagactctattaattctgtcacaatgtcaaaatcatctctatacttttcaaccaagtctatcaaaaaagacaatcgctctggcaaattagtagaggcgaccaaaatgttcttctctatgtcataatcaaatttttcaatattgtttttcaacacaggaagagtaatatttgccaattcgttatcccacacaatatgaggaagaaaatgttgaactacacttagagctttttcaccgattactcttggatttttcataagatgcttgtatagcctcatatctgtaggcaactcctctatttctataatacactcatccaaatacttatctacataataagtaagtacatcactatgattgtctctaattgttgtcgtataatatgtgctatatggaagcatatcagcacaaagtaacgacttaaaatgagcgttatctacactgttaatatccgcatccttaaatgtaactccatcaaagattttgacaagtttatcgtataccaaaatttcaaaatctgatgtcaataaagcactgtgtgccagtagttctttctgagtatcatccaattcagatatatctgttaattcatcaatatgtttggtaatgaatattcgcaaactggaaatcattacattattctgactctcataaaatgcatatatctcaggccatgctggtataactatatcaacttcaatagcgaactcccactgtatattgttaacatcggaaagagaaactttattctgttgcccagaaaggtatttgcgttttgtgtcctctgttatatcctcagaattaataatttcaagaataattcccacactctctttttttgccgtatctgtaataaatacattatttagtgcattgtcaaaacattcatctatataatctgatatagatttagctgatttacagctcctcagtattgtaacatttaaaggataattatccaatgtttccaccctctcatttcgataatgaacaaatgcgcatacaacattttctggtgtcaacatatatgctttgttttctacaacatactcaagcaaacacctagactctgcatctatatctgtaaaaatcagttttccattcgacactatttgtttgattgtatcaaaacctatgagatctactctatgagatataaatgcgaagtgtttattcaaccagttacgactttctttggtggaatggttcaattcgaggaatcgtaaccaagactcgaataattcatcggaattctgtttcacgaagatcttccataatccatcaacgatactgcccaaatggttgaaaagcgagcttgaatcttcaactgatttatagaagtcaatcaaaaagtcccactttttattatgcataataacttgtgctatcgaatgaagttttgagttatttgcttcttcaagatgctgacaaatacaatcgaccacctgaatattcaatatacttacatcgttgtaacatttatcaggaatgttttttacgcactgccctactttatctatatgatagtcatacggcaaactatgccgaagttttaattcaaggataaaatcatggtcgtgcttattaattgacttaccaaaaaagaaagatatataatcaaagtaatcttcatttataagtccttctttcaagaaaacttcaagcattttagagacattgagttcactaaaaattttatgcgtctgcatatcaacatccagcaacagttcttgtattggagtagcataatgattattacgagataattctagtatcttgatttgttcacgatatcttttttccccttctcgcaaggcttctaatcgctcatggtaggtaaaggtagaattaactattttctctatttgactgaattgaatattgcaactatcttcagatgtatcataataatatctaacaccataatatgtgttagtttgatgcctcttaaaacattgatatcgaaatgaggattgcgatataaaggaattaaataacgtttcattttctgcgatatcttcaagaggtataaaattgttttcgacaaaaaacaaaaaggcattattttcattttgttttgataattttctacgatacccttcaatataaatcagccttaattctttttcttgtatggcatgtgtcgcttctaaagattgaagttttttagttattccattaatacgctcgtcaatctgtctattgcgctcaaccaataattcacttttcttatgcaaacaatcatacaaaacaccctttcctttatgcagatcagcaaaatcttttggatggtagtttttatatacaatcattgcaagaagtttgttttgatcaagtttctcatcaagtttttctctatattgggcatattcattgacaatattcttcagtaatctcatatcgtcaatgaaaaaagccaaactgtctattacctcgacattaagatctgaatagccttttatctctagttcctctttcagtttgtctgccgagtttgaagaattgattattgggattacagttgtgatataatcaaagaatttagtacgttcttcatcaaaaaacatatcatctttaaccgcataaatgaacgtaactttacgccccacagagtttgactgattcaagagttgatttacctctcttaacttaagaaaaatatccgtattatcaaatctatctaaatcttctataatcacaacattataatcagtaacctcaaagaaatagacaatctcatccatgtgcttattgaaaacggatgtatcttctttgttttcttttaattcaatctctccattctttagatttaacttattcagtttactattactcaatgatttgacagtcttttgaacgaatattattgttgcaacaaatatatatgatagagcaaaaatatcagaccatttatttaatactggattacttaagcgattgcaaatccaatccacctccaaaaatgatggttcaaatacaataattaaggcaacaatataaaatattattgcaaaagataaagcatattgagcccaagttgatttatgataaatcctttttaatctggagttataaagcgtctcttgtttttctttataaataagttgttgaagaatgctgtattcaatacgattattcatcgtatcaatatctattttattctttttatcatctaatggtgactttagtgtagcaagagatattgaaagatatttgtatttacgatagtctttcatcaaagagcgaagaatggaactcttaccggatccataaggaccagtaagagcaatgttcaagatgtctttctcttctagttttcgtgcaagattcaaaacactcctatactgcttcttatcactttcactatcacgattaagcagagcaggagttaatgatacttgtttatcatcctccatcgaattatttgcacatattttcttccaaaatctccagttcatttattttcagctatttattaatcatatttttctagtttgttacagattgctatctatattaaagcaacaccaaattcacggattgtttcttcgctatctcttcctgagacagatttgcctgtcgcttgctctattctgtcaagcaattgttttgctcgatctatgaaataagcattgaaatcatctaatgcaagatgagcataacttaccttatgtgactctatagcttcctgtatctcaacttgttttaatcccttatttgccatagttccaatataggtacttggtgcatgtcctcctattgaacgattggaagatgcataaattggagtcttattaatgactgaattccattttatacgtggaaggttatttttctcgcaataagtttgagggaatatatgatgaatatcagcatcttcatcaatgtaagatgctatatccatacgatgacctgtcataaaatcaagtggtgaatcttgtaagataagtgccataacacctttgtacgctgcactattcctagtctgcatggtcaataaacgagttggttgtatattggaacgatatacagtctctggcatttcaccaccttccatccaacggaatacgcccattatatcagttgcaaatctagcttcattggcacccccatatagttcacccattacgccacaccaataccaacgagacaataattcctgtttgcttccaagatgcaacatttttttattttcgttgtcgtatgcaaagattgcagcaagtggaataagttgtgacgaatatggaagatctctggaacggaaaatcccctgatgtactaagaaatcagctgcatcacagaaacctttaatcaaagcgtcatgatacttcaaataatctttcaattcaagcctaagaatgtcttttttcttacatgttacagccacacgctcatcatcacctgaaaccactcttttataatatgataccaaaagagtcattgctgccaaaaaattagcaccagtgatttctttcaatagctcgccatttactttttgagcaaaaatatgacgaatggtctcccaatcttttctcaattcatgtccttcagcagcaaatgtagctgtgacgagttcgaaaaccgtaagaggtacaccaccagtgtttacattctcaaaaatctggcagacagcttctttcggggtttctttatcaagctgaattataggtatgttatactctaaaattgggcgaagaatctgctgtgagaaatcacggaataaatttctatactctctatcacctttgtaatagtcttccatatcataatgccaatcttccgtatcattatgagaaaacgtaatattcaagggaaacatcaggttctcaaattctttctctcttgtggataagtccagcgttacatcacgaccaatatttgttgtaagctgtttcttctctgatacagatatgattgcttccaatctgtccgcagtagagtctagacatttacgaatatctagataataatagcgtttgataattgtatctcgattggtctctaatcgagtattagttgctttcttacttttcaagacctgatataaagttgtgagtcgctgttgtccatcgagcacaagccactcaggtgtaacttctgatatagaatccacaccttcaaatgtgcgatacttaaaacggatatgctcaccaccattagccaaaaacatcgctgcacccattgggaagccagatgtgatactttctattagtttacatatcttcgtgtcatcccaaacccaactacgttgaaagtcgggtaattgagccttaccttcttcaaccatttttagaaggtcatcaagtttcttatcgtgtgattcaacagccataacaaatttattttatcaaccaattaataatacatttcaatatactgataagccttatcaaaaacttcttgatctttaatctggtagttaacccacagaatagaacgtagtttcttttttatctctcgctgagctgtaatgcttttaaaagcatctttaaacttacgtacaatagctaccacattttcatcaatatcagcaacaacccgttctacaatgataggtgtatcctcagttctaattgattcaaacaactccgtaagagcagctttagcttgttccctcttgtcaagaggttgatttgagtttttttcttcctcaagcacttctttagcaagggtgagcaatcctcggaggaaatcaatactagttataagattttcctccatatgacggcgcagttcatccaacttctcagcaaatgccttgtaattagggtctccatgatgctctcctaacctcaaacgaagcattttttccacttccaatatctttttaggattgtctttggcttgctccaacaccatatcaattacatctccatctaccacaagatcctcaagtggagtcccaatatcaattgtatcaatgttacgatgaatgatttcaatggttttagcacccaataaagtccatatgagtgaacctccggtactaacaggacgtacactttgatatacctgagccagccaagtataatccgcctgaaaaacagccagcattgcatccgggcttactgtttcccaagctttagccaatcgtgaaaaatgttttgcaaaattcgtttttgtagactcatcaagtaaacattgctgagcagcctgcaaaccttcccaaccaccgattgtccggtctacaccagggaaaaagtcaatacactcttgcaaaaattgaggtatcaacacttttatctcatcaatattttttacaactgtttttaccgtctcttcatcaaaagcaaggctcttggctacattatcaaatacaccaacaaaatctacaatcagaccacatttcttatcaacattgtactttctattcgtacggcaaatagcttgtaacaacgtatgatccttcattggtttatcaagatacatacattgcaaaatcggagcatcaaaacctgttaacagctttgaagtgacaatcaccattttaatcggtgacaatggatcacggaattgatcaagaagttttctttcttgttctctatcacgacggtatgtcttatactcatcagctttatcaccagccgtatgcataacgatagtggttgcatcttccgtacccaaaagagcatcaatcgttttcttatatttcacacagcagtctcgattatataccacaacttgggctttcatgccactgggctctacatactctttgaagtgatttacaatataacgtgcgacatcgttaattcgcttctctgctgtaaaaaatgcttcaacagaagttcgttttactaattcgttcttttcgtcctcggatatttgatcggtcagttcatcaaattcttcttgtaattgagtttcgttaagatgcatctctaccggcactgtttggaaattcaattcaagcgtagctccatcttcaacagaattttggaaagtgtattttgaaatatatccacctttctctaaatcctcatcagcaccaaacgattgaaaagtattcttatctcgtttgttgataggcgttccggtaagaccaaagaaaaatgcattaggtagtgcattgcgcattttttgtcctaaatccttttcctgagttcggtgtgcttcatctaccaataaaatgatattatctctttcattcagtacactatcaacatctccgaacttgaaaattgtcgttatcagaatcttgcgctgatcctgcttgaaaaatgcaactaactcatcttttgtctttgcagattctatattaggaatatcagcacgagtaaaatcgcccgttatctgatcttccaaatcaatacggtcatcaacgataacaactgtgggagcatgtaattcgttctgcaaacgtaatttttgggcagcaaataccatcaaccatgattttcccgaaccttggaaatgccaaataagacctttcttcggaccttgtttctctcgatatgtatttaagacacgctgaacaatagcttcacctcctagatattgttgataacggcaaactatttttatttttttgcctgatgatgttcctgtaaaaacactatagtaacgatatatgtcaagtagtcggtttggttgaactaaccccattacattacttttaaccgactctattgtgccatgctgacgaccttcatctttaaaccaaggcccccatttgtcaacaggtgcacagataccggcatattgaagttctttgccttcagtagcaaaggtcaatatattcggaacaaacatttctggaatgcttttttcataatgcagcatatcgatggctccgtcagcccatgttatctgagggcgaacaggagattttgcttcaccaacacaaatcggaattccatttatcagataaaccaagtccaaacgtttacctccaccaacagagctacgtggaaattcccattgattggttacgacacaataatcttcgaccgcatcttcgctaaagaatctgataggtatatattcaccatcctttccaaaaggctctgtgttttcattaaatagcaatgtacgaaaacgatcattggcagtcaccaattcatcataattacctccacaagtaatagcagcacggagtttataaataacttgctccgcttgttgatgtgttatcggattcaacctaataagagcttccaatagccatgattcaacaaggacagaatcagaactacgaggtatatcctgtgactttacatactgccaaccactttgggttgcagcttctatgagcatttgctccactgtattgtcttcgttaaacatatctatgattttcattgttatcaatttaataattaagcgattttccctaattcgtcactttgtatgtcattcaaatatactaaagctttttgaatgacagattttgatttatcggcttgttgggcaatggatgcaaactgttgttgcttctctattggaggcagtataacaggaatcttttggattatcttcaagttaagacctcctctaccattaacatctccagacagacctctaagttcgagatatctcccctgaagattatggtaaagatataagtagtttacacgctcgtcgggtacaatagcacacaaagactgatttgtacacagatcaacttctgtaatagccacagtaccacgagttttaccttgaccagcgatagcaattacaatagaatgtattggaaccatccttgtacttgcgctcttatatccaagctcagtaatgcgaaaatctgtatcttctacatgacctttgtgtacctcgccagaactcatccatcttattcttccattctcccaatattcaggatgagatgtgcttggagttgctccagcaaaacaatttgcaaactcaccaatagtcataattggaaagttatgggtattattctcaacggttccaaacatctcgataaattgcgatttgaaatcgccaaattttgatttgtcggcttgtttatatattgcttcaaaacgcctttgttcctctatcgcaggtaatccaaccataaaatggtccagatatgaagcactaactcttttctgcccgcctgttccagacatattttttgcagcacgctcacgaaatataggcattcgtgttaatgctaacagccaatagggactagatattccgttaattggccgcaatacatgaaattctgtagatcccattcctataccatttgtaagtccatgtacaatagctcctttgccattctccatacaaggtgtaatcttggcaaacaagacatcattattctcaaaatatgtaaagcctttttttacttttccatattcttcatcagtcatatctaccaaatatccatcctcacttaccgccggcataggaataaaagagactttatcggtgtcgcaaagagcaatgttaggacgtcttggatttagaatacaacattctcctaatcttttcaactcattcttctgatttaaagaaagaggattcccaaacatctcgataaattgcgacatactaaccaataaatttacggtgagacatttttacatttgtctgattcaccatagcatattgcaatgttgtatcaagactttgatgccctaagagatgctggacctgctctataggcatacctttatctatcgccattgttgccaacgtacggcgaaatttatgaggatgcaccttaggaatattcaattcacgccccaaacgacgtaaacgtatttccacaccacttatctgtaagcgatcgtaaggtgctaataacgaaacaaacaaggcaggattgtcatctatccgttctgccaaataacgttgtaaatgtatctttgtacgagcatcgaaataaactcgacgttgcttatctcctttaccggtaacgatacattccctattttcaaaatctatatcgttcctattaagtttgaccaactcaccgacacgcataccagtagaagctaacaaatctatcaaggctaaatcgcgaataccttcgcaatgatctcgcatttgttccaaggcttcatcggagtatgtttctttgactgttttcccgacttttactttatgaatccgacgtactgggctcttgacaatataatcctcatcctcaagccatgcaaagaagctcgataagatgcgacgtatattgtctaccgtaacctttgtagcaccgcttgtctgctgataatcatttaagtaattacgcaagtcatcagtagtgatatggcgaatatttttttctattttcctgatagcattgcttaatgtacttcgatagtagtgcatcgacttatccgaacatccttcaactcttttagccgataaaaaactatctatcaattcactattaccgctgcactcttcattgtttttagacgacacgttgatatcacgaaaggcataatctagcacctttcgtaattgactcatttgctcgttgtttaaaactcccagcatagcctgctctatgtcattaatcagattttctatcatattattaataaaattagttatccaattaagccgcagctatcaacgtatctctcttattctatccgtttattaaactctttatgactttatcgatattttcaatgcactgcttcaattcaaattttgatttatcggcttgtttgaggacctcaacaaacaagatttgttcatccatactaggaacaggaactttcattttcttgatatctgagaatacgatatcaacttgatttgtagaaccagttacatattgcctgtatatttctgcttgcgtatcatttaaagaaaggtacgtattaagcacttctggaagaatcactgctctatctgttgacaaggcaatcacatgtccgtcatttatgtaggtattattatctgaaggacaaataaatacacaacatcgtccaagagtaccatttccagttgcattcaagagaacatctcctgattcaagtattctcttcctaactgggatttcctcgttgtggtattttatattccccaaacgttgaccatcccaatggatacatgcttgattaatcactaagacagaagaagattcaacatattttggcgttatccccttactcatgattggacaaaccgattcaagggtttgcttattatgagtattataatacatctcgataaattgcgatttcaccatttcatcagtggcaacaagtagtttcttataagcctccttcaatcgataggctgcccataatttatcaacaagaactttttgttcctctaatggaggtaattcaaactcaaaatcagccaaatcagaaaataacacataaggatttgtagaaccttttgatttagctatcgaccaagtcgtaaaatcctttgatagcataatgaacggcaacaaacgttgctcaaatgcatgaggatctttcgtttcaaaaacaaaagtagtattagcacatactccttcaaaatcagcaactgctattttctttagatatgttcttcttgaaccatacaaaatctgacctggtttaaatacacgaataaaagcaggtccaacatcatctgttgtaaaacatcctttcctatgtatggttaaatcctccgaatccatatgatcgcctgcaacatagtattcatacggattatttagacgatctatatttatcttcacatctttaacgacatctccaaactttaccctactcatattttagcatacttaaaagattagcaacttcgatatgcattgatcttgaagcctcaatccattttgggagtgattcatccaaaatgtatatttcatttgttcctttttgcttgacataactttgtatactaagcaaactcttattattgtctatatcatatatatcagcaacttttgcaaaatattctatatcctcaaaattttcataagcagaaataattttctggatgtgagtattttctaaataactttcagcattctttcttgatacctctccttttgcgtcaataaaaataactttacctttatgactatcttcttttctatttttgcagataataatacaagcctccatagaagcattaaaaaatagattaggaccaagtccaattacgcaatctacaatatctatttcaactaattttttgcgcaactcatattcttcatcacgaaatagtacaccatggggaaacaatatagcacacctaccagtatttctatccatcgaagcaataatatgttgaaaaaatgcataatcagctcttccttgcggaggcgttcccaagaaattacgtccccacttatcattcatgaatttttcacgattccattctttgattgaataaggaggatttgccagaacaatgtcgaacttacgaagatggctgccatccaagaatgcaggatgctccaacgtatctgcacatgcaatcgaaaaatcttcaactccattcaaataaagattcattcgtgcaatagaagaagtcaagccattcacctcttgtccgaacacctgtacactctgccactctgcacctttgttgcgaagatagtctaaacatttaaccaacatacccccggaaccacaagttgggtcataaatgctttcattcggttgtggctgcagtatctcagccataagttgaacgactgttctattcgtatagaactcctgagcagtatttccggcatcatcggcaaactttccaacaaggtattcgtatgcctgccccatctcatcggcaggacaagcctttaggctcaacgtatatttagaaaaatcctcaatcaacgaagtaatgatattatcaggcatcttcgccttattggtccagccatccttaggtccgaaaataccttctaatcctccgatttttctaccatccatttccttagcaggattggcttgctcaatggcaataaatgcttcgactaatttattaccaacattttccgtcacctcacgaacatctctccagtgcgcaccatcaggaatacggatggggagatcttctacttgcatacctgcatactcaactcctccttcacatacaaaaccttcaaactgttcatcataaacatcggaaatgcgtttgaaaaaaagcaaagggaaaatatactctttatatccagccgcatcaatctggccacgcaaatgagtggcagctgcccaaagaaaacctttaagttcatcgagcgtaatagggtcgtccggatgacgatattgttttactttttctgccatattgattatgcgttaatgagtaatgaaaattctttctccaatcgcttcacatcttcgtatgcttgtttgaactcagccaacacttccacataaggacgaatttcctccttgtggtaaaccacatagcgattgggcgaaagattatactctttatctcttatctcctgcaatgtaacgattcgagaatagtcctcttcatcggagtaattttgataaagtgaatataacctatctatatcattctcttctaaaatattctgcgctctcttttgagttagaattttggaaccatctatcatcaaaatccgtccggaatgatgagccggtttcatccttcgtattatcaagaaacacggagatagtccagttccataaaacaatttatctcctaatgtaacaacggcttctatcaaatcactttccactaattgcttccgtatttctgcttcttgatttccacgaaacagaatgccttgtggcattacaacagccatacgccccttgccagaggacatagaacatatcatatgctgaatccacgcatagtcaccacaactatcactcggtgtgccatagatattgcgcttatatttatctgaactccattccgttgctccccaattttcaagagaaaatggagggtttgctataacacaatcgaatttggcgatattaccaccttgaagaatttttgggtctctcaatgtgtcgccttgcattacattaaaatcagatgcaccatgcaggaatagattcattttagcaatggccgcattcacaacattcttctcttgtccgaatatacttccacagcaaagagaatcatcgtgcatatatcgtatagcttcgataagcattcctccactaccacaagcaggatcatatacagtttcccccggttgcggatcaagaatatgcactaataatctcacaacagaacgaggagtataaaactctccggcctgggccttactgtcatcagcaaacttctttaatagtatctcgtaggcatcacccattaaatctgcaggataatccttattaccaagttttcgttttgatagatgttctatcaggtcacgaatcttactgtcattgagaattgccttattagtccatttctgagatgaaaacatagatagcaccccatacaatgtatctgggtttgctatctctatctgtctcatagcaccaactatggctgctccaagattttctgtacgttctcggacttcttgccaatgacaaccatcaggaataacaaaacgatgttgctctggcagagatgcatactccttatcaccaccacttgatattaaagcttcttctgtttcttcatcataaacatcagatatccgcttgtaataaagcaaaggcgtgatataatctttaaaattatcctggcttacaggaccgcgtattatattacaggcctcaaacaagaaattatataagtcctgtgcgcctgtaagctctttatttattgttttttttgccatctaataactctgtcaaatagtgaatttgagattcctttatttcattaactcaacaacatcttccggcaacaccacattctcggaatcacctttcggagcgttcttaaggaacagcaccggaacgatggtgtagttcttggcaaacggcagcagattagctttgcggagaagtgcagcagttagctgtttaccattctcccttattgtccacttgcattcgccaaccagcagatactttttgtcaagcgattcggccataacatcgaactcgacttgttccggcttcttgtcctcattgagaacagaaccccaccagcgttttaccttgccataaaccactccattgacaagatttcctgttacggcatcccgacataatttttcccattgcatactcacatactccgataaatgagcagtcaaagcctgttctattggcaaacgacgaccaagctcgatgaacgaacgattaggtacgacaaactgataataaaatgccataaacggatcggctatcttgtaaagactctttttcgcattcttttcatcaatcccaaacggaacatctttctccaaaaatccgagatcaataagtttcttcaatggacgcgacaggttggttgcaggctcattgcatcttgcggcaatctcagaaagccgatttgcaccagtaccgatataagacattatcgtcgaagtcttaacaatatcctttacatcgtcctgaaacaattttatcggttcttcgtaaagagttccatttacagaaaggatattgtgccacaaagcatcattaagtgaattttggttttcccttagttcccaataacgcggcacacctccccaaacagcatattcttcaatggcattcatcgcatcaaggctcaaagcctcttgaatatatggcaaacgtatcggtgcaagtttcatgatctcatcagcacgaccatagagaggtgcagtagaatcaagaaacaatccatacatcatattttgtgacgaaccgcaaagcacaagattatacttcaactgcttttcatcaaccagtttttgtagcacagacggcagttcagaagattgctctacaagatacggaaactcatccaaacataaagtaaaacgcttgtctgttcgataattgaccgcacgaaacatagattcccaatccggatatgtcagtttgtcgaaatccgggaacacttgtgctattacttttgcaagcaatactctctgatgttgcccttcagaacggtcagcaaggaagtaaacatcattttctgacaacactcttttaatgagcgttgacttacccagccgtctgcgaccgtacatcacgactagcgaggatttctctctcgcaagagcatctttcagtcgtgctgcttcatctattctatcaacgaatttcatacgccttatttattatgcaatacaaacataatgtttttatagcataacgcaaaattttgagccatgttttttattccaacagaagaatttgcaacttatgtactaggagaatatgcactctattccttttttgaagctcgcctccttgtcttcagactcaaatcctgcaaagcttttcccagtttgtcttctttggccagccacaggatatcatcgtcaagctgcaaggcatacagcactcgcaagtagattccgattgctactgttgatgcacctttctctattcgggacacagtcaacggagagcaagtagcacgttctgcaatctgagccacactcaaatttctgcgtaaacgagctaatttaatctgttctcccacaaccgacattttctgctccaattttcggggcagtttggttcccattgtattctttgtcatatctttatctatttaaggtgcaaagcgaccgtgtcgataactttaccatagtcaatctatcatataatatgcaaagatgacacttttgatttgcttaatgatatattacacatacaatatctgacatttttcagtcaacatcggaaaaaatccagtctttagacgcatattccttttcaaactctgccaaatcttcctttatacgctcacgaaaattctcttcgctatcatcgccactcatcatccaatctacgcgagttgcatatatctctgctatacgaatttgccgatatgcctccttcgttacatttatcgtttcatctgacagttccaatacatcagcatcatctggatagcggtcataataacaatgatgaatcgagtataataccggaattcgttcaccgtcagaagtaccagacatatatcgcgttgttgattggaatattactccatctacgaaaaaatgctgctctgaatatttttgttctgccttgacgatagttttatctgtcagaagaaaagattccgcatcttcataactggcaaaacccatatagctatggtatgaaacaaagctatctttctcgtaaatagtccaataatctttatgtatcttctccggctttggttgtaaagctctcgcaatatcacgctcgatagaattagctatctctccgaaggcaatcatatgccgattaaaatatccgccactcatggttatttctacttcattaaatccacattttccttgtttttaaactcaagttctgtaaaactttctctaaaattgtcttctttggcaagccttagaatctcatcaccaagttgaaaagtacaccgtatgcaaagatagatttcaattgcctccgtcatacgcctttctatatttgccaaataacctcagaagtttttcatatagcttcttatagcaccttcaaccttgaatcccgtattttctataatattgcctctaaaaaatcaagtgcagtctgtacacggtctttgccagggagatcaagaagcacaatgccgtcaaagctgaattttttttcaacatccctaaaaccaactgtatgctcttctgcgtctgaaatagtttcaaaacgatctccaaactttctagtaactttctgtcttttgtcccttatgccaatctcccaaccttttggatagcattccatatacatggcatcagattccgaaccctcagtccttatgtacaaagcaccgtgttccgcattgtcactccaatcactgagttcgtattcatgactccccccactttcatatagtttacgcactgtgtatgcatatgggtcagtattatatccctgccatggtttcgtttttggagatttaatggtccatacagtaaattcattatctgcatcatgcctgaaatagtggcgcatcacaccttctttatttgcttctacaaattctttatagttcaccatataataggccatgctgtcataagaataacgtatagggctatcatcgttcatcaaatgcgtaaaagcttcaactgcattatcaaaacctctatcatctttacctattgtgaggagataatcccatcttcccgtcataccgaaaaaccagcagtccacatatggcctgatcccattgaaaccgcagcctacaaggctttggaccctttcagtatcgctcatagcccagaaaccatagaatctctttatgtagctttctgtatcagtacaacttattatagaaggcattaaaagtccgaatgaataataaagaggacgacacgtggacagttccctgataatatcaaaattcggcttatcatataatctgcatttgacgcgctcatcctcaagagatttttcagttgttcccagtagggtttcaaacatattcgttgcagtagagagtttacgcgaaatattgtcagcctcatggaaatccgctaaacgggcattcgctccaacagaatatccgttggtaagacgctgtcttcttcctctgacccaaccagtcattaccctcaagtagtctgtagaagcaactatgtcagaatctggcaaaagttcctcagaatgggaaagcatccactgaaagaaactccacaagataatctgaaatgcaatatccatatcagttcccatttctagacatgttgagacaaggtctatattatagtcaaacagattgaccttatgtctctcctcctctttctccagacgtgcagtagaagatgttgcaataaaataacgcgacatgaaagtaccaaaatcctcgtacctcttgtagatacctacaagcagatcaagaatcctgaacagctttatcacattctccttatccttatacacttcaagccttgaacggtctatttcatatgtataaagatccttcatatttttcagtccactgtttttataaacagtctctgcatccggcatagtggcaaacatgaggaattgcgacacatagtcaagcaggttcatgaaccattcatcaatggacggatacaagatcttcttcttttcctcctcgctttttgcctgccagcggctatacgccttcggccagagcatatcacaccagtcatgttcgattgaatattcaaagtattctttcaaggtaggcgtatccggcattcccggaatatcaccgaactgatattttacgttcttgaaattgattcccagaaaatcttcgaattccgctttccagttttcgaatggagtaagcaatttacctctggcgttcatcttgacatacaagtcgtcatttaggtctaaattctccatatcaaggttctcaaactcaaacggtgaatcattgaagaatgtatctgccatatcctctatatggtctttatacggttccgatccaagcacaaaatcagccttatcaagaaattcaagcatggaatttatggaagaatccaacttccatgattcagagaaccatcctggaacattttttatgtaatccgatatggaaggtacatacttttccggcagtttgaattcatgcataagcttgcagaactgctctgttgacggacgtgatgtatatgtaagcggcttcaggcaaccggaatatttaaggccacacttctggttcagcaaccagcctataagagcaagtgtagttagcctctgctgcccgtccaccggttggaaatatggttcagacgtttttgtcatatccgttgatccatatatgaaatgcaattcacacgtttcccggttcagtaaggcatcaagcagttttttgatgaacttgtcacgcttttcgaagtttacatctgctccctgtacgtagtcacgttggattataggaatagctacaccgtttctggcggcgaacttattgtatttttctgtattcttgttgagcatattctcgtttattttgaggtgtaataattatatacttcttcaataactctaaaatagttgttcctgtcttccggacgccataaacgcatatcaccaggagagcatctggaatactctttacaaaacaccttgcgtgttgacggaggtgcataagtaccatttggggtagacggatcagaaatgtcacacctgtcatggcggtccataagaatggagcgtttcctgtccaatagataattctgtaaggccgagtttgtctctttgtcaaccagggccagatttctaatactatgcatctcattctggtttatcccggccaggtcaccgaaaaatccgtctaggattctggcattgcgctctagttcgttgtggttgtaatcatcaaaatagtttttcttgtcagatgtcaaagtcttcaaaacgctaatggccttctctacttccgctctcttcacagctacccgtgaattcaggtccatggagtcagaattctggccatcagtcgcctcgttctgtagcaaggtgcgtaattcagcatcatcaagttttttgaaatcctcacttctcctttcaaaccacattctgaaatcctggtaattgatatcagaggtaatgttttgcggatggatatgttcaagcgatgtcacattgaatatctcaaataaatgaaacgcaaaccgcttttcttccgcattgtcatttatcgcttcttgaacattaagcactttcaacacttttattatggcttcgttgtgttcatcatacctgaggccttcaagagtaatatccttccccagtctgacaagtctgcccacctccttctccagtttgtcggtaaattgcggtctatcaattggagtaccgttttcatctactgatagtttatagatatactctacaaaatctctgcgtttccgttgcttcccgatttgcagtatacggcagagccctatcagatgataccaatgcctgttggaataccagttgcatacaagattgaaaattgtctggatccttttccatacatcttctaccgtattactgttattgtcattcctcctaagatattcattgattacctgataattgaagtcatctctgaaatctttggactccttgcgttccacgggtctgttgccgtctacgttgctcatttcattattcagtctgtctgctacaaaatcaaggacaagttccatgtgggacaatgtgccgtcattcgattcggcgagcatagaccataaataaggattctgtaatgcatgttccattgagtcccactcaagcgctctgcgatatgatgcgcccctgctataatgcccagatgaatttgtattcctttcctgcagcaacaaagccttgacaagctccgtcgaggtcagcggtatctttccatagttaagttcacggaaagccttgtgtgcttccctgctgttgatttcgtaccatattactcggacatcgttttgttcctcatccccatccggcatcattgcaaagatatctcgaatttttcctttatatctatcatgtccatctcttgaaaaccacactacaattgtagagtatgcttttttcacatagaaattgtctatgttatcaataaacttcttatcatcctccatgaattcaagtttgtccagatatccattctggacatctctactgggaagagaaaatgtatataccggatattcataatcactgtttttcgacaaataatgcatgaggatatatatcgttgtaaggcgttgctgaccatcgactacaaaatacgtatcggcattttcgggatgtcttactactgtaatgggctgaaggcaatagtatggttcatggccttcattattacgattcctttttgtcttcagagattttacaaaatccaacaggtcatcaagaagttcctctacttgacgtgattcccaacgatatccacgttggtacggcggtataatgaaatgcatttctagcaattcatgaaacggttttagtacaagagacatatactatggtttttaatagttattacaaaattattacttcaatactcttcaaaatctcaatagcttttttctcgttcaagccagctttaaccgcaacggctataatatcttctttcgttggctcaattttgtcattaattgaagttgttcggaagccatttatgccatcacttggcaaaaggtcgaatgccggagcaaaatgccaatcgccatcacgatagatgaaagcaaaattcttggcgtggtcatctttgttatcaatcaagtagttgaataccataagacgatacactttccacatttccgccacgctatgcgtcaaaactgcgcatacttgaaagatatgagtatagtctatgcttggcaaacgatagtccgccccgattagtccagctacactaacaacatgcaatttgccgcttggggtacggtcaaaacgctcaactccgaaatatttttcctcaaacaatcgtgtttctggcatttcaattccgcatttctttgcaagaagcgaataattgtactcatcaacaccgatacgttttgaatctctcttcgcacgaaacttaaccatccattctttatcttcaaagcgagtgaatattttcggacgggcaccaccgggagaaccgcctctatattgaaactcctcgattccctcacctgtataatcttcactatcaagaatctgttcagcgttcaatgccaacttctcgaaatccgcatactcttgttttgatacaacacttttgtcaggacgaaactccaacgcaccacgtccagtcgaaccgaccaatgcaagacggtcaagcaatgataatgtatggggatttattccattctgttgcaaatatctatcaagaatcaacaccccccaaccgtcaggcaagcaatcatcaaaaacaccgaattcgccttcaaacggacgaggttttgctataaataccccgctgcgtaatggcaattcaaatggagatatagagaagcctgtattgagccattcagccgaatactcaaatgcacataatccctctttggtcaaagccaaacgaccgaccaaacgattatcataaatgacttctatctgttttatgctattcatgtttttttcctcttttaaaagttatgacaatagagaaaccgcatttttcaaaaccctattatcacgataaatgtattcatcaaataaatcaagtatctcattcatagcatcctcattctcatcctgactcagttttttatatatctcaagtaaaatttcaactatttcatcatcgaccatatttacaccatctatgtcagaatacctctgagaggagatgaatttataagactggacgggataaactggaatacatttctttacatattctagctgattatatatttctctatccttcttacccatattggtcttgacaataccgcagtaccagtcaaaagcctcaattgggagggaattacaataccataagtacgcatttacaactttttccctattgtccattgcatatcgttctagatacttcatgcttaaatctcggtattcagcatacacatatgacttcatggcaatctcaacgatttttgctacaatatcctcattatcaacagcaagtattttctcaagtcgatcttcacattcctctgaattctgtccccctaccgcaccataaaaatatatctgaacgagtaattcatggcttgaaaaatcatgctcaatacaattgatataattacttactacatcattcttatggtaaaagcaccattgtattgcatttgctcgaatatataatgcttcggggcccataccagaaagaagaggtttcagcatccggaaatatagttcttcatcaaaatagctttccgtattaaggtaataaagtggcatagttttcacacagtcgtgcaagatcgaacagcaattggtgaagaactcgtaaatttccaatctacgcgacggtatcgtacacatatgcactaataattcagcagcacgaccttgatacgaattcataccccttgtaagtaagtcagatgctcgcctactcatatccatgtttctatcctcatctataactaaactatcattctcagcaaaagaatcaatagtaagagttttgcataactgcatgattccatcaatatgcctattttcctctttaatatagtactcaacaatttggctaaacgtatagctatctaacttggcaaacacttctgtgatgtacagctccgccaaattccaaagagaattaggattgattccgccagcaagaagaccttcaagaccggcaactttatacatatccgaaatatcagccatagtgcttatttccaatacaaaatcgtaaaacttattaggctcagaggtcacacactttttaaaagcatcagcatgttctcttaggctgataggatttctaccttcacgccatttatattctccaagtttcagaaatgaactcagccagttcgaaatcggccatcttccatatttttcactacttacaacaccaccacaaaaatgtcctgcaataacagaatgatcaggcttttcaacttcatatcgtcttccaaatctgcgcataagttcttgataacatctcttcatttccggaatcataaggtcttctggcaatgtattgcatatcagtacccatttgttccaccataaatgaggacataggaatcgactccactttcttgcagcatcgtatttaaaatcgaattcagacttataagataacaataatctctgatacaactctgcatcgttttcgttcaatgtatcataccaagctctaagcattttcaaaaagaaaaactctacatctccgtgaagatatctttcgatttcctcactgttctccaagagaggacgaatcaaattatcatacaattttggagctactgccatagcagtaaaagccatagataatgttgtctcatttttcagtgacaaaaggtctataacgagtgggcgcacaatagtttcatctggcgaatagcgaatcaaaaggtcttcgtatatcttcagcagttttccgttactagtctccatatcaatcctgtagaatgcttttgttgttgaaaaaccataatagccattttgcgctgttttatataccgttttgcaaatgcaattgtgcagtactctgagcatttccttcgagtattcaatagacagtttggggcataatactttcgccaactcatattgatcatgtttattacatgagtcttcagacataaaacaatctataatcagtttctctgtctcctccaaagcaaatttactgttgctttgaattgcatcctgaattatattgatgacaaaaaaagcgttttgtgattttgtttcagcgtatgctttgagaacacaagattgaccatagtcgttatgttctctcaaattatatgcaatagctaataatcttgattcctgatcttgtatttgattaatcataccatacacatcttctggattacggaaagcatagcgggataaacataccatgattgggaaaaacacttcatcggtcttcctgagttcaggcatcattctgttcaaaatatttcggatagttggaaaccaacttattgaacttactcctcgaaggaaatatcccaacatttttctatctttctgatagacctcggtaataagaagtttttcaccacaggatggattatttacaaaagctaataccgataatgttaatagttttagatgaagtctaatatccgaatccatgaggatactacgagcttcttcaacgaatttgatgatatcatgcccccgtttaaaatcaagaacggccttaaccattgatctcatttccaagccctgaatctcttttttgatatcagttgcaaacagactattattttcagaataatgacgggcaagagtatattcatagaaagattgatggaagaatgaaacagcacatccctcacgccggataagaccattgcttgccagatactcgtaagcttgtttctgactggaggttggtgcaaactgaggattcaaggttccagccttacgtattgtttcagcaatcttatacatcaactgttcccttatttccacatcatattgtgaggatgaatccaaaatgatagtgtcccatagggcatcgtaaagttctatctgactattgaagtttattcttgatttattccgctgaaacaaaatagaaaatgaattcagaacctgaactgttctgagtattttagccgtcacacaatctactttcttgctaagcccttcttccagtttatcaagtgccatggcaacctcctcatcggacagttctcctatctcaataattgtggatttatccttaaggctatttaaaatagaatcatattcaagatcatatttacgacacgaaacaacagctttaacattagtccaatcttccagtgatgatagtactgccatcatcatatttaagtgtgttctatcgttagtgagagattgagacagtgcatcgatttgatctataatcagaatcacgttctcagctgatgcactgtaatatgccaatgtatcacgcaattcgcctaaagtgataggattaccattatcatcaatagaatcagctttaatgcataaatacttgataccatcattccggttcttagaaatcagttcttttaatacagctgacttacctactccggcatcacctgcaagaagacaaatggatttctcatttctgctgatatctttcgtaatccattgcattacttcatcaacctgatacctatatatatgggaatcttttacaccgtgtaattcagaggaaatgagattaaagcacatcctttgttttgaagcaaactgatctgccaattttcggtcatccttaatggaatccattttctttttatatagttcacgccaaagttcaatagtttcttttacattgttttctgagcatttttcactatcaagaaaatgatatcttgctgtattttgtatgtgatctgacttatttctaaattcttctattgaagtttcgctaatatttctccaataaatttttttgtgctcataatcacaagcaataaataagacaagttcacctttatgtcgttctgcatatgcataaatcgactgaggaatgtcataatatacatccccatttttctctggataagtaagatgtttaacttgaaccacaaccttttctcttgcggtaccatcaggacacagaatatcaagatatccatcaatattcggcaaggtaccgccttcttgaagctgagaacagtcaaccaagtcatccggaaagatatctttcaaaaaccgaattgaacggctatccaatttactggattcagtaacattaacatttggaattagttccctatcgctcataattaaaggccattttcttgaatatattttagaaaattgctcgttgtcctcaacaaggccaaacgaccgaccaaacgattgtcataaatgatttctatctgctttatgctattcatttttcttccctcttttacgtataacactttgctcattcaatacatcatctaatgactgatattgcttctgcgcaaaaagagcatcaaaatcagaaagcgcattcaaagcaaagcctacttgaagcaatcctcttaatgaaatctctcccgtctgctcaaatctgcgataagtagcaaacttgactcctgctcttgctgccaatccttcttgagttaagtccaattcaagtctccgaaccttgactcttgctgcaatttgcaaagcaatatcactgggacttgaaacattaaaagctattatattattcatagtttacatatctgccaatcaacaaacaaaatattattcaatacaaaaataagacttattcctgaatataccaccaaattcagaatttatttgcacctcaaaatgaaaatcaactttactttatctccgtattcatatatacgtacattaaagtaaagctaacagagggagagaaaaaaaatggcttcgccaaagccgaaccgaactatatctgccgactttctttttttggctgcaaaagacacagaaatcctgctcacaaaacagacatgattcgagctattgtaagacacaagagccaaccccaaaatccgtaaaaccatctctgattttgcaactcgaatcggcgaaataatcaccgatatgccttatcttcgcgaaccggaggtttcggagcaaaagagagccatttttctctttttcccttcgtttgaagacaaactaaggttaaaaacgttaaatcttcgattttcggcaaaaaaaacaagtaaatttttgagcagtctatcttttaagccgtaaactattgataatcaattagcataatatgctgtatcggcaagtaaaacagcccaaacaactctgaacatttcggaactactataacaagagggcacttacacattatccgaccacaaaatcttccgatttaaaattactatagaaacgtcctgaaacagcagtaaacttcaatacacagtaatcagggtccgtcactccctccggataatacatggtatctccctcctgccagatcatctctttactggcactatccgtcaagacctccatcataccgcgtagcataacccctctaaagaatctcgtatcacaaaagtagatacacgcatggttgttctcccggtattgcgccacacgcatggacgacgtatttgttgtcagataaatcgtttttatcccctttctttttctgggttgcaacattgctttgatggtaggaaatccttcaccgtctatcgaaccgataaaagctgttttcagcttatcaatcatgttgcctactgttttttccgcgtctctcatcattttactttttattattggtttattatctgatgcgaaagtagagaaatgtcaggaaagcaatgcaataaaaagaaaggtagaaatagcactttttacggtttgtgcgctttacgatataataatggagtttctcccgtatgctgccggaagctacggataaaataagaaaccgttgaaaaacagagttcaaatgcaatatcagctataggaaagtccgtataaacaagcagcctcttagcctcttccatcaccttgctctgaatatattgttttgcgctgattcccatggtcgaggttatcatctcattcagataattaggagtaatgcagagcttatccgcataatattgaaccaaatgttgctcttttgcatgtgtagcaaccaaattcatgaatttacttacatgattattggaaacttccctacttctgccctcctctatcgaagtcattttaaggtaagcacggtccagcaacatcaggacttcataaagtaatgctctcaaaacgtgtacatcgccctgttgatacgaatcaatctccatctttatatcatgcaaggtttcaagtatgcgtgtataaagctcatcagacaaatgtagtagtgatgaaaaactttctatctgaaaaaacgaaagatgctgtacaaacaaagaatctttaaagagggaagacaaaaactcttcttcgaaaatcagagcatacccattgatgatatgatgagtatcccagttctggatttcccccggtttagagaaaagaacgtcacgaggaattgcttcataggtttggttatcgactgaaaaagctcccttaccttctgttataaaagtaatatcataataatttagagtgtggacagcacttttagccaggaacttcttcacatacttcagttctactacatcgaccaaaagttcactcccatacttatgcttataaaaagtatatcgaggtattgagtttttcattttagtcacttaaaaacacctaattcgacatagcaggcatcattgtgcctctcaaatataatttcctttgggtatatcgtaaataccagatacagatcaataatgaaacgaccgttgaaatgggtggagcaaatcccatgataaacagcgacgagctatctatctggctgaaccagtatgacaatggtatacggaacaggaaagtggctatcagactgtgaatcatcgggaataacgagtttccttgtccactgaaataagaattaatgcagaacacgaaactaaccacgatgcagtcgatgctataccctcgcaaataatctgccgccattgccaccacagcagcatctttcgtaaagaaagcagtaagagtctccggcaggaattgcgaatacacgcaaaccgacacaccgaaaacaagagcaatcccaatccccgaagccagacatttattcattctcttgataagtcccgctccatagttctgtgcagtcatggttgccacagccgatgatatagccatcggaggcagcatagcaaacacgatgattttctcaacaacacccagggaagcagatgcaatgactcccatctgattgacaatgacagtgataatcagaaaagaaacattgattaaagcatcctgcaaagcaataggtgctcccaacaccaagatatttttagacagattccggttcaatcgaatatctttccgtgaaaagtcaaaatggaatccgtgccggtataagaaccagagcgctattccaaagctgactccttgtgcagttacagtagcgatagccgctcccgtagccccccaatgaaaataaccgaccaatataaaatcgagcactatatttatcacacatgccagcccaacaaaataaagtggtgttttagaatcacccaatccacgcaaaataccacatacaacattatatcctactataaacagaatacccagagagcataccaaaatatagtttttcgtatctaccatcgcttcgacaggagtatgcatcagttctgctatccgactatgaaaaagcaccatgaccaaagttagcactacgccggttattgaaaacaaccatacggaagacccgatagtaaaagctactttccgattgtctttagctccggtagcaatagcaatcagcactgttgtcccggtagtaatacccagaataatacctgtaattgtctgcatcacctgactaccaatagctacggctgccacacttgccgaatcatcatattgtccgacaacgaaaaggtcagccccgccataaagtgcctggagcacattggcaatcagaaaaggtactgcaaactgcaacaataccttcggtacgcttccttgtgtcaaatctaactctttcatagtttcttcgatacttttcctctttatcttattttgttacaacataaaaaaagtgccggacaagcgaatgatttacaccattcatcttatccagcactataattattattatagcaccctccgatgaggatttttatgcctgtccctatttcagggctgcaaatatgggctttgttttcataattaccaaattttaaccggtttttattttcttatgaagatgtaactagctatatatcaactattatcagacgaggtttggtctataggatctccgttagaaaaacgaaagaaagctgccaaccgatccggattcagcgtataacgtgcgcgttcttttaataagggttccgcattcattacggcacaagaatgagaaaccacggacatcatcggccagtcctttaacgaatttcctacaactaaagtgtgttcagaagctaaacccaaagccttacataactgaagcatcccctcttttttactcgcttcaggatgaatgactgttatcagcggagctttatgaaagacctggcagggattttctttcaaccgggtaagaatagcttctctctgttctttatcacgtaccaatatactatacttgtaaaccactccttcataactatgaatagtaacttttgacgattctccatatacctccggatatactttcaccggcaaacacttaatctgccgcgaataagataataaacctccatctgcaaacactcctcccctgaataaatcgaaaagagcctttcccagctttttcttcgcctgctccatcgacagagaagtggcaagatataaggaaacggactgtgccatatatcgcaaagcgttagcataactttctggaacttttccctgtgaatcagtcagtgttccatccacatcgaagaaaacagtcgtaataagtggcttgtccggtattcgccagaataccccttctcccattattcgatgtaaagggtgattgttcaggttactaaatgcaatataacagtcacaaaccttcctcttgcaagataacggcacaacagctccatcaccttgataaaaattacctatcttcacccggcttcggggacaagcatacatatcccctttccaatcgataaaacaattatcccttcctcctgcgcaaacttcccattgtgccggagcattcttcaagtcatactcaaaaagattatccagttgactgaaaaactgaatatcttcctgacttaatggtgcccttaacccttgcatagcattaatgaataaataaatatccggtaaaagagcattccgtaaatcattaagtacagcctttgcagagggatttcctaccgctccggcacatacctgtattcccgcatgatggagtatatgaatctgatgcgcaaatttctctaccgaagtcatctcaggatgaaaactggcccagagccttatcttacttatcacagtgggagccacacgaatctcatcaagccagtgtttagccggaaaagaaaagttagtctgacaggaaattccggacacctgtggcaatgccgccaaatgcatcattcctttccgataataacgatggatcaacgcttcaccgtaaggaataataaatagctgcaacggctcccctttccattgttcaatagctgctataaaacgattccatgcctgttcatcctgtgttgtatctgccagatgcgacttcttgccgaaagggcaataagaacaggtatagttgcagctattcaatttaccgcgataatatatatgcctgaaggaaagtaaagagctttcgttttccatttctatttcgttcaataagaataagtttccatcagttctcttatttcaggagtaatgaacaactgaccaatataatcggagtatgccattccgtcggaagtcagacaaatacgaccgttatccgtattttctatccattgccgttcagctaactgtcgaaacaacggcacattatccggtgattctccaaaacgacgctcatattcggccttatcaagccccatataatacatcagatttttaatgatgaaacgttgtcgccgttcttcctgagaaagaataaatccattacgagccactgtaaaatcagtagtgcccatataatcatctatctctccggcaatacaacgctggcaaacagtataccgggtggcataatgcaaattacccaggtaactgcgtccgccggagccacacgacagcatcacttcatccccacatgagatttccgcatcagtagacggatgatgaataaaacgtcgcatcgaagtttgtagaaaacctctgtctttcaacaaatcacaagcggcacaatacatctgaaaacagacatcgtcggattcccgctccgtgatagccgttcccggtcgcacatatagcggatagataaagagttcgttaggctgaaacagaagagcctgttccaatgaataaagaaagctggccacagtttgtcctttgattccgtaaatcaaatcaatattaaaaaacgggaattgtctcttccgaatagcctccagcgcctgattaatcatgtctcgccggggacgtcttttcaaagcagttaattcttcgtcaaggaaactctgtacgccaatactcacacgagccactcctgcttgcttcaataagttcaaacgggcaggatcggcatattccggcgatgtttctacggaagtaaaggtatgtgaaggatgcactccgaataaggcagctgtatccagtaagtattccagttgaggaacagtgaggagcaacggtgtgcctcctccaatggcgaaactatcaaatgccagtccggtagtgagtggagacaactgttgcgcctgcttgtgaagagtttccaaataagttgcgatataatccgcacgatttgtttgcagagaaaacaggttgcaatatccacatttatgactacaaaaaggaatatggaaataaagcgatgctttctgtccttccacctgtttcaggtaaggaaccagcgaaaccggggacggaaaagaacgataagcagttttatgtggataactatacatatagtctacatatcgtggtagcggttgattcattttttcgttaaaataaagtgtttgtaagggactgtataaaccgtttcgtgagatatgcaatgatattcatatccatcctctccatagcaagtgccatgatcggaaagagcaatcaccagcgtatttccccgcttctgaaaggcctgaaataaacggggtagctgactgtcgacatattgcagcgcggcagcgtgtgattccttatcatccttcattttgccttccacataatgacagttcggataatgaatagcagaaaaattgatatacataaaaatccgtttgtcctccggatagttttcgagtttcttcaatgcaaaatcaatttgtttttcagtactatcgggtgccgtgcatccaaaggtcggcagccaataacttttagtaaagtaaccgggaaacacacgccccagttcattacgcttgctgaagaagttcacccctcctatacaaatcgtttcataacctacattggcaaggctttgcacaaaagttgcttccgtaaacggataacttcccgcaggcggaatacgtcccgtaccagcttgcacagggaaaaacaaccacttacggctgcgtagcgaatgaggttccgccggagaaggcagaaatcctgcaaagatggcaaaatgagacgggtaagtaaaatttcccggcgcatgtcttttttcccattctcctccgtgactgttcagtaccggtgttcttcctgcctcttcttcctccttgctgacatcataacgcaaggtatcaaagcaaagcatcaatatatcatgagtacccaccacctgattcatatccagatccagattttgggtctgttcgccagccggcagttcatctatttgcatggttatatctcttttttatgttttttatctgttgaatataaatagaattatgagcaaacatatcctgatacacatgatctccctgtccgttgacttctattatataaggaatatctgtccctctctctatcagtacatccactccggcatattgcaaatccaaagattgaaccgcttcctgacactgaaaatagatttgttgccgcactacttccggcaaagacaattcgttccaccaatgtgccttattgttcagatgcagattggttatgcttcctttactgcatctcacaacgatataatcaatttcagattcccagcacactacccgaagatcataattctctccctgcaactgctctttaggaatccattcttctaaaatagcttctgtttgcatcacagcttccgccaacgggatcatctctttttccgtactcaaacggttgatacgtttagtgttatgaatgactccatccacttgttgcaaggtagtatagactacccacttattccggttgggttgatagcgaacagccataacgcctcccgcccccgaaccgtaacggggttttaaaaagcatcctctcccgcaaccggtaagaagctctctcaactcatcaaaagaacggggagaaggtaacatcggagtcactttcaaccctctgtccatcaacacttgtttagtttcctttttatcaagagcacgtaataaagcatggggagtattcaaaaagcacacgtcatcagataacctcatctcgcctaaacgttgcagtgtctccttatatgcctgattcaacagcgcatatttcaggaaattcgtttcatcgcttacacaaggttccagtttgataactgcctgccgtagttgcggcaagcagttaaaaagttccctgtaagtcataaaacgaacttccacctgcaagtgtttgcctgcttcaataaagtattctatacgtttggacagaaagttgctgacaacgattatctgcatctcctattctgtaatcatcgggtaataccacaattcaccatcatattcatctgcctcttcagtttcagcaatatctattttcatagggagactctgcaactgtttcttcatctccttgctcaaataattatagcgcatattgataaacttcaaatgagcgatcttatccatattatccagcaataattgggcaccttcatctttgagagtaccagccgaaacatccattgtttcaagttggggaagaatatccgactccaggaacatttctacaatcttgtcctgttcttcagagttgacgatccccagataagtcagcttcgggaaacgttctttggagaacaacggacggaatatctcaatatcagcttcaaatccataatcttccacaccaacatatagaatcagtttttccagattggggaaatcagaaccaagaatatcttctaccacttcggtaggcaggccaccactgataatttcgagtgaccgcaactccggccgtgaagtctttcccaaacgcagattattggttcctttgattttcagatctttcaatttaggcatggcatcgagcagcggactaatatcagcttgttcaatccatgaaatctcctgttcttcctgctcaatatctccccagaacaagccttctatttgtgcgaacttctccttattttcaatcattccctgtaataaggcagaacagtcgccaccctcataatcccaacaaccgattgttatttgtttatattcagagagatgtttatctttcaatatcttatccagaagattcacattgttttcatactcatcataactcaaagtatatttcttggcttccactttcatttcacgtgcagtttcttcagcagtttctacatacccttttttggtcttttccgcaatcagtttgctggctgctttttcagcttcttcagtcgttgcgtagtttttcacttgtgtttgtccgtcggtccccaacttaccataatttacagtaatatctgttccgactacctctatgctccagaatttctgcgatttaaaatcttgaaaaacgaatactctcttcataatacagtttttaatggttgatatttgcacactcaacacagaacgcgcatgaacaatacctgcaaaaataaccattttatgtaatgtacaaagaaatctgtttactaaactttcagagtattcaaaaatacaacccaagatatgcaacaaaggctgccttttggggcagccttcattattctatttctgtaatatatcagtttaatcttcaatagtacatatacttacacggttccaatccggttcagtaaacatatcgcctacaccctgaccttcagcagtgatacgagatgcactgattttatacttgttgaccaagatcgtttttacagcttctgcacgtgctgcggcaattctggcattcacttcaacactaccttccggagaagcgtatcccttaataaccactttagaatcagcatatttcttcaggtaagaagctacacgttccacattaggaagttgtgaagcgtcaactgacgatttaccttgtctgaaagtaatgatagattcgggtacacgggcggttttcactacagtctccaccggaaccacttttgtgcggcatgcttcaagttcttcctgcaatccgttgatacgttgatttgcattgctgatctcaccatctttgttgtttacatctgcacgaagtgcattgattgaagagttcagtccgtcaatttcggcttgattatatactctcactttggcaaaatgatgtgttccgttacttgtcttaaagtggtatgtcaatccggctgtcaactcaaaacctgcgttattagcattgaaacggctctttgtttcagggtaagtaccttgcatatcatatacgatggctggtttaagccccactgtccatgctttactttcacccaaattaaaattcaggttcaatccgaagcgggtagaccaagagttttcgtctccatcaccacttgcgtaatagtgcaaccaacccattccagctaccgcttccacctcaaagagacgaggagtaccgttataaccagcaaacagattcatcaagttcaccttacccaataaactgacatccgaagcatcaaaagctgttttactttgggtcgtgttaacatatcccataccctgaaaccctaatccgaaaataggagttaactgttttgatattccaattccgaacgcaggacgcattcctttaaaaaaagcattatgggtgagaggggttaccgcacccgcttttagttctacagaccagttgtctgttaattttgtaccttctacgacagattgggcatttgctgtaaatccacccaatacaaaagctaatagaataatagattttctcataatcataagtttaaaatattatgttttacctgctaaatcattagatatgcttggtttagccatgtctaattttttagttcataattaagttctttatttacttcaaacaacatattgtatcaaatattagttcacaaggcaaaagcctaattaacatctattgtctttttagaaagataaagacagacactcttccaatgaaaaagaacagtaataggggtaagttaatccgtaattcatatacaagtaaatcacaaattctgccgtatctttgcaatgtcataaagaaataagtaaaaagattatttataaaaactgtttggtatgtatttagaaaatatttattcgcctgaagatgtaaaaaaactatcgattgaagagcttaataaattaagcagtgaaatccgtgccgcacttctgcaaaagctaagtgaacatggcggacatttcggccccaacttcggaatggtagaaacgacaattgccctacactatgtattcaactcgcccaaagacaaaattgtatttgacgtatcgcaccagagttatgtacacaagatgttgaccggtcgtaaagacgctttcctcaatccggccaaatacgacaatgtatcagggtataccgaaccgcaagaaagtgagcacgatttctttatcatcggacatacctctacttccgtcagcctggccagcggactggcaaaaggacgtgaccttacaggcggtaatgaaaatatcatagctgtcataggcgacggttctttaagtggcggtgaagcattcgaagggttggactatgtggcagagctgggtaccaacatgattatcatcgtcaatgacaaccaaatgtctattgccgagaatcatggcggattatacaagaatctaaaagaattacgtgacagcaacggtcaatgtgagtgtaacttcttcaaagctatgggactggattatatgtatgtaaatgatggcaacaatgtacaggcattaatcgaagctttctctaaaataaaagatatccaacatccgatagtagtacacatcaatactctcaaaggtaaaggctatgcacgtgccgagcaagataaagagacttatcattggcgtactccattcaatccggagaccggagaagccaaagtaaacgatgaagaagaagattatagcgaagtaaccgcccaatacctgctgcaaaagatgaaagaagacccgcgtgtagtaacaattacttcgggcactcccgctgttctgggctttactccggaccgtcggcaagaagcaggcaaacaattcgtagatgtaggtattgctgaagaacacgcggtagcacttgcttcgggcattgcagccaacggtggaaagccggtttatggagtttacagtacatttatccaacgctcttacgaccaactttcacaagacctctgcatcaacaataatccagctgtcctgctcgtattctggggtacattatccggaatgaatgatgtgacacatctctgtttcttcgatattccggtcatcagcaatattcccaatatggtttatctggcaccgacttgcaaagaagaatatattgccatgttagcatggagcatccgtcaaaatgaacaccctgttgccatccgtgttccggctaccgaggttattagttgcggagagccggtggactccgattacagcattcttaatcgctataaagtcactcatcgcggttcgaaagtcgcaattgtagctttaggctcattctatggattaggacagtcggtcgcatcactcctaaaagaaaaagaaaatattgacgtgacactcatcaatccgcgttacatcaccggaatagacagcgagctcatgaatgagctgaaagccgaccatgaattagtaatcacgttagaagatggtgtcttggatggtggattcggcgaaaagattagccgctattatggcacttccgacatgaaagttctcaattacggagccaaaaaagaatttgtagaccgttatgatctacaggaatttcttcgtgccaatcacctgacggatgaacagattgtagaagatatcactgcacttatcagataaagcatactaccaattcactatatactcttataggttgatgtaattgtcataacagacagtatacatcaacctattcttatttttcaactattcaatcaaataaaaaacaaaacaattgtttggttttcatatttttcatttatctttggaacacaaaaacagattaattgtgattgcgactaacaactacacattattaaatctttatattttatgattatgaaaaaatttctatttatcctgactgtcattgccggacttttcgtgagcaatgccgaagcacgtatgaaaatcagaattccggtagacaacagtatcccgaaagttgccgctcttccggatagttcttattacaaaacagatgaaggcgctcatttggatttagggtacatcgaagaagacggaaaacgtactttagtactcttctcagaatcgaagcccgacacttattatgaaatttcagacgaatacgcagaagtcattaaaaaagacttgaatgtggaagaactgagcagccttatccccactcctacattttgggacaaatggggtggcagtattcttttctatggatttgccgctttagtagtcatcggcataataagctatctgaaagatttcattttcggccttttaggactaggaaagaaaaataaagaagagaatgaagaagaataaaccggaaccattaactatataaaagaataaggggtgtgtcataatgaattatggtacacccctcatctatagcgaatctatttctttttactatcaatctctttcaacaattcgtcaactgctgccttcaattgtatatcctcaccctttacaacagtttccggactattagccaccttaatatcaggctccaactgagaattttccagatagctaccgtcagccaaacgataaccgacaataggaataccgaatactaacgaaggatcctgcaaagtctcccaagaaacactggtcatcgttcccggtacaggcataccaacgagcttgccgatattccggtgtttatatacccaaggagtaccgtgcgcattcgagtaattcgcttcacattgcaacataatggaaggtttattccaacgacggctcggcatatcacaagcttcacgcccacgtactacctgcgtaaaatatttctgcccgctgaacaaaatttcaatatcttcatgcagtcggcctccaccgttgaaacgagtatcgatgacaatcccctcacagttgttatatttacccagaatatcagaatagacagtacggaaacttccgtcacccatagactgtatatgcacatatcccaatcttccgttcgaccatttttccacttccgcagcacgttgttttacccaacggttatacaacagtccgtttaaacgtccaccggaaataggcataaccacctcttcccaacgctctttactctgcggatcgtatagtgaaatcaatgttttcttgcctgctttgttgttcagcaaaacagtaatatcattttcctgagaaatttcctgtccattgattttctcaataatgcatccttcctttactttggtacgggaatgatcaaacggacctttctctatcacttcagcaattctcatgccttttccccgatattcccaatcgaacaaaagccccaaattagaagtaacatctcccttaccgttggcaaaataacggcctccggtatgggatacattcaactcgcccagccactcactcagcaattcggcaaaatcatagttattgtcgatatgaggaaggaacttacggtaagccgcactcatctcatcccaattcactccgtgcatattcaagttatagaagcgtttctgctgttgcttatatacatggtcaaacatagcttcccgttcggcagccaaatccatcttcatctccgcttgataactaatcggtttcaacgcatccgactttgcatccatcttctgcatattcctactgcccaacaagaatatatttccatctttatccatagataaggaaacccaaccggtattgagcttatgcagacgctttgtctccttttcacgaagattcattttccaaaggtcataaccaccttcaaaagcagaaaaatagtagaggttctctccgtctttcgagacaatggcgctacctaaatccgaagaattgggtgtcaagcggacaatgcggtcctcaatacctttcaactctactacaatctcttttttactttccttatctttgtcggacttaccgttgtctccatctttatctccatctttctttttatctttaccggcgtcctttttcttttcattctttttcttctcgtctttctctttcgccttcttctgttccttttcaaactctttgagtaattcgaaatcctccttgctcaaccgataacgatcgtatgcatcctggttcaggaataccaacataacatcctgttgtgaaccccacgaagcgtgggcacgcatcccgtagcgttccgtttggaaaagaacagcgttcccgtcaagtacccaacgcgaagaaccgctcatataaccgctatttgtcagattagtgattgctcctccttgcgcactgacaataccgatatcagaatacggatcatgacggtttcctataaattccaacgtaaaccatttgccgtccggcgaccattcataatcaaacccgccccctgtattgtaccatgtagatccatccgtcacctgacgtactttcttcgtctccagattgagtaccatcagacggttgcggtcttcgataaaggcaatctccttcccatccggagaatattgcggatatctgcgttccactgttttagaggggagtaacacctcttcctcaataagagttgcattgggaaaattaggatcttctttacgtgtaatctttgccatatacagttgccagttgcctgtccgttcgctggcatacaccaacgtcctattgtccggagcaaacgaaaggcccgattctccggcaggtgtattggttatctgcttagttgtcggataatcagttgacgtaacgaaaacatcgccacgaacgatgaacgctacctgcttgccatccggagaaacacaggcggaagtagctccctgtgagaatctgaatgatgcgatatccttgtcatcatcacggacaagttccactttcaccttttgcggacgggagttcggcagttgcgtataaagttccccatcgtatgcatagcacaaggttcccttatcactgacagagagaaaacgcaccgggtgagtacggaaagtcgttacaggcttcacttgctgcggagcattcaatgggaaagaatatacattgaatgaacctccattacgttcgctcagaaaatacacagacttcccgtcgggagcgtaaaccggattacggtcttccccgtcgcggttcgtcagattagtatgttctcctgtttgagtatcgtacagccagatatctcttgcgatggatgacgtatggtgttttctccattcgtcttcaaaccctttacggtcctgataaaggaaattactcccggccttgtcaaaacaaacccattcggcaggagtacccaagacttgttcggtattccccccctcgacaggcactctatacagttccgttatagcacttgtaggaaacaatgcactggttgccggatcttgaatggaagcggaaaaaagcacatacttcccatccggtgtaaaggtggagggaatttccgaagcagaatgataagtcagtctccgggcagcacctccatcggcagacataataaaaaggtcaaaattcccattgcggtcgctggcaaaagcaatctgctctccatcgggcgaccagaccggattggcttcataagaggcttgtgttgttaattggacggcagttcctccttgtgcggatactttgtagatatcgcctttatagcaaaagactatttcgcttccatcgggcgaaatacgcgcgtcgcgcatccataaaggagttacagcagcatagccgacggatactgcggccagcgcaaacgataaacaagtgataagtttcttcatatttaattagtctatatttatgtctaaaacagtccttctaaataactcttcctgtgtgattataaaatatcctgtcaccaaaatccttacagaaaaaagcgtacttgtctactcccgtacaatggcacactcctatctgacgaggcatataccgttggagataatctgaaatcacatgatatttttgctcttccgcattatggatatgaaaaccgcccaaaagcagctcacaagggagaccggaaaatgcgttccgtatcgttcgcaatatattagtgattcctcgatgggaacaggcactcagcacagagaaactttcatcgctgaccagcgccaccgccagttcatcctcaaaagtatcgggaatcttattgccgtcatcttgttgaacaaagaaccgttcaaaatgagtatcttccttatcttcgatttttatcgagggaaacaagacaactcccggaagcaattccgtccgttggtcaataaagcgaaaacgggataagtcgaacgtttcggtatgcttaattccattttcacgatcatccttaaatttaggtaagaaaatgctacgcttgcacacaactgttgcaatggtattcaattccagaaaatggcgcaaacctcccgtatggtcactatgcccatgagagagtatcagatagtctacttcccgcaagtcgatgtgaagcagacgggcattgctaatgaataaatccgatgcacctgtatcaaagagtaatttatgttctgccgtttcaatataaagagaaagcccatgctctgcctgtagcttgcgcccataaacgcaattctccaccagagtggttattttataattcataataatgtacttttagatagatattgcacatgaacaaaaagttctgccacaaaattataacaattccgtagcagaacaaacaatccagactattatctactaaaataattggttttcgtcaaatacgttttcccatttcgtaggcttccttcatatgtggagtatctttaatctcccctactttccaagcacctaccccatagacaacccctttttcctgcggtgcttccagacaatcgaggaacccacgaaaaccatcaatagtgcgttccatcatcgctttactattttcagctgccgcaatgataaaataaaattccttgttgcttatttccgtataccgtgcgcagcagcgatcgatcattatcttcatttgtccgcacatagtataaaaataaaccggtgttgccattacgatgacatcggcggcaatcatcttctccacaatctcagccgcatcgtctttctgcggacaaggttttccgtacatactgcaaacactgcaccccgtacaaggatttaccgtcttatctttcagaaaaatcttttccacttcattaccctcttcaagagcacctttcataaactcatcacaaagtacgtccgaatttccacctctgcgtggactggacgaaagtatcagaacttttttagccataactttactattttatattttccgaatccttttatcaatgattcactttgcaaaaatatggaaataaaagtatatcgaatgtagacaaattacagagaaagatacccgaattacagatatacatcagcagagtaaccgcaaaacaacgaagtctcatacttcccaaaatttccatcccttattagcacaaatgtacaccacatatgtccgtacattataattaggaaactttttcttagtgtcttcaccgtatcttttcacctgttccacgtgctcgggaagaggctcggaaagcgcaagcatcttttcagcttctttcatacgataatatttaaattcgaccacacgatcatccgtatagtaatctgtaccgggaataccggtcatttcaaagtctgatcggcctactgaattattctgttcgatggcaaaggtataacaactacttaaataacgcgataccagttcgtagaaagaacaccggataaagttttcattgatcttatcaaaaacttgtgctggaaattgtcccaaatattgttcgaaataattctgaacgagtggttctaagcttcgattggaatcatagtgccgatacacaggaacataacgttgtgcattgccttctattttgttcagttgattatagtagtccatgtatacactacgcatcgtcatattaggcaatgtggttacaaatttatccttcaacgtcgtcattcccaaataaaacaaactaatgggataaaactctttatcaaaaaactttttcttattaaacttactagcaagatcagccacattataaggcaattcatcgtcaattaccaatgcatccaacatcgttttcgcattatccagcgaaagagtcaaccgacgaatccaatgaatgtcagtacgtagattttcatctaccaattcgtccggaatactaccggcattggctgcaaatttcttgaagaagtaagtaaggatagtggcattgaataaccgatctccattcggacggaaacgataaccatcatagttactcactattagttgccatatttcgtcaaagcgatcctgtcctgtagaatacttatcaagcacataacgtagatatgtttcagtttcttcgtatgtaaacccaagcatattcaggaaattaggctcaagagtcaatatctctgcaatattatatccactagtcaaatcatccatagtgacaggcagcacacctgtacaaaaacaagtacggatactaccttcaccaataccttttttaattactttaaaaaaagtacgcagaaagctgtcattagtagtaacttcttcatagagtggatcattataggcagtaagtaattgattggtgaaattatcatattcatcaatcaaaatatagactttaggcaattcgtgagagcgggcgtaagtaagcacttcttccaacattttagatgcatcgccacgattgctaaattcaaaatcaccaaacaaatcacgattatgtgctaccattacttctaccggaccgcaattcaggtcattaaaattctgtgccagcccttgaatatggtctgacattaccattgcggagaagtcataacggattatcatataacggttatgttcttttgtcggatggtttccaatccacgtgtcaccaaacaattcttcaaaccgatgcgctttcgtacggtcataatagcaagctagagtagagactaacaaactcttcccaaagcgacggggacgcagaaatacaggagccttataatcttcaagcttagctatatattgggtcttatctacgtaatagaaaccacgttcacgcatttctatgaaatctgctactgcataaggaattgttatacttgccataatcctactgttttttctatagacaaacaaaggtacaaaattgttagcaataacaagaagaaatctttgaattgattgttattactcttgttgccaaacataaaacacggttcttccagctccacgtttacgaagaatccctttctcaatgaaagtattcaaatcatctattgctttcagtcgggaaagtccggtcaggctactatattccaatcgggtaataccaccatttttctttagaaattcctgtaaaagctgttggcgttgctccatagaaaattccactttttgagaagagtgtttggatttatccacacgttccaactctatttcacgcttaatcttccttttgaactctttgaaagtgcgcaaatgcacattatcaaaacagattgattcggcacgaatctcacgtttagtcattactttatgcgtacatttcaaagagatgctaaaatgcccgagttcgccaagttctacgatatatccctctgctaacgtttcggctagttcatccaatacaactcctactaccgcatctatcacgttatagttaaaagtctgggaagaacgagatacacgttccatgaattctttcttcgagtaagttccatttggaacgatacgggcgtgtagtggcttttgttcaccggtattagcaggatccggcgtttcatacaaatcatattgggcactcataagcatattttttattagttcatacatttattacttctactgcatagatttaatctctattcattaaactttaatcatcagtctatataaaattaatcgtctgacaactgtatctttttcgtatgacaactgtaagacgaaaagataacaattgtcagacgaaagtacaacaactgtcagacgattaattcatcgcatacaaagatataactttatgagatacaaccattaagttttaagcaaaaacatggttagtaatagagatattacttatctttgcttgaattaacagttgaggcttatggaaaataagcctttcatatctggtgctgcaacatcgggtgatttaaaagcaacaacaatgagaaaatcttcttcctctctaaatagactccgagaaaaatgcaaagattacttagtctctgtactcatattcattttacttctatgtctgctgatactcttcagatgcaaatctcgtaacggacgtataagagaacatcgagagaaaataaaaacagcgaaagttatgtcggaaatccgggctattgaatcgaataaacaccctgtatatacctttcagggaaaagataagacgctcgaacttcctatggaaattactgataaaggaaaacttgtatctgtcatagtgaacggtagtaaaacctgttttcaactatcagatgaagatagtgaattcactgtctctccgcaaggtgtattagcatggcatgaagcgggagtactgacaaccgaagaaataggcggagaagaaaccataaggcaactaaaggagaatacagtaaacgacagtctcactgtgcatctgtttaatattcgaatcggcaattgtgtactaccggaagttaatgtcagaatcactcagacacaagaatttccttatctcatggggataaaggcttggaatatgttattattgtctttggcgtcagacaaagagtagtaaattttgaagaacaaacaattaggaaatacacaaaaatgttatctttgcccgtgatttattcacaagaacgtgataaagtaaattctaactatttaataaaaaagactatgatcagattaaatgtttttgttcgtgtaaacgaatccaaccgcgaagaagcgataaaagcggcaaaagaactgactgcctgttctttaaaagaagaaggatgcattgcttatgatactttcgaaagcagcacgcgtcctgacgttttcatgatttgcgaaacttggcagaatgccgaagtattggcagcacacgaaaaatctccccatttcgctcaatatgtaggtatcattcagaaattggctgaaatgaaattggaaaaatttgaattctaaatgaattacgaggctgttctcgaacagcctcgtaaaattcactatttcactatctttccgagtagaattagtcgagtttcttatggataaatgttccttcaatccaataagttgcgtgattcgattcaaatttcaacaagacatagccgggatcagtggggccaccgggaaaatgatcgataaaccagtcctgccaaagttcctgcttcatcttttcgtcagttacaacttccactttccccgttaacgccacgctgtctcctttatcctgaaagcataatcctgctttcggattcgataagaaatcaattgtttttaatgaatctgctccggtagacatccagatagtggaaattccttctgccaggattttgctcatcggcacaggacggggataaccttctttattcacagaagcaagggtaactacttcacatctctgcaacaattctgttgctttctctttcattgtttttgtggtcataaattgattgttttttattaaccttgcaaaggtaacggcatatcttcccattctattgtaaaaaagcgacttttacctaatctatctttgtggttcgatataagtaagtgtggtttcttccggaacggttagggaaagaaaagacgcaggagtattgccggacatcgacttaatctcttttgaaaaatgcgctaaatcatagtatcctgcatcaactgccgtagtcaacaaattggctgatgttgtggttctcaataattccacagcattcttaaatttgacaatacggctgtattctttaggagtaaatccggtataatgcttgaattttctctcaaaatgacgctgacacaaacagacgtcatccatcaagctgcgaacagaacgttttcctttggaatgattaatcatgttcactgccatagcgacatgagaatcggcaggctgataatgacgcgccaaatatgccagcaaatattcttccactactcgtattcgatctgtgacatgcttctgctcacctaatttttcaataaaagtgtcatcaaaaacagccttcatttcattagtactgactctgctattcacaaattcgtgtagaggcaggtttgtaaagcaagacaaaccacaaggtaaaaaacgaacgccaaacatgtgaatcgattctgtataagtgacgagttccgaatattttgtcataggtcctacaaaataggaacgatagggttgcatcatcagacttccttcttcaacagcattagccacctctcccagcgtaaatataaaatcggtacaaccatccggcagaatatggatgcgcataccataatccggattacccttaaactcccaatagttatcaatatagggaacaagtaaatgagaaggctgatattctgtatacatggatatattttgcaaacaaatatagagagaataaattctaattcatacatttgtatctcaaaataaaaaaataaatgaggaattttgctgctatcgactttgaaacagccaacggcaaacgtactagcgtatgcagtgttggtgttgtcattgtaaaggaaggaaagattataaacaaaatctatcgtttgattcgtcctgcccccaactactatacccaatggacgacagctgtccacggactcacgtacgatgacacgatagaagcggatgattttccagaagtatgggcggaaatcaaaccgctgatagacggtttgccactggtagctcacaacagcccttttgatgagggttgccttcgtgcggttcatgaactgtatggaatgacttatcctccatataaattctattgcacctgccgcgcctcaagaaaagtgtttggaaaagaactcccgaatcatcaattacacacagtagccgcccggtgcggatatgacctgaccaaccatcaccacgcattggcagatgctgaagcttgcgcacaaatagctttgcttatcattcccgaaccgaaaaaaaacaaaatcgagtaggaggaaaacgagagacctacccgatgactggtaagtctctttctttttttgaatgggcaaatttttgttatacgcctacttgaagagtaaattcaaatctattgataggaactcttcaaaggataagcctccggaaccgaccacaaaggccctatacggatgataagctttttcaaatttaggcaagccattgttggtggttcgtcttccgcttttaacctcgatggcgattgtcttgcctcttctatgaagcacaaagtcaacttcatcgtggctatcacgccaataataagccttgtaatcacaaatctgtgcctgacttacaatataggcaccaactgctgattctacataatgcccccaagctttaggatcttcagccatttccgtgaagtccttatcagcatacacgttgcgcaaagcgttgttatggacttgaaatttaggaattgagttgtatttgcgagcatcgtcttcggcatatttctgtaaaccacacagcaaaccacattcatcccaaaaatggaggtaactagccagcgtggtgacattgcctacatcttgaagctgagcggccactttggtaagagacagtagctcgccactataactactaccgagttcaaacagttggcggagtagttgtggcttcatgatttttgtatccatcagcacatccttcgagatggatggttcaaccaaagagtctttgacgtagtttcgccaacgacgctcatcggtgatataagatgctgcgcccggatacccaccaaaatagacatattggtagagattccaaccgaagcattctctcatttcagggaaagtccaatgtgtcagccgaattagctcatatctgccggccaatgattcggtgagtcccttttcgattaacatgcgtgatgaccccaataatacgactatgggttcacgtttttcacgggtatctctgtcccattcagcctttacagtctcgctccagttatttatcttttgtatttcgtctaccaccaataggcgtttcccttccccacgtatgtccatacgcatacgacctgtctgccatacacctgccagccagtctgcagatgcacctacgacatcatcagccgaataactgtcataaggcatattgcagacttcaaggacttgaccaatcaatgtggacttacccacttggcgtggcccaacaataacctgcattttccgcgaggttcattaatgcgtgccatcacttctgaatattgttctcttttatatcccatcatctataaaatgtttattcacttgagcaaaaatgttcaatccattaaataaaaatgttcaatcccttacaaaggtaaggcttttctctaataatgaatatttttacacgaacaatccatcctgctcccaattacaatacacaatggacaacggctattcacggattaacttaatgatgatacgatagaagcggaagaaggcaaataaaaaacactacaactattatttcaatcaataatagccgtagtgtttgataataaagtgctaactatgtacttcgattagaggatagacttggcgatacccatttccaagccgcgaagttccgccaagccgcgaaggcggcctaagcatgaatatccaggatttgttttctttttcaagtcatcaatcatctgatgtccgtggtcgggacgcatggcgatagagcatttacgacgctgttgcaaaagaataaaagccttcattacgttgtacatatctacatttccttccaagtggttggcttcgtagaagttgccttcctcatcacgctgcgtactgcgcaaatgcacaaagttcacacggtcgccaaaacgttccatcatacctgcaaggtcattatcggcacgcacaccgaaagagcctgtacacaaacaaagaccgttggactcattaggtacggcttcaatcagttttctgaaatcttcttctgtactcagaatacgcggcaatcctaaaattgtataaggaggatcatccgggtgaatcaccagcttcactcccacttcatcggcaacaggggcaatttctttcaagaagaaaatcaagttggaacgaagtttttctgcatcaatatcattataacggtccaaagcttcctggaactgttccactgtgaaactttcttccgaaccgggcagtccggcaatcatattgcgaaccagcagtttcttatcatcctcgctcatttgctcgaaacgggctttagccttagctatttcttccggagtgtagtctttttccgcattcggacgtttcaagatgaaaagatcgaaagctatgaaagccgccttttcaaaacggagtgctttagagccgtccggcattgtataggcaaggtccgtacgtgtccagtccaatacaggcataaagttataagtaactaccattactccacattttgccagattacggatactttccttataattctcaatatacttcatgaaatcgccggtctgcgtcttgatatgttcgtgtacgggtacactctctacaacagaccatgtaagtcctacttcttcaatcatctgcttgcgcttcatgatttcttctacagtccatacttcgccattcggaatatgatgaagggcatttactataccggtagcgcctgcttgcttaatatcccataagctcaccggatcattaggaccgtaccagcgccaagtttgttcacataaatacatattgctaaataaaaaattaaaagttaaaattagattgagaatgcgtcaaatccaccatcgataacagctactgtacctgttacgaagttagaggcatcactaatcagataatgaatggttccgtaaaggtcttccggttcaccgaaacgattgaacggagtatgcgcaagaatagtcttagaacggtcagtcagtgaaccatccggattcgtcaacaatgttctgttctgttctgtcaggaaaaatccgggagcgatagcgtttacacgcagaccattaccgaatttcaaagccagttcaccagccatatatttggtaaagttagcgatcgctgctttcgctgcaccgtaacctacgacacgggtcaacggacgaagagccgattcagaacagaagtttacgatagaaccctttttctgttcaaccatgacttcagcaaataccattgtaggcaatactgtaccgaacagattcaaatccacaactttcttgaatgcgtcaatctgcaagtcaaagaatgtcttgtccggtgcgattgtagcacctgccatattaccaccggcagcattcaacaaaacatcaatgcgtccatacgctttcattatttccactttgttgccttccagaacttctttgtccattacatccgtataaaggaacttagcttcgtttccttctgccttgatactttctaccaatgcttttccagcttcttcacttctgtcgagtaccactacttttgcaccttcttttgcaagatatgcagcaatacctttacctaagattccggctccaccggtaattacaactactttgccttttacgttaaataattcattcatagttctaaaaatttatatgtttatagtttattgttcagataatacttcagattttctctcaagagaatatcaatcggcattaagttcaccttttccgatttttgcttgaataacaaataattgcatagcgacttgattccttcatacccctgtctttcaggacgctgcgcaatcagtgcagtaataacaccttcggagagtaattgggtatttctctcgatgaggtcgtaacctaccagttttaccgcttgcatccctctcgtcttcaagtaatttcccaaaatgtagcaggtggagttgaatataatagccccttttataccaggatttaactcgaatatttcattgagcttggcaaaattatataccgaatcactgattttcaattccacttcatgcaactttccggagaatccgacctccttcagataataacaaaatccatctctacggttcttaccctgattggaatcgttcttaccactatgaacaatccgtgccatcaaaatatctgaggtgggcgaaagccgatccgtcagcaatcgggctgcaatgactcccgcatcgtatgattccgtaccgaaataagccaattgatgttgcccttcaatattagaatcgacataaacataaggaatctcgtttctgtccaactcctgcgaaagacgaatcacagaatctgtaaacaatgtggctattaacaccccatccaccttctcatccaataaattacgggtgatatcatcaaaagtcttgttgttatattggttgaaaaaaagcttggtaatagttatattatatgtttccatttccgcagctgctttgtcaataccttccgaaatagcttcccagtattctccttgagtaaaagacggaataatggcaacaaaatgatactgttttttagaggctaatgaccgcgccataagattgggctggtagtgaaccatctctaaaatagcctgtactttctttctgttttcctcagatacccgtccacgattatgaataacccggtctaccgtaccgacagagacaccagccattttagcgatgtctacaatacgaatatttgagaattctttatccatataataagaagtatcttgtttttcgctgacaaaagtaaaatgaattattgaatcatgcaatagtgtgtgcgcacacaccgctacaaaacaaagaagatataccgctaatattcaaatatttaacaagaaacaaagaaatacattcatgttgttaaacataagaaatacaacagaataattaataaaaagtatattccaaaggaaagagaagtataaaaaagagggagttttaccctcagaaaagactgagaagaaagatgaaacgtgtaaagtgtgcacggacacacaactaatattcaatttatacagacagcagttgaccatcataagagactggtaatcaacttaaatgaagccgattaccaatcctaattttcttatttttcccatttatcctttaccttaccagctaccttatcagcttcctccgctactttattggcgatgtcagctccggtttccacagctttaactcctaaattcattgcttttttttcagcacaagctgctgccgcttccgcatcacgacctatacgatgaatcgcatcataaatgtcattctccaattgttttgcttttgcggtacgtgagaggcgataagctaccgcacctagaattgacccgattccgagtccaatccaaaaattaccatgtctacattccataattaagttcattttttagattaataaattatataaaatactactactcatcgagatttcgagaacaacgaagcaatccataacaccaggacagcacctactgtggaagtaatcagacttccaatcaatccggaagctgcaaggccgaaaagtgcaaacacccaaccgcctaacacacctccaagaataccaagcaatagatttatgataagaccaaaacctccgccacgcattattttaccagcaagaaatccagccacaataccaataatgatataccaaataaagcccatataatcctcctttttaaggtaacaacagtaagtgcaaagaatagttcagccaatgaaaaatgaattaaccacaatttacaatccttagtcttaaaactcatatttctctttactttgcaaaagtttatgtacctttgcggtcaatttttcaggaacatttcaatagataataggtattatggtacaaaatcaagaacaacccgtagggaaaattacgttctccattttaatagcattaagcctctcacattgtctcaatgaccttttacaatctgttgtttcagcagcttatccgctatttaaagatgatttaggactgagttttgcacaaatcggttttatcacattggtctatcagctttcagcttcggtattccagccaattaccggaatcattttcgataaatatcccgttgcatggtcgttgcctatcggaatgagtttcacaatggtaggtttagtgaacttagcattttccaacaatctctattggatactattatctgtgttcttaatcggaatcggctcttcggtacttcatccggaagcttcccgtatcaccttccttgcttccggcggaaaacgcggactcgcccaatcactgttccaggtaggcggtaatttcggaggctcattagggccgttattggtagctttgctggttgcaccttatggacgacaacatcttttcatatttgcatttgtggccgtcgcagctatcgtggtcatgtatccgatctgcaaatggtataaatcttatctgaaccggatgaaggcacaaaccgtcagcgtaagaaaaccggttcttcttcccctacctatggataaaactgctatttctatcggtatcttattaatactgatcttctcgaaatacatctatatggcaagtctgaccagttattatacgttttatctgattcacaaattcaatgttacagtacaggaatcacaattgtatctattcatttttttagttgctactgccatcggaacgctaatcggaggtcccgtcggtgaccgtatcggtcgtaagtatgttatttgggcttctattctgggagccgccccattcagtttactcatgccgcacgccaatctgatgtggactgttattcttagtttctgcgtgggattaatgctttcttccgcttttccggctatattactttacgcacaggaattgcttccgaccaagctcggactgatatcaggtctgttctttggatttgctttcggagtggccggtgtagcctctgccgtgctcggtaatttagcagataaaacaagcattgaatacgtatataatatttgtgcttatatgccgctattgggattagtaaccttctttctacccaatttgaagaaaaagaaaattgattggcaaccatagtgtttctttaaaattgtaacaagccaaataaaatgcccctcagaagttataatccgaacttttgaggggcactttattctataagatgtgaatctttatagccgatatttaacggcttaagctaccaatacagactcggcggacagaagtcaaacctagttccgaatactgtgctttatatatttccgtcacatcttccaccaaccagcatggcataggtcccaatgaacgggtatccggttccggcctttcgggagcagttaagtaaaactcatgtgtcctatcttcatagtttactaaaaatgcagaatatgattcttcacctatctgcttaattactttttcaaaaggagcagttattattttagcaccagctgtattttccgcaagcaatgtcatttcaccgctatctttagtgttatacacaaacctcacatatccggtagcttttaaaaaaccatcggcaatgacttgagcctctaattcttctaatgtctctttgtttgcctcattaacattttcatcttcaatcttcacgtatacggcattactcataaatctttgtacagattccaccactttaactccaatcttaacggtcaacccgtccgcatctttcactataagactagtcgttcccagttttacgggagatattcttaccctatcttcatcgaccttcaccgtagctatttgttcatcttctatttcagctgtataaggagcttttcctcctgtaattccgacactaccgccacctactatgtttatggcagtactactaatagcttgatcgggaaaaacgacttcatctatctgataaaggaagaaacgttcattatcatcattacaagatacgattcccaaaccagagattagaaccatcaatattgtaattacgtgtttcgttttcatgcgtactgagtttatttaatatgtatattttatttttaagagatatctgtttacaaaggtacaaatattccgcacatagtatcccgataagacattttttttcagaataatacaaaaatgaccggtatgcatcatcgcgacgtataccggtctacaagttaaggttaaagtcaaaaaattaagagagctatttataagttaggattagcatttatttctttttgtggaatggcatacaggtaataagtactatttgctgtaaatggcgtagtgtccgggaaacggaggaaccaatgtcccaatggattccgtttggcgaatccacctccttcttgccaacagtctacttctgttttctgcatttcttctgataaagcagtacgttctacagctttctgagtgcggagtatgtccgtaatcccaaagccttctccccaaagttctcgacgacgttccagcaagatttcattaatcacatcttcccgtgattttcccgccacatcataatccactactccgcgagcattgcgcaacgtattcaaaggaatcacagcctgagataattccataccgtcgcggacattcgcttcggcttctatcagatacatctcagcagcacgcatcaacgccaaatcagctgtatcgtccgcacgcatatggaactttttatatcccaaatatccttcgcgcatccactgaaacaaaggcaaacggatgtcaccttcaacaaaagtatctttcaaatgagggtcggccatgaaactgctgtaagctccgacgtatgtcgcatccaaatagtaaaaattataactcgcatccgattgagaagggatttgaggaaatccccatatccactcttgattggagatattattgaatccctcatattcggcagtagtcgtcatcaatgaatagtccttacgagcagatgcggcagcctttgcagcttcctcccactgcccggtcagcaaataggcacgggccaaaagtccgtttaccacagccagatccggtttgaacttctggttatcaccactccgaacgtaattcttcaaataatcctgcgccaaagccaaatcctcgaaaatacgttggtaaacttgagctaccgttgatttccctttcggaacggtagtgttattgctcggctcagtataaataggtacgcaaggcgcatctttatctttcaaatacgtgaactgataatgttgcaccaagtgcagatagcaaaaggcacgcaggaccaacgcttgcccttgagccttccggaattcttccgaatcccctttaatggaaagagccgtgttgcagttatctatcgttttatacatcagataccaggcaaattccgttctgctgtttgaagatatagcaatgtcatcgaactgatacgaagaattgaaaccgtatttcggacgggaaacgacatcacttgccatcatgtcatccagacactgaagcgcacgataaccgatattggcataagtactcgaatagtcaaacagattataccaggcaccgttcacaagcgcctccgcattttcgggcacaggtactttctcggaactcaccgcatctgtgggatctgtatccaggaaactgctactgcaacccgttgccagaagaagtccggcaatggctgccagaatagattgtatttttatttttctcataatttagtctgatttagaaagcaatgttaatacctccggaaatagtccgcatagccggataacgataataggtaattccggtaattccctgttcggggtccaatccttgattcttgtgaatggtaaataaattatctccttgcacatacacctgcacactgctcaatgccagcttactgacccacggtttgggcaggttgtaagagagcgtcaggtttttcagccgcatataagaattattctgcaagaaccgagtagacgccgagttccagttattggaagtcgtacttagagcaggcacgtctgtgtagcggttgtccggtgtccaacgtcttaggatttcagtcgaccaggcacgtccttccaggctaccgttatgtagaatcatcgttatatcacgattgtagatataccctccgatactataagcaaaaatagcagacaagtcgaaccctttccaggaaagcgacgtattgaacccaccatacactttaggaagcgaggatttattgacataataataatcggccgaagcataatcactcgttgtcacacgtttgcccgtcggattatcatcagcgtccagttcatctgcataccacaacggctttccattgtccggatctacgcccgcccactctttcatatagaaatcatataccgagcgacctacctgaagtttgtttactccactctgcggcatatctttcaatggaagttccgttaccttattcttatagtgagtcaggttcatacccagcttccaaacccagccgttctgattgataaccgttccgttaagcaccaattcgatacccgtattcttcaaagctcccacattctcgtcaataaaaccatatcccagagagggagcaatcggacgggaataaagcaaatcttttgaacggcgtgtaaagaaatcgaacgaaccggagaaacggttattgaacagtgagaaatccattcccaaattaaagttcagattcgtttcccatttcagattaggagttgccatacggtcggataccaacgcattctctcccaaattggaaacgatggaataaagtcccttacttgcgtaatacgtacccaagttatcatttccctgcgcaccgtagctcattttcaaagtcagtgcggaaagccagtcggaagtacttgccataaactcttcccggtctacacgccaggaagtacccaacgaccagaaattaccccaacgggtttccggtgcaaagcgtgaagaaccatcacggcggtaagaagccgagaagaagtatttgttccgataatcatataacaattgcgtgagataccccaccaatgcataatcaatgcgatatcccgatcctcctgtcaactgagagccgactaccagttccggcatatcaggttgtgccatctttgaacgtgacgcagtcagttcatcgtaacgatacgaatacgcctcaataccggcaagaacattgaaatgatgttccccaatcgtcttgtcatacgtagcaatattattccacgtccaagagaaagtacgggtattcatccgactgacacttcccccgttctccttagccggaccgatcttgggattcgtataatccaaagtattatagtttatcaaatcgaaattgaaacttgtcttaaacttcaatccctcgataatcgtagcttccagaaaggtacggccggaaatttcatctttcatacgttccgacttatccaaaggcaacgtagcgggcaagttccagtttgccatcgaaccggaaggacggtaagagccgaaatcatagatacggtctccgttctcatccaatttataactgccgtcggtattcatctcataaatcggataaaaacccggcatggtacgtccggcagttatcacgttactgactttagagtcggaagaaaccggataattctgcatggaatgggcaaaactcagattgacaccccctttcaaccaggaagtcatttcactggtaacgttggagcggatattgaaacgctgatagccggattcaagcgcaattcctttatcattcagataaccggcagagaagaaatactgattggctttaccaccaccggaaacactcaggttcagttccgtacggagtgcctgttgctccatagcatcgctccaatcggaatcccacaacggacgtgcaccctccaccaatttgccatccgtgcccaccggttgcgcatattgcggaccataaggattgggaccgcctcccatcaatttggtaaccaaatctttggaggcctgcgctgcagcggtcgccggagtataatccggacttccggcataccggttacggagtgcttcccaatacaattcaaaatattgattggtactgacacgatcataatcacgaacggctcgattggaacctcctaacgaagccttcactttcaccgttgctttcgagttctgttctccttgcttggtagtgatgataatcactccattagcaccacgtgaaccatacagagcagccgaagccgcatctttcaacacagtcatcgaagcgatatcgtctgggttgatagcattgacgctaccgtcaaatggcacaccgtccaccacataaagcggagcactggaggcattgatagagccgataccacgaatacggatttccgcatccgttcccggctgaccgcttgccgcacttgcctgcacaccggacaccgtaccttccaatacacgggatacactggaagtctgcaacttctcaatttcccctgctttcatggtcgaagcagctccggtaaagctatatttctttgcagtagcgtaagcgactaccataacctcatccaactccttactttccgcttccagcgtaatattaatcacactccggttgttgaccggttgttccaccgtgcgcattcctacaaaacggaacaccaaagttccggagccgggagcctcaatagaatagtttccatcaatatcggtaatagttccggaggaagctcctttcaattgtacagagacaccggggagaggttccccctcagagatgaccgtacccgtcacgcgtttttcctgttgcgcttccgcatacaatatgtttcctgcaaaaagcaaaagaaacactgctaataaacgtaaatagattctcataattttctgtgactttaaatatatttgcgagttatactaacagtacatagaagtttattgtttaggaaacaaaacattttttagaagattactagcataaatcaatgaaaggtcgtacattcgtgaaacaaaagacattcccaacagttataaggaaccgtatggtaagacagcttgttttatatatctctttgttagtgtcgttctccttgcaggcacagtctgaaaaggcgggtataaccgtaaacgacagcatacaggaagattctgtcaccacccccaagccaagtgccttcaagagagcgattaaaaaatttatgaatttcagtgacttcgacacgctctacatcagccccaaccgctataactacgcgttgatggctacgcatttcagcaactttgagtattactcggtcaccagcgaatttcctcaaccgcagaagcttagcttttctcccaatccccacaacaagataggattgtatttcggttggagatggatcttcttaggatggtctgtcgacattgatgatatttaccgcaaaacaaaccggaaaaacaaagggacagagtttgatttgagcctgtatagttccaaattaggcgtggacatcttctaccgccgcacgggaaacaattataaaattcacaagatcagaggtttctatgatgaaataccttccgactactccgaagatttcagcggcttgaaggtagacatcaaaggactgaacttatactatatattcaacaaccggaagttttcttatccggccgcgttcagccagtccaccaaccaacggcgcaatgcaggaacattcatagccgggttctccatctcaaaacataatctcgactttgactaccagcaacttccggcatatattcaagagagaatgaatcccggcatgaaagtcaacaagataaaatacaccaacgccaacatcagtttcggctatgcttataactgggtattcgcacgcaactgtctggcttgtctgtcgctcactcccgccattgcttacaaggcctccgatgtggatgcagaaacgcaggaagggaaagcatggtatagtaagttcaatctggattttctgcttcgggcaggcgttgtctataacaatggaaaatattttgtcggcacttcattcgtcggaaagaactataattatcatcgcaacaatttctccttggacaatgggttcggcactcttcaggtatatgtcggcttcaacttccacctgcgcaaagaatacaggaaaaaggaaacaaagcgggagtattagaaataggcaacttgcttgcttatccaaagaatctttgtacatttgccccgttttaaaagaacaaaaatagaaaatcagtgaagcaacaacgtcacatacagcccacacgtgcccttctttcccgtttccgctattggggaagaaagaactatgccgcttttgcgagcttaggacgcgaagtatgtatcgggcatctgcataccaatgtagtcgatgttgcccttcgtaagcagaatgctgcacaaactatcccttatcatacatttatgacacttcaagaaattaaagaccaagtgctggcaggcattgatatatcgcccgagcaagccgcttggctggccaatatggccgacagcgaggcgctttacgccgccgcacatgagattaccgtcgcgcgtgcttcgcacgagttcgacctgtgctccatcatcaacgccaaatccggcagatgccccgaaaactgtaaatggtgcgcacaatcctcccactacaagacgcaagccgaagtctatgacctcctccccgctgaagaatgtctccgacaggcacagtataatgaagcccaggacatcaaccgtttctccctcgtcaccagcggacggaaaccctctcccaaacagattacccaactttgcgacacagtccgccatatacggcgacattcgtctatccaactttgcgcctcattgggactacttaatgaagaagaactgcgttccctgcacgaagcgggaattacccgttatcattgcaatctggaaactgctccttcttattttccccaactttgttccacccacacacaaaagcagaaacttgccacacttgccgccgcctgccgtgtaggaatggatatctgctgcggaggtatcatcggcatgggagaaacgatggaacaacggattgaattcgcttttattctgaaggaactgaatgttcaatccatccccataaatctgctaagcccgattcccggaacaccattggaaaacgaaaagcctttgaacgaagaagaaattctccggacaatcgtcctgttccgtttcatcaatccgacggcttttctccgttttgccggcggacgctcgcaactctctcccgaagctatgcacaaggcactgtatatcggtatcaactcggctatcgtaggcgacttgcttaccacactcggttctaaagtatcggaggacaagaagatgattcaagaagaaggttatcattttgccagctcccaatttgaccgtgaacatctttggcatccatatacttccacaaccgatccgctccctgtttacaaagtaaaacgggcggacggcgcaaccatcactctcgaagacggacgggtgttgattgaaggaatgtcttcatggtggtgcgccgtacacgggtacaaccatcccgtgctgaaccaagcggcaaaggaacaattagacaagatgtcccatgtaatgttcggtggtctgacacacaaccccgccatcgaactgggaaaattgctattacctttagttccttcctccatgcaaaaaatattctatgcagattccggctcggtagccgtagaagtggccttaaaaatggccgtacaatattggtatgcggcaggacagcccgaaaagaataatttcgtgaccatccgttccggttatcacggtgatacgtggaatgccatgtctgtatgtgatccggtgacgggtatgcacagtctttttggttcggcattgcctgtacgttattttgtcccgtcccccgcttcccgttttgatggagaatggaatccggaagatatcatccctttacgggaaaccattgaaaaacattccagagagttggcggcactgattcttgaaccaattgtgcaaggggcaggcggtatgtggttctaccatccgcaatacttgcatgaagcggaaaaactctgccggaagcatggccttcttctgattttcgatgagatagcgacaggattcggacggaccgggaaactttttgcttgggaacacgccggagtagagcccgatattatgtgtatcggtaaagcgttgaccggcggatatatgacactttccgcagtcttggcaagcaatcaggtggcagacaccatttccaatcatgcaccgggagctttcatgcacggccccactttcatgggcaatccgcttgcctgtgcggtggcttgcgcgtccgttcgcctgctgctcgaatccggctggcagaagaatgtgcaacgaatcgaaagccaactcaaagaagagctggctcctgcacgggagttcccgcaagtagccgatgtacgggtattgggcgctatcggagtaattgagatgaagcgtccggtgaatatggcatacctgcaacagcgatttgtagaagagggtatttgggtacgtccattcggtaaattggtttatctgatgccacctttcatcattactcccgaacaactaagtaaactgacctccggattactcaacgttattcaaaattagtagttacccaaaatcataaataatgatattagactctatcaaccaagaactgcttgttctcaaagaaaagaaaaactaccgttctctcccgccattgattcacgatggacgggaggttattctgaatggacaacggatgttgaatctttcctccaatgattatctcggactggctaatgatgtatcattaagagaggaattcttaaagacaatgactcccgaaacatttctgcctacttcctcttcttcccgattgctgacaggtaacttttccgattatcaagcattggaacaacagttggcaactatgttcggagcagaaagcgcactcatattcaacagtggttatcatgccaatacagggattctccctgccgtcagcaatgcgcaaacactgattcttgccgataagctggtgcacgccagcctgatagacggaatcagattgtcgtccgccaaatgtatccgttatcgccacaatgacgcctcccaactgcaacgtttggtttccgagaatcacaatctttatgcacaaatcatcattgttaccgaaagtattttcagtatggatggagataaagccgatctttgcgctctcgtccgattgaaaaagagctattccaatgttcttctttatgtagacgaagctcatgccttcggtgtacggggagaaaaaggactaggatgtgccgaagaacaagactgtatcaacgatatagatttcctggtaggcacgttcggaaaggcaatcgcctcagcaggagcttacattgtctgccgccaggttattcgggaatacctgattaacaagatgcgtacctttatattcaccactgcccttccacctgtcaacattcaatggtcagcatgggtattgcaacatctctccgctcttcaatataagcgaacccacctcctgcgcatcagtgagaaactaaagacagcacttaccggcaaaggataccattgcccttcagtaagccacattgtccccatgattataggagcgagcgaagatgccatactgcaagcggaagaactccaacgtaaaggattctacgcattgcctgtccgtccacctaccgtacctgaaggaacttcccgtatccgcttctcattgacagcggacatcacagaacatgaaatcgaccaacttatagctttgattaacggatgaaacaacattttatcataaagaataattccaagcgcctcttgcttttcttcgcaggctggggaatggatgaaactcctttcctgcaaatccgccctacagatacggattggatggtttgttatgactatcgttctttggagttcgataccgacttattacaagagtattccgaaatccgtctcatcgcatggtctatgggggtatgggtagcttctcaactcatgaaacaatacccgtctctgcccatctcgcatagtatcgctatcaatggaactccctatcccatacacgaaacgaaagggattgaaccagctatatttgaaggaacactgcaaggattgaccgaacaaacactgcaaaagtttcaaagaaggatgtgcggttcggcagccgaatacaaagtatttcaaacagtagctccgcaacgtccggccgatgagctcaaggaagaactagccgccatacaacaacaatacttgtcattaccgccttctgacttcgtatggcaaaaagccatcataggaaagaatgactgtatattcctacctgacaatcaacggcttgcatggaaaaacaaggtagatattcttgaatactcagaagctgcccattaccaacaggaactctttgagagcgtaattctacaaaccaaataaataccgattatgaacaaacaactaatcgcagaacgtttcaccaaagccatcgccacttatccgcaagaagcaaacgtacaaagacaaatagcggacaaaatgattcacctgcttacggaacatctaccttctccctgcccgaaagtgattgagttcggttgcggcacgggaatctattcccgtatgttgtttcagactcttcatccggaaatgctcttattgaacgacctctgcccggagatgaaatattgctgcgaagatttgctaaagaaagagcaagtgtctttcctgccgggagatgcggaaacagcgccctttcctgccgaaagtaccctgattacttcctgttccgccttgcaatggttcgaatctcccgaaaactttttcaagagatgtaacgcgttgctcaacaaacaaggctatttcgctttcagcacctttggcaaaaagaatatgaaagagatacgccgactaacaggcaacggtcttccctaccgctcacgagaagaactcgtaaccgccttgtcggccgactttgacatcctccattcggaagaagaactcattcctctttcgttcgacaatcccataaaagttctttatcacttgaagcaaacgggagtaaccggaatatcttccggacaactacggacccgtcgtgatttacagcgattcagcgagcgttatacccaagaattcacacggggcacttccgtgtctctgacctatcaccctatttatatcatcgcaaaaaagaaagaagcatgaaacagaatgtatttttcgtttccggtatcgacaccgatgccggaaagagttatgccaccggctttctagcccgtgaatggaacaagaacggacaacgtaccatcacccagaaatttattcaaacgggaaatgtaggtcattccgaagacatcgacctgcatcgtcgcattatgggaatctccttcaccaaagaagatgaagaaggactgactatgccggaaattttctcttatcccgcttccccccacctcgcctcgcagttggataaccgccctatcgacttcaataaaatcaaacgggcaacgaagaaactgagcgaacgatacgactatgttttacttgaaggagcaggcggcctcatggtcccgctaaccaccggactgctgacaatagactacattgcccaagagaaatatccgcttatctttgtcacttccggcaaactggggagtatcaatcacaccttgcttagccttgaagccatacaaaaaagggggattgtgctggataccgttctctataatatgtatcctacggtagaagacaagacgattcagaacgacacgatgaacttcgtccggacatggttggagaaacacttcccggagacaaagttcatattggttcctgaaatagagttctaaactgtcagactgcaaactaactgtatatgtacggaagttcaatcaacttccgtacacggtattatgaaatagggatattcctaaaataataaaatttaaggcaactacttcattgcgaattagttgccttttttgtatctttaagcattccccccaaaaaacggtttgacggccaaaacgggggtaatctaaaataaaaacacatggtaaagatacaaaaaatctcagaaatcgaaccttgtttaggttttaccgagttcgatatgcttaaaaaatatcgtcaaagttttgcaacgagtgaattaggtcgactccattctctattccctttctcggaactggcccgacaaatgcatttgaagtcctctgctttgggtcgtaaaagttatttttctcccgaaggtaaaatagccttgatggtcttgaagtcctataccaacttttccgatgcacaactgattgagcatttaaacggtaatattcattaccagttgttttgtggtgtccagattgatccgcttcatccactaaccaatcctaaaatcgttagtgcaattcgtcaggaactagcgaatcgccttgatgttgagtccctccagttcattcttgccgagcattggaaaccttatcttgagaaccttcatgtctgtatgaccgatgccacctgttatgaaagtcacctgcgttttcctactgatgccaaactcttatgggaaggtattgtatggcttcatcgtcatctgtgcaaacattgccgtacattgcacatacaacgtccccgtaacaagtatcttgatgtacgccgtgcctatcttgcttatagcaaactgcgtaaacgcaggaaatcacagactcgtatgattacacgaaggttacttcaattattggaaaagttacttgaccagctggagcagcttcattcatcctacaggaacaggcttgcactatcctctgattaccaaagacgtttctcggtcatacagacagtccttgagcaagggaagaatttatttgcaggcaaaaaagtgtccaaccgtatcgtgagtatcgaccggcattaccttcgccccattatcagaggcaaggaaaccaaatccgttgaattcggagccaaagtcaacaatatacagatagacggaatctcctttatagaacatatctcctttaaggcttttaacgaaggagtacgtttgaaagactgtattcatctgcaacaacaactgaccggggttagggttaaggcgcttgcggcggattcaatctatgccaataatgccaaccggaaattttgtacaaaatatcatataagtacttcctttaagcgtaagggcagagctgccaaagatgagccgcttcggagaatcttacggtcggaactcagccgcgaaagagctacccgcctggaaggaagttttggaacgcagaaacaacattactcactggccaggataaaagctagaaacaggaaaacggaagtactttggattttctttgggatacatacagccaatgcggtatgtatgatagaaaaggtcgaaaagaaaaaaagaaaggcagcataatctgactaaaataacaggaaaaacaggagaggttttaacttcccctaaaaaagacatgtacataatgcatgggtgggaaggaaaaaacaagaatatgtaaacaatattctacaaaaaagatagaagactgggagagttgaacgaaaaaatcaagagaaaagctttgctttacgtgagcttttctcttgattttttagaaagaggaacatttactgaatatcccgaaataaaaagtcgaacctttgccaaactcggaagtcaccccaatttctccaccgatcttctctataatcatccggcaaatggaaagccccaagcctgtgccctgcacaaagctgttcagtttgacaaagcgttcaaaaatatgtcccaccttttctttttctattcctattcccgtatctttcacatatacacggacattctccccttctcgttcaaatccgaaacgtatctctcccgcatgggtaaacttggtagcgttggtgataaaattcgtaatgatctgcataatacgattcggatcgccctccatctgcaagtcctcctctccattatcaaagatgaagtccacccctccttttatacgttccttgtgaacagcatagattgtcctgcagacttcccccagatttatcggacgttttacatactccaacgtgcccgcttctatcttcgacaaatccaatatatcattaataagctgcaacaagatgtccgaattctggttgataatatccgaataaagtttctgttcttcgggggtatccgcagtaggcaacaactgcgagaacccgacaatcgcattgagcggtgtcctgatttcatgactcatattcgccaaaaaagcactcttcaacctgtcagactgctctgctttgattctggctttaatcaattcctgttctatattctggagattcgtggtatcccaagaaataccgatcagcaacggttcacggtcttccatcggaacaagtgctttaagcgtctgcacaatacgcgcttcaccgttagctgtcagatacgtttcctgtatatcaatcctttggtgggtacgaagcagttccaggtcatccttacggaacttctcagcttcctctgactggaaaatctcgtaatccgtatgccctatcgctttggaagcagggataccggaatgttcggcaaatgctttgttccaatacaaatacttgaactcatctgccggatctttcacaaacagatagactggaatattattcagaatgccgtccaacaactgattcagctcacggagttcatcccgtttctttatgacatcggtaatatcctgcgtaaagaaccagatcagctcctgttcattctcatgtgtcaggaaagaagacacctggtgcacccgcttcttcgtctctcccatacgtacgtaagcggcacggtaggcaaaactgccatcattatcccgtatttcctgaagtcgtttttcccaagcctctttcgtggtcatggaaacaggcaaatcatataccttctggatccccaattccttagtcactccgtattcttctatgaattgtttgttggcatacaccaatgtcccatccttcgacacggcaagaatactatcgctcactttatcaagcacactcttaaaaacttccaattgccgttgagtagccactctctccgatatgtcacggcacatgatcagtacatacttttcgtccaatgggaaaatgcggttttcgtaatagtgacgcttgccgttgaaatccaattcgtgatgtgcggcagaaacagcccctgttgcgactgcgtgctgcatattggaatgtatgttctgataggcttccggaggaaccatattacgcatatgcatccctacaaaatcctcgtttgtcactccgacatgattcgtttcttcattggataccacttcgattcctatctcgttatgatcgaaaacagtcaacatatccggcaaagaattcaagatctttacagcatacctttctttaaaactaacaggattggctttttctttctcttgcctaagaactgaaagttcttgtttgagccgctcattttctttagtaagcgcctctaattgttcagccattgtttttactgtccgttcactgtccataacatagtggaataaaaaatgtacttatctgtcaaaagtaaatattttattgcaaataaagacgtaaaatcctatttattttcgaaaaatctatttccctcaccgacccaagtgagagcttcatttgttatacaactaaccaacggacgtttcaccttttaaaacctgatatgattatgaccttagtcctcgctattattccggtattactattaattgtattaatggcattcttcaaaatgccgggcgacaaaagcagtatcatttctctgatcgtaacaatgctgatcgccctcttcggcttctctttttctgcggacaatctgttctattcctttatatatggagcactgaaagccgtctcccctattttaatcattatcctgatggctatcttcagctacaatgtattactgaaaacagagaagatggagattatcaaacagcaattcgcctctatctctaccgataaaagtatccaggtcttactgctgacatggggattcggcgggttattggaagcaatggcgggattcggaactgcagtcgccattccggcagcgattcttatcagtttgggattcaaacctatattctcggccacggtcagtctgatagccaatagtgtggctaccgctttcggagcgatcggaactcctgtactagtattagccaaagaaaccaatctggatgtgttgcatctcagtaccaatgtcgtattacaattgtcggtcttgatgttccttattccattggtattgctttttcttaccgactccaaaatcaaatcactgccaaagaacatcttccttgccttgctggtaggaagcgtttcgctaatcagccaatatctggcagccaaatatatgggagccgaatctccggctatcatcggaagcattctttccattattgtaattgtcttgtatggaaagctgaccgcatccaaagaagaaaaagcgcggaaaagccatctgaaggtgaaagatataatgaacgcatggagtatctatctgctgatcttatttctgattatacttaccagccctctttttccaggattacgccatactttggaaaataactgggtcaccagaatcagtctgcccattaattcctctacagccaactatacgatttcctggctgactcatgccggagtgctgctctttatcggcacttttgtcggcggattaatacaaggagctaaagtaaaagagttgttttccgttctttggaatacggtgaagcagctaaagaaaacatttatcacagtgatatgccttgttggattatctaccattatggatacctccggaatgattgccgtgattgctaccgcactggctacggctacaggaagtctatatccgttattcgctccggtgattggttgtctggggacgttcatcacgggaagtgatacgtcatccaatattctcttcggaaagttacaggcaagtgtggcaggacaaattcatgtcagtccggattggctgtcggcagccaatacagtaggcgctaccggaggaaaaatcatctctccgcagagcattgccatcgctacctctgccggaaaccaacagggtaaggaaggtgagatactaaaagcggccatcccgtatgctttggtgtatgtggcgataaccggactcatcgtttatattttcagttcctgaatctacaagatttattgaggggcggcagtatttgcctgttgcttatgtgccggctctcctttctcttcataatattcctgtttctccttatttctccgttcaataatactggttatatagacagtgaagatagggaacatcatcatccccaaagccgccagtacaaccgaaagtacccgcccggtagtggtcacggctataatattcgagccgactgtagtaacatccataaatgcccaccacaaagcgtctgtatatttagtgaccaaaggattggccgtatgttcagtaataaaaaaagcgagactggcaaaataaacggtagccagcaacatcgtcaaataagatacaaaaagccctgaagccctgttgtaagtaaaccaccccactacaatagccagcgcatatccgccacgtaccagagggataaaacgtaacatataggtaacttcgggcgagaatgtccaccccatataagctatgatattctgatagggaatggcaaccagcaggaatataaagtgagtagtgaaataacgtttcttattatccgccagaataaattcgagaacgaagtcaaccagaaacagtacacagatccatagctgtactttcatgtacacactctgcgtatagaaaggaatacctttgaaagtatcaatagagatacttatgatcagaaaaagagaaagcagaagaataacaatgtgcaaaatgccatagattccttttttccgtaatacgaagtcgtaaagagccattttcataatcaatcattttttgggaattgaaactcttaacaagtaacatatcacgaatgtttgaacgaatcaccgtgtattgaatcaaagtcctttcgcaatcaccggcaagccaaagaagcctttttgcaaagtcagtactttctccttcccttgccgcgtcttgttataaacagcagaggatacatgcaacgtttccacattcccattttcaaaagcaacctgcaaatagtattctttacgcactccattcgatacataacgatgtttgccgaccctgcgggttttcttatgggtctctatatattttttctgcaccataaccgtttcttcatatatggaagcagtaccggccagccaataattgccactaaggaacaaggcataactaatagcgcccacgcaaccaatatgacataggacattcatcactttaccctctgttgtagtcagccaagaccattttctataaaaaggcaaagtggcaagagcgatcaaaagcgccacgccaacaggaatccaccataccgctaatgtatcctcatatatcacatagcctaatgctaatgaaataataaagaggaaaagcatcataatacggagcgtcttaacaaagaaagtattcataatatgacctttgtgttatgtgcaaattttgttgttacttttttagcataaaaaaaaggctatctatcccagacagccaatcttttgttaaccttaaatctaatactatgaaaaacacattgcaaagatacggactttctgcatatctccaaattttccggaaaaagcaatgtgtcttataacatggtttaatagaaatagcaaactcgttaacatttaacataaatctatcggatattaacgaatgcccgatagcgtgactcagatatatagcatagggcagcaaacctttccgggattttttgtgtttattatataaacgaattacttacacaatatgaatctcaaagaacaatactggaaatattccctcattgtcatcattctgtttatgggagttatcatcttccggcaaatcactccttttttgggagggctgctgggagcatttaccatttacatattagtacgcacgcagatgcatcatctgacggaaaagaagaaaatgaaacgcagtatcagcgcattactgatcacggcagaaaccatttttgtattccttgtacctctcggactgaccatctggatgatagtaaacaaacttcaagacatcaatctggctccgcagacattcgtagagcccatccagcaagtagcaggatttatcaaagaaaagacaggatacgatgtattagggaaggatacgttgtcgttcatagtctccatccttccacgaatcggacaactgattatgtcgagtatcagcagtctcgccgtcaatctgttcgtcatgatatttgttctttacttcatgctgataggaggtaaaaagatggaagcatacatcaatgatattctcccgttcaatgaaacgaacacgcgggaagttattcatgaaatcaacatgatcgtgcgctccaatgcgattggtattccactgctggccattattcagggaggcattgccatgataggctatctcattttcggagcacccaatgtcttactcctaggtttcctcacctgcttcgctaccatcattccgatggtaggtaccgcattagtgtggtttcccgtcgcctcttatctggctatcagcggagactggtttcatgcaatcggacttttcgcctacggagccattgtcgtatcgcagtccgacaacctgattcgcttcatccttcaaaagaagatggcggatacacatccgttgattacaatcttcggagttgttatcggtctgccgttattcggatttatgggaatcatcttcggtccgttattactctcgttattctttctgttcgtcaatatgttcaagaaagaatacctggattcataaaataacctaccttccggatggcgaaactaccgaaaatttgcgtacttttgtagtcgtaaaacgacactaaaattcaatggaagcatttacattcaatactgccgagctgatattattgtcagtggcaggagttctctttatcatccaagttatttattatctcggtttatacaaccggatacattcgcataacaaagctgtacgcaaggaagaaattcatttcacgcgggaattaccgcccctttccgtcattctttgcgcacgcaacgaagccgacaatctgcgtaaggcccttcctgccattctggaacaggactatccccagttcgaagtcattgtaatcaatgacgcttccaccgacgagacagaagatgtattgggattcatggaggaaaaataccctcatctttaccatagttttactcccgacagcgcacgttatatcagtcataagaaattagcgctgacattaggtatcaaagccagcaaatatgattggctcgtattcacggaaacaaactgtataccggcaagcaaggattggttaaagctgatggcacgcaattttacatcacagacacaggttgtgttaggatatagcgggtatgaccggacaaaaggatggttgcacaaacgtgtcgctttcgacacactcttccagtcattgcgttacttaggtcttgccctggctggaaagccatatatgggcatcggacgtaatcttgcctatcggaaagaattattcttcaagcaaaaaggattttcaaactacctgaaccttcaacgcggagaagatgacctgtttatcaatcaaatagccaacagcagtaacacccgtgtagaaacggatctcaacgcaaccatgcggatacagcctgtctaccgttacaaagactggaaagaagaaaaggtcagttatatggccaccgcacgcttttatcatggggcacaacgctacctattaggctttgaaaccctatcacgcctgttattttacgccacttgcattgcaggtatcgtattaggcattctcgatttccactggttagcagcaggtatcacattattactatggctgattcgctacacggtgcaagccattgtcattaaccaaacagcaaaagaaatgggcggcaaccggaaatattatttctcattgccggtattcgatatcctgcaaccgttgcagtcgttgaagttcaagctctgtcgtctattgcggggtaaaggagatttcatgagaagataaattactcatatctcatagagttggcagggttgatcttggttatcagatatgaaggacctatcagcatcaggacagcagccagcagtgtgccgatattaatcagcaggaaaaggatgatattgaaagataccggaaccgtgtctacgtaataagtctccggatcgagtttgaaaatgccgaaccgggactgaagaatgcagaacgccagaccgataacattcccccaaagcatacctttgcctatcaggaaaacagcaaaccaaaggaaagttttgcggattgtaaaattagtggcacccaaagcttttaggataccaatcatattcgtacgttcgataatgataatcagcaaaccggaaatcatggtaaaaccggcaacgcctatcatcagaaacaaaatcacccacacattcagatccaacaagtcaagccatgcaaatatctgtggattcaactgttcgatactgcgcacataatacgtacctccatattcgtctttccggttatcggtatcgattgcgatttcatacgttgtatcttccagcttatcatagtctttcagctgaagctccacccctgtcacctgctccgactgccaaccgttcaaacgattcaccaaactgaggtcggtcaataaaaaaagattatcgtattcggagaaatttgtctgataaattccggcaatagtcagcctgcgcgcgcggacatcatcctgaatataataggtatatatcttatcccccaacttcaacttcatctttgtagccaaagacttggagataagcacccgattgctggaaaccgaatcactgaaaacaggaatctctccttccaccagatattcttgcagaaaacggggatcaaactccggacctacccctttcagtaccattccttgaaaggcatcatccgtctttatcatacccggtttggtagaaaaacgctgtacatggcttatctccggataaccgtcaagggcagtcatcatactgtctcctaccacaatcggatgggtttcgtaagaactgaccgcatccagattagttatctggatatgcgatccgaatccaatgactttatttctcacttcacttttaaagccgataacgaccgccactgctataatcataacagccagtccgatagcaatacccgccattgcgatgagcaccgcaggacgtgacacctgttttccgctatcgctttcgcggtagatgcgccgagctatgaaaagtgataaagacatagacttttattccgttcttcccggatacgcttccaaagccttctggagaacaaaaagcgcacgggttaaatcttctttctttaatacatatgcaatacgcacttcattgatacccgaacccggagttgtgtagaaaccggaagccggagccatgaataccgtctgaccttcgtattcgaaatcggaaaggcaccatgcacagaatttgtcggaatcatccaccggaagttttgccactgtatagaaagcccccatcgggatgggcgaataaacgcccggaatacggttcaagccgtcaatcaggcatttacgacgttccacatactcgtcatacgtctcgcgtgagtattcttcgggagcgtccaaggaagcctcagcggcaatctgaccaatcaacggaggactcagacgagcctgacagaacttcatgacagcatcacgtatctctttatttttggtaatcagcgcaccgatacggataccgcattccgaataacgctttgatacggagtcaatcagtaccacattattctcgataccttccagatggcaagcggagatataaggagaaccggtgtatatgaattcgcgatatacctcatcggagaaaaggaataagtcatatttcttcaccaagtcacgaatctgattcatttcacgacgtgtatagagatatccggtcgggttgttcggattacaaatcaggattgctttcgtacgttcatttatcaactcttcaaacttctcgactttgggaagtgagaaaccttcttcgatggttgtggcaatcgtacgaatcttcgcgcctgcagaaatagcaaacgccatgtagttagcatatgccggctccggaacgataatctcatcacctggattcagacaggaaaggaaagagaaaagcaccgcttccgaacctcctgaggtaatgattatatcgtctgcagtaagattgatattgaacttagcataatatcccactagtttctcgcgatagctacgataacctgcactaggactatactccagcactttacggtcaatattgcgtattgcgtcaatcgcggcctgaggagtgggcaggtcaggctgtccgatattcaggtgaaacacatggactccccgttgcttggcagcgtctgccaaaggagccagttttctgataggagatgcaggcatctcgtttccgcgaatggatatggttggcataattttaactacaaattactaattactatttactttttctacttgaggttgcaaatgtacgcaataatttgaatacagagacataaaaactttaaaaaccttagcaaggttaaaaacgttatgggattttgaaaataaagctatacatttgtcatacggaaaacttaaaacaatatcataatgaccatacaccttatctcattcgcgtcactacttcataaacaagtctcactgcgcagttcacacgaagcgattttaagtgaacttgaaaaatattataccgtaaaactcgtcgactatcaagatatggacaagttgacaagtgatgatttcaaaattatttttatcgctactggcggagtagaaagactggtcatccaacatttcgaaaaccttccccgccctgccattttactggcagatggcatgcaaaactctcttgcagccgccctggagatatctacatggcttcgcggaaggggaatgaagagcgaaatccttcatggtgaactgccatccattatacagcgtgtacatatactttataataatttccgagcacaacgttcattattcggcaaacgtatcggagttatcggcactccttcatcctggctggtcgccagtaatgttgactatctgctggccaaacgccgctggggcatcgaatacatagacattccactggaacgtatctatgaacattttcaacaaatcacggatgatcaagtaggtgcttcctgtgccgcagtcgcctcgcaagctcttgcctgccgcgagggaactcctgaagatattatcaaagcgatgcggctctaccgggctatcaagaaagtatgcgaagaagagaagctggaagcactgacactaagttgtttcaaactgattgagcaaatcgacactaccggctgtctggcattgtccttgctgaacgatgacggaataatggcaggctgcgaaggcgacttgcagtctatcttcaccttgctggctgttaaagcgctcaccaaaaaggacggattcatggcaaatccctctatgatcaattcacgcaccaacgaacttattttagctcattgcaccgtcggtctcaaacagacggaaagatatatcatccgcaaccattttgaaacggaaaaggggatcgccattcaagggttgcttcccaccggagacgtgactatcgtcaaatgcggtggcgaatgcctcgacgaatattatctgtctacgggaacgttatccgaaaacacaaattatatcaatatgtgccggacacaagcgcgcatacggatgaatactccggcagaatatttcctgaagaatccattgggcaatcatcatatcctggttcatggaaaccatgaagatgcattgaacgagttcttccaggcaaatacctgcaaacgaaccgaataagcccttgtgacatttttgtattatttttaagtattataggggggaaatacaaaaatgtcacataactagtaatcaagcatttaagcttaaaaacatctcattttcaagataagttcacaaaaagcaataggatatttctgcttttttctgaagaaaaactgcacttccctcatattactctaattgtcaacaaattatcactaatgccacctattatcttcgtatataattggcaaatataaaattgcacttgtgcaactagtcagacagacaagtgtaacaaccaagttactcttgtgtaccatcccggtcgcacaagtgcaaccggataattcaattagatgaattgatcaatagaacggcagaaaagattaatagaataggaagaagttattaaatcttcctattgttttttttcaaatcaaccgctcagtctgggtgctgactactaaatcaagccgttcaacgagaagaaagtgacgaaaaggtgatttaaaacagtttttggattcagaaaacacttatttgggacttttgtagcactttctttagaaaaaaagtcgctttctttgcttccgaaaactaattaaaaaattaaagcaatggctatgaaaacttattatccgactcttttatccctaatctttgtattatatgcggtgcatactcatgctcaaaaaatagaaaacttaccggtcatgaaacaacaatcacagaatgaattgtttcatcgattggacaaagctccccgcactccggcttttgaatgtgaaggatattggagttggggaagctccgttatcaaaggtgaagacggaaaatatcatatgtttgtttcccgcttccccaaatcgctgcctttccatccgggatggatgattgcctcagagattgtgcatgccgtatctgatatacccgaaggtccttaccaattcagcgacattgccctgccgacacgtggtgcgcaatactgggacggacgctccacgcacaatccgcgtatcctgaagtacaaggacaaatattaccttatatatatggggtctacccacccattcggtgaaccgacttatgatgaactgacattaagcagcccatggtgcatcgtcggacgtgtcaataaacgcatcggattggccgttgcagattctccttacggtccctggaaacgtttcgacgaaccgatattaaaaacaaaagccaatactttctatagttatttagcatccaacccttcgcctgttattcaagaagacggctcggtgatgatgattttcaaaggaagggctcatactgaaaacggcaaatactcggacatggcattaggaatcgcctatgctcccaatattgaaggtccttacacggtattgaacaatgatcagcctattttccaagtggatggtcagggagaagcagaagatccgtttttatggaaagactttaaagggtatcatgccatctttaaagatcacgtagccaaatatacgggcgaaagaggcggcggagtcatggctcactcgaccgacggtgttcattggaccgtagatatagatccaaaggcttactcacgcgccgtagaatgggaagatggaaaagtggaaatgcagggacaattggaacgcccgttccttttctttgaaaatggaaaagccacgcatgctttctttgccacaatggatggcccaggcggatttgagaatgctacaaaatcatggaatatggtgattcctttgaagtaacggataaaaatgccttttttaaagaacagcaggaaatagcatctgatttacttggaaaactcgagcaacaggagtatctttgtatcagatacaatggtattcgataatagcataaaacgatattaacagatacaataatatgcctttactttacaatttcgacatagatacctcggaagaattgctgaccatattagcacaaaatcttcaacaacgccgattagaaaaacattaggttattctaaagccatcaaaggcctattagcagagccgctttataacacaatggaagagctggatactattaaccgaaacaaaaacaggacagccgtttcaagtaatgacttgaaacggctgtcctgtttttgttatatgttatttacaaaatttccttgtcttcccactttccgccgtgccactccactaccgacgtgaaacctgcctttttcaaagcagccaatgcttcggcacgtccattattaatccgttccggataatgcgcatcactgttcacctgcacccgaatacccaattcctttaggaaagagaaataacgttcattcggatagaacgtacccagttcgtgataagacttggtattgatttccacaatataaccgcgctcggcaatcgccgcaaagtaatcacggaccaacgtatcataccatgcttcatccagcaaacccggacgatagcaggaagcgttatagtgcattttatcggcatgacctacgatgtcgaaaccacccaactccaccatacggagcagattcttataatataggcggacaacgaaatcaagatcaccaccaaaatgcgcatcaaccaattcacgaaaatgatctgccggagtatcaatatctaccacctttccttccggagagtacagcatgtggacggaaccgatgcaatagtcaagaggcaattcttggaaacgcgacaacgaaggattactttcctcattcagatagtctatttcaaggccgacagccaattctatctcatcagcatactttgctttaagccgggaaaattcggaaagataatcatccatccgatcccactccatcgtccatgcagtagagaatggaagcggagcatgagaggaaatgccgtatgaagaaaaaccttcactaatggcaaaacgaatgaaatcttccatattggctcgtccgtcgcaatacagacaatggctatgataattagtcaagtttgtcatctcttcggtttattcaagggttattcaagttataccggttattcattttttcttactatcgacattgcttagctttctatctcactgagttccagccaacgcattgttttctcgtcgatcagatcattcacttcgggcaaacgtttcgatttctccgtcagttcgtcaacagaaagggtaccactacaaagaagctcctcaatctgcgccttttcggattccagttcggctatatctttctctaattgttcaaattcgcgcttctccttgaaactcatcttacgcttgtcgttcagacggacacgggcagtcttttcctcttgcggcttttcggcttctttctccttttgcgcttttgcttctttccaatcacggtaatcactataattgccgggaaaatcgcgaatatctccctgtccgttgaaaaccatcaagtggtctacgaccttatccataaaataacggtcgtgggaaaccacaatcacacaacctttgaagttctgaagatactcttcgagcacattcagcgtaataatatcaagatcgttagtcggttcatccagcacaaggaaattaggattgcgcatcaagacagtgcacaaatacaggcggcggcgttcgcccccactcagtttatagacatagctgtgctgggtctcgggagtgaacaggaaatgttgcagaaattgcgaagcggtcaactttttcccatttcccagctctatgacttcggcaatatcctgtatcacgtcaatcactttcatttgctcgtcaaactggagtccgtcctgcgagtaataaccgaaacgaaccgtttcaccaatatccaccgtaccgctatcaggctgtacctgtcccatcaatattttgatgaaagtcgatttgccggttccgttgtttcccacaatccccatcttctcataacgggaaaagatataggagaaatcatccagaatctttaaatccccgaaactcttgaacaaatggtcggcttcgaatatcttacttcctatatacgatgctttcacttccagctttacgttatcgttgcggagccgttgtttcgccactttctccaattcgtagaaagcctcctcacggtaacgggctttgtgtccgcgcgcttgcggcattcggcgcatccagtcgagttccgtacggtaaaggttgttggctcgttctatttccacacttttagcgtctatccgttcctgtcgcttttcgaggtaatagctataatttcctttatattgatacacttgccgattgtctatttcgataatttccgaacagacacggtcgaggaaataacggtcgtgagtcaccatcagcagactgagattggtacggcgaagataatcttcgagccattcggtcatatccagatccaaatggttggtaggctcgtcaagaatcaacagctccggttcggtaatcagtgcatttgccaaagctacacgcttcaattgcccaccggaaagctgcttcaccttttggtcaaagttacgaatcttaagttgcgaaaggatttgcttcgctttctgctcatactcccacgctttctcatggtccatacgaaccagaagatcctccagtcccggatgtccttccgtttccatacaacgctcgtattcttttatcagttcaacggtactgttgccatgatggaaacaggcttccagcacggttaattcttcgggatactgcgggtcctgctccagataatccacccgaaggtcgcgtctgaaaacaatgcttccactatcatagccctcttttccggcgatgatattcagcagcgtagtctttccgctgccgttctttgctattaatccgacacgctgcccctcagcaatgccaaaagatatattttcaaaaaggaccaagtcaccgaaggacttggtcaggttatctatctgtaaataaggtactgtcacgtaagtaagtgattaggagttagcgattaaggttagtcggcagtgagcgcagacttataagtttctatgacgttgcaagattctccggcctttattctgctccatgtcagtttcatcgggtcgataatgccgttcttatattgaagaaccggcgcttcccggttgccgtcaatcaatgtcttccattccataccgtccacttcattggcaaggatcgtgcagatcgtaataccgatagccagccactcgtcttttttcttcggaccgatcttaccgctgtcaatcatctgctggagtttttcgaggtcatcttccgttccttgaaaatctttcttcaattcctgcttcacggtagataccgtccattcatatccttcattaatctgatagatttcggaaaggcggacgggaatcaactcggccggatacttctgtccttccttacgtatctccaacgtggcaatgacttcttcggcttcttgcaccgtgccacctttaggtacggtaaacgagcattcgaaagcaatatcgtcaatgcctgtaatccatacatgggatgtatagtaagttccttcttcctggaacatctctttgctatacgcacactccaacgccccgaccttcaccaacgaagccgaatcgttctctttcagttcctgccggatggcttctttgccataaccagctttacctttgaatgcggatatacgaaaattacccgaccacacatcgggattatagaagagaaaagagccttcgccatcctcaaactcgttccagtccgaaggatagttcatcgaaaaccatgctccgggagagataaatttcttgccttgcattctttttctacatttgattacttggcaaaaatacgaattattttcctatcggctgtattttccggcgtacttctttggagatttccaaaaacatatagttcaactttccggaatgaataccttcttcgttctccttatactttttattggcatattgctttgatttctcgaaagtcagcaatgacatctcgttctgtgatttgcctaccatcgtagaatccagttgttcatcgggaaagaaatcatccagatcgacatcaccgatcatcgtcgtttccaggaagttcatatcggtatgcgaattgtcggtataatagcctacaaacatatgtcccggcgtacgcaccaggataggatcgatattgatggcacgaagcaaggaggcaaacagcacgctgccatccacacagttaatctgtgaagattccagcgcatcatcgaacgtacggacacgctgagagaacacgacattgctcgaaagactggtattggaaaccgaactgtaacggaaattccgcttctgcaatatattccaaagcgcatacacctgcttgtctacggctcctttagccttgctttgataaccgagaaagcgattcacaatgcgggtattcaacgcctcacgaagcaactgatcgatcatcggattctcttcgttgacgtaggcggcaaagaaaataccggtatcatgaaacttggtcccgttcgccacatagcccaacagacattcattgacactgcgcacggaaaatgtacgcacccgctgtcccaattcttttccgttcatctccactgtcacggcaacgctcacgggttccgcctgaaggttgttcttcaatgcttcataattccagattatatccggataaatcgtatattccgttcgtggtttgttcagaataaactctgagacggaacgggagaagaaaggagtttcagccacctcaatccttacccggctatatgccgcccgcgactttacccgaatggcaatgcaggatttcggatttcccagactggtggaatccgacgggataatgacttgcgcatcggttgtggctacggaaagaatagccgaaggaaagatatttcctcctaaatcatcaacaatctcaaaaccgggattgaacgtggtatatttaaagacggacactccgccaagcagaagcagcaacacaataaccgcgccaatcacttcgcgtctatgtcgtttcaagtcaacttttatcatcgtttgtagtatctattaatcaaacatctctatcttttctcgctaacaaagataacaaatagcaaacgttttttcctcttatagcccgcaaaaacttcgatattttattctatccgcaggattgggaggaatgtaacaagattgtaatatctgtttcatctgaccgtaacaaagtatcctcatctttgcatcaaataaaataaaaacgtaactttgtcatattaatacatatagcttatgaatgaaacccgtattctagttgtcgacgatgaagaagacctctgcgagattctgaaattcaatcttgaaaatgaaggttacgaggtggataccgcaaactccgccgaagaggctttgaagctggatatttgtagttatcagctaattcttctcgatgtgatgatgggggaaatctccggattcaaaatggcgaacatgctgaaaaaggacaagaaaacagcaaaagtacctatcatctttatcacagccaaagatactgagaacgacaccgtgaccggcttcaatctaggcgcggatgattatatctcaaagccattttcgctgcgggaagtcattgcccgtgtaaaagctgtattgagacgcacggctgcagcggaaacagaaagagttcccgaacggcttacttaccagacgctcgtcattgatatcacgaaaaagaaggtaagtatcgacgaagaagaagtgccgttgactaaaaaagaatttgaaatattgcttctgttggtacagaataaaggacgggtattttcacgtgaagatattctggctcgtatctggagcgacgaggtatatgtactcgaccgtactattgacgtaaatatcacccgtctgcgcaagaagataggaatatacggcaagtgcatcgtcactcgtctcggatatggatactgttttgaagcgtaataactactccctatgaatctgcctgtaactcaaaaacatttcctctctttcagccgaaagctttttctctcggtcatttcactgtttctggtatttgccgtttgctttatcgcgtatcagtatcaacgtgagcgggaatataaggtggaattgctgaacacaaaattacaggattacaacagtcggctctatgaacagttgagcaggcaatcgccggacagttcaattatcaccggttatatcaacaaccatattctggaagatttacgtgtaactcttattgatatagacggaaatgtgctttacgacagttattcgaaccacaacgggcagatggagaaccatttagaccgtccggaagtacaaaaggcgctgaaacagggaaatggatatgacgtacggcgtacttccgagacgaccggtgtcccctatttttattcggctacacgttacaaagattatattgtccgttcggctctaccttataatgtcagcctcatcaacaatctgaaagccgacccgcactatttatggtttacggtcattgtgactctgttgctgatgattattttctataagttcacgaataaattgggaacttccatcaaccagcttcgcgagttcgccatgcgtgccgaccggaacgagcctatcgaaatggctatgcaatcagctttcccacataacgaactgggggaaatatcgcaacatatcatacaaatatacaagcggctgcacgagaccaaagaggcactttacatcgaacgtgagaaattgatcacccatctccagatctcgcatgaaggactgggagtatttacaaaagacaaaaaggagattctggtcaacaacctctttacccaatacagtaatctgatttcagactccaacctggaaactacggaagaagtctttgctatcagcgaactgaaagagatcatccacttcatcaacaagaaccaaagacagcgttcgggaggaaaagatgaaaagagaatgtctatcacaatcaataaaaacggacgaacctttatcgtggaatgtatcatctttcaagatgccagctttgaaatttcgatcaatgatgtcactcaggaagaagaacagataaacttgaaacggcaattgacacagaacatagcccacgaattgaaaactcctgtcagcagtattcaagggtatctggagacgattgtcagcaacgagaatatcccacgtgagaaaataaatgtttttctggaacgttgctatgcccaaagtaaccgactgagccggttgctacgggatatatccgtactaacccgcatggacgaagctgccaacatgattgatatggaacgggtggatatcagcttattggtgggcaatattatcaatgaggttgcgctggaactggacgagaagcatatcacggttgtcaattccttaaagaagagcatacaaatcaaaggaaattattcgctgatttattccatattccgcaatctgatggataatgccattgcatacgccggaacaaatatccaaatcaatataaactgtttccgcgaagatgaaggtttctactatttcagctttgccgataccggtgtgggtgtgtcacccgaacatctgaaccgactctttgaacgcttctaccgggtagacaaaggacggtcacggaaattaggcggaacaggattgggattggctattgtaaagaacgccgttattatccacggcggcaacatctccgccaagaacaatcaagggggcggactagaattcgtatttacactggcaaaagaaaaataaccgcccaagcccatacagaccatattctccttcatcgttttcatttgctcgttggaatatccacatgcaatcaaacgattacagcaacgcatcattcagttaacaacattctttcatcatacatataatcgaccattcttaaaaaaggaatatttaaacgaaagagaggaggataatccactcctctcgacaagaacatatacaataagcgcagcatttgcaaacaagaaaattcactattttacacgaattgcatatttcccatcaaaacaaaagcaaattccacaaccaaccatctttttactaccgatcatcatccagtccagcactttttatcatcacccaaccatccacaaagaaaagcaaaccagctctcccaaaaagcaaaatcaagcctttacaagttccccaccgggaaatgaagcctccctcaccgagaaacagagccttcctcaccgatgaacagagtgtctgtcaccgaggaacgaagcctccatttagaaaaaaaagtgcatattcctataaaatacatacagaataaaccgacattctgcatattcttacatttatttataccattttcattttaaccaacctctttttcatccttccccatccccttactatcttaaaaacagcacattttatacttcatgacctcccccataaaacagcaccccaaaaccaaaagaaaggcagaaaaagaaaggattattttgtataaaggaaaaaggaaattacctttgctctcaaagtaaaaaacaaattatgaaaatgaatataaatattattccggttttatgcttcctcctgttgtgctcatgcaaaaacgggaacgcctccagccaaagtacaaacgaaaccgtacaagacactattaaatccatcaccctacctgccatccccacaatgatgacagctcccgaacaacgagcagattttctagtaaaacactattgggataatgtcaacttcgccgacaccaattacatccaccatcccgaagtgaccgaacaagcctgggcggactattgcgacatactgaaccacgtccctttggaaaccgcacaagaagccatgcggaaaacaatcgaacgaacgaacgtagacaaaaaagtattcacctacatcaccgacctggctgataaatatctatatgaccccaactcccccatgcgtaacgaagaattctacattcccgtattagacgtcatgttggattcccccctgttagaggaaatagagaaagtacgtcccaaagcccgccgggaattagcccagaaaaaccgtatcggcaccaaagccctgaacttcaactacacattagcctccggcgcacaaggttccctctaccaacagcaagcagagtacatcctcctattcattaacaaccccggctgtcacgcctgcacagaaacgatagacgccctgaaaaatgcccctatcatcaatcaacttctggagcaaaaaagacttacagtcctctccatctatcccgacgaagaactggacgaatggagaaaacacctgaatgaattccccaaagaatggatcaacggatacgataagaaattcgccatcaaagaacaacaactatatgacttgaaggcaatccccaccctctaccttctcaacaaggaaaagaccgtactcctaaaagacgccaccgcacaagccgttgaagaatacctgctaataagaagcaataattaacatacgcaagaaaagacaaaacaagagccaacaaattaaacaagccaataagaaataagcaaaaatccctattaacatacaccatacgaaccaacataaggcacttgattaacataaaaaaatagtgacggtatatgctcaagaactaacggtatccttgccatataccgtcactatttatatcagatagcgtcaccatttctccaaagccccacgaacacctcacccccaccccacaaacaccccgcatggtctcccggcctcgttttttcagcgtcaagcgcaggtgttttcttcggcgtcaaaaagggcagactgtttgagtgtagcgagtttctgccctttagccgaaggaagcaccggagtagctgaaaaaacgcagccttgatcctttctttttggttctttctctttcgtatcaagacgaaagaaaaagaacatctctttggaaaaaacaaataaactccctatctttgccgcgcattggtttgcgactcccatgcgggggaagcaattaaaagggaatcaggtgcaagtcctgaacagtcccgctgctgtaagttccatacaagttacaagcaattcactcattgccactggaaaccaatccgggaaggcgtttgtaacaggaataagtcagaagacctaccatgcaaataagtttcactgctttcgaggaaaaagcgttgagtctaatgaaccggacaagtcgtctatcatttcattcatcactctgattcagagaaagtgtgttaaaacggataaactctgccaagtttatttatgcgtgtccggtcgaagggatttcgcccggacacttttaaacctaaaaagaggaaatggaaaagaggactttagcaatctttgcagtaagctgcaacctgtttttatcgacttcactttttgcacaacagcaaagggtggataccgcacgtacctattacatccccgaaataaccgtttccgatatttatcagacccgtgaggttcgctctaccgctccattacagatattttctaaagacgctttaaagaatctgaatgccctgcaggtttccgatgccgtgaaacattttgcaggagtaactgtgaaagattacggggggatcggcggactgaaaacggtatccatacgaagtctgggtgcgcaacatactgctgtaggttacgatggaatcacactgactgactgtcaaacgggacaaatcgaccttggacgtttctctctcgataatgtcgaccaactgtcgttgagtaacggtcaaagcgacaacatcttccagcctgcccgtttctttgcttcagcagggatactgaatatacaaacactcactccccgatttgaggacggaaagcacacgaatataagtgcgtctttcaagaccggttcatggggattggtcaatcccagtctgttattggaacaacggatcagtcggaaatggactgtatctgccaacggcgaatggatgtcatcgaacgggcattatccatataccttatattacggaaatgaagaaggggatctgagttcacgggaaaagcgaaagaacacggatgtacagacatttcgtgcagaagccgggctttacggaaacttttccgacaaagaacaatggaggctaaaagcctattatttccaatcttcccgcggattgcccaatgccacaactttctattatactcattcttcacaacgtctttgggacaagaacacatttattcaaagtcaatataagaaagaatttaaccggcaatgggtgttccagacttctgccaagtggaattggagctatcaacgttatttagatcccgactacaaaggttctaccggagaaatagagaacagttattaccagcaggagtattacctttcggggtccgtgctttacaggttattgaataatttgtctttttcgctttcttctgacggaagtatcaacacgatgaatgccaatctgaatgactttgcccatcctacgcgctattcgtggctgacagcttttgcgggaaaatatgtaaacaattggcttactctctctgcatccgctttggcaactgtcatctacgagcaggccgataaagggggaagtgcaggtaatcaccgtaaactttctccgtatgtcagcgcttcgttcaagcctttcgacaaggaagaattccgtatcagaattttctacaaagatatctttcgcctgccaagcttcaacgatttatactacggtgaaactggaaacaacaagttgaaaccggagaatgcacggcagtataatataggtctgacatacagtaaggatgtatgcccgttcctgccttatctctcggcaactgttgatgcgtattacaacaagataacggataaaatcattgcctatcctaccaagaaccttgctgtctggagtatgagaaatctcggcagtgtagaaatcaaaggcattgatgtcacaggtaacgtgtccctccagccttgtgaaaagctccgtatcaatctttcggggaattatacataccaacaggctttggatgtaaccaactccgaccctgcttccgaagaagggagaacttacaaacatcagatagcttataccccccgtgtttccggttcgggacaggtaggtatcgaaacgtcttgggttaatttatcttactcattcctgttctcaggaaaacgatatacacaaggagaaaatatcacagagaatagaatggagagttatagtgaccatagtatctctgtggggagggagttaactatacggaagattaatacttctattcatatagaagtattaaatatagccaataacaattatgagattatcaagaactttccaatgcccggacgttctgttagagcaacgttcagtatcaaatattaactatgaaacaaataactataaatagaaaatatatattgcagacatggttatggatgctcttactgttattcattgcctgtgatgatatggaggacaagccatctatccccaacattgatggcagtaatatctccgaaaccggaactgcagagctatatatattaagcgaaggattgtttaacttgaataacagttctttggcccgttattcgttcaaaaagggaaagcttactaaaaattacttcaaggacctaaacaaacgagggttgggtgatacagccaatgatatggcattatatggtggcaaattatacattgtagtcaatgtatccagtaccattgaagtaatagacttccaaacaggagtttctatcaaacaaatccctatgctggcagaaaacggcagttcacgacagccacgccatatcacgtttcataaagacaaggcatacgtatgttcatacgatggtaccgttgcacggatcgacactacttccttagaaatagatgccttgacaaaagccggaagaaacccggaaaatatctgtatacaaaatgacaaactatatgtatccaattccggtggtttggattattctgcaggcttaggtgtagacaatacagtttccgtgattgacatcacttcctttacagaaataaagaaagtaacagtcggtcccaatcccggatgtattgtaccaggaccagacgaaacagtttatgtagctactcatggaaataacatagcagatggtgacttccactttgtaaagatagactgcagaacagatgaagtagcacatatttatgacgaaaaagtcatgaattttgcaatcagtggcaatatcgcttatttatataattacaactacaatacagagtcatcttctatcaaggttttcaatctaaagaccggacagactatacgcgaaaactttatcacagacggaacccggatcaacaccccttacggtattaatatcaatccatacagtgacaatatctacataacggaagcatatagttacaccataaccggtgacatactttgcttcaatctgaacggacagttgcaattcagaatcaaccgtgtcggactgaaccctaataccgttgtgttcagcaacaaagtatcatcaggagacagcagtgaagagaactcggatccgaatgccccctctgcatttgccaatagagtattggaatacagaccggccccctgccagtttatgaatacatccacaactgcttataaagaaaactatacatctgaagatgtgagaaaatatgcagaagagctactcaaagatccagacctatgtcttcttagtcttggagcatacggaggttatatcacggtaggatttgatcatacagtacctaacgttcccggagaatatgatttcaaaatatatggcaacgcgtactatgacacattcgggacattaactggaaagcttggtggaagctcagagccaggcattgtattagtttcgaaagatgttaatggtaaccaattacctgatgatgaatggtatgagcttgccggcagcgaatatacgtcttccgcaactataaaaaattatactattacttatcaccgtcccacatcaatattggataaagttaaatggacagataatcaaggaaacgagggatatgtaaacagaaatgatttctatactaccaattcatattatccattatggatagaagagaacgagatgacattccatggtagccgtttgaaaaataacgctgtgaatgaacctcgtgaagatatgccagaacattgggtaggatactgctatccatacggatatgcagacaatcaccctaataacacggaaaaaagtaaatttcaaatagactgggcagtagacaaaaatggacatcccgttcaattagatggcattgatttcgttagaatttacacagctgtcaatcaaaatacagggtggatgggagaaatttcaaccgaaatacaagctattgaagatttacattttgggaaacaataaacaattatgtataaattatttaattaaaagaagaatgaaaaagatgaaattcttagttagccaactatatatgttggcattgctggcattgccattcatttcatcatcatgtagtgacgatgatgatgatccaaaagttgaaattactagtctaggtattgaagatggtgcaacagttaatgcggggcaagctgttgaactaaaagcgcagatcaacaataatcacggaacaactagttactcatgggttataaatggaaaagaagtttctacagaaaacatatatactttccaaagtgacacggtcaaaacctacacaatacaactaacagttaataacgaatatgatactgttaaaaaagagataaatatcactgttgcatatccagcctcattctatgtcattaacgaaggaaaagaatattcctctattaatcaatacaaggaaggcaaatggaacaaaaagattattgaagacttaggtctaaccgcaacaataggagtaatctacgaaaactatatgtacattgtctctaaaggttcaccaaacttaaccaaaatgaatatggacaattttagtaatgcaagtcaaatcgataatatagatggacaaggatgcaatatttgcattatcaatcaagagacagctgtcatgaccaccagcaagggagcatacaaagtgaaattaaatccacttacagttggagataaactccctaatactagcaatagtaaagacatatataaaataaaggagcaactattcattttggacgggaatacgataaaagtatataatataaatgattttagttttaaaaaagaccttacccaccaagcaaatgcaggctttgcccaagccaaagacggttcattatgggctgcaaatggtaacaaactagtcaaaattgatactaacaaattagagagcgaggagattcaattgccaaacgacttaaacatcttttttgacaaatttgcttacagaccaagcggtttatgcgcttctactacagaaaacgccctatattttgctcatgcacctaatttcaatggcacagatatctataaatttgatattactactcaaaacgtaaataaattcttcactgctccaacaaattactccggatatggtgcaggcatacaggtaaatccccaaaatggtgacgtatacctcatttatacagaagacggatggggagcacattatttaaatacctatatttacgtagtcgatggagtgaccggaacccaaaaagctattattgattacaccggtgaatattggttcccgtcaaccataactttccaataacaagagtgtgatttatagataaaaagacaaatagtcgcaaaaataataaaaaagcgttaggctacttcttgggaagtctgacgcttctttttattctctaccatatgttcttgtgggtacaaatcgagaatataacaacagaagaatgaattacacaaatcagtaaatgtccgtcaaaagcattagtgaacatttcttattcagcctgcactcagttctccgtccacgtcaacacaaaatccggctcaatacgataaccaaccgtatagagtttctgttgctgcgttgcgaattcctgaacctgaaatgttccctccacttgaggaataaaatgcgccagacgaagtttacggaaatctgcatcggcgttctccatgcgcttgaagattgtttctttagcagaccaatacaacaacagcccccaagtcaaatcttcctgataagattctacctgttcgtcagggcggatataacggtcggatacccgatgaacccgttgcccgtattgctcaatatcaatgccaacaggattcaaagaactaagtgctaccgccacatatcctttcgtatgagaaatactgatataaaaggaatgatcggaaagaaacggttttccttcggaagagtaaacaatctctttgtcttcctgtaacatcgaatacaacaaaacacgaacagacaaccattccatcttccgacgttcagaagtaaaacgcggtaattccttttcagaagatattttccgtgtattgggcaacaaagacaataatacgtccaaaggctcttccatcttccagacagcccattgtatgccgtcttccctatgttgcaggtataacgccatcttattcttttccttccgatacttcaggttcttttggcaaaatcgtaaacttcactttcaagatacggcgactgtccatctccagtacttcgaattcataattatgataagtcaccttctcgtgtaaggctggaaattccccctttatctcaagcaacataccagccaaagtatccgcatcccctatcaccttctcaaactcatcttcgtctacttttacaatcttatagaaatcggtcaattgtgtctttgcttcaaaaatccaagtatggtcgttcaatacaacgtatgtacgttcttcatcgtcatattcatcatgaatctcacccacaatttcttcaataatatcttccatcgtcaccaatccggacgttcctccgaattcatcaacaacaatggctatatgaatcttattcgcctgaaaatcacgcaacaagtcatcgatcatcttcgtctccggcacaaaataagccggacgaatcaacgattgccaacgaaagttatcccctttgttcacatgaggcagaagatccttgatatacaacactcccttgatattatcccgcgaaccggaatagataggaatacgcgaataagcattctcaatgatacattgcatcacttccttgaaaggtgtacggatatccaaatcgaccatatccagacgtgatgtcatcacctccttcactgtttctccgccaaaacggataattccttccaagatattattctcctcagacaattccgccttatctgtcagttccaatgcgtgcgacaactcgtcaacagagatattatgactctttttggcgaaatgcttattaagaaaagccgttgaacgtaccaagacagtagccaccggacggaatatcttctccagataataaattcccggtgcggagaaacggcaaaaagccaaagttttctgtgcagaatagatcttcggcattatttcaccgaacaacaataacagaaaagtaagtattacagtcagtataagaaactctgccaatggagaatggaagataaacacattcatgaaaaagaaattgcagagcatgataatagtcacgttcacaaagttattagtgatcagtatcgtcgccagaaggcgttcggaatcaccaagaagtgcacttattttttcatcggaaggatgattgcgttcgtcaatatcattccggtccgaaggagaaagcgagaaaaaagctatttcagaagccgaagcaaaaccggaagcaagcaggagcacaccagccaatactatggtgataatagcagagatagaaggagtaagtacggtaataccgtcgaaaatgccagctaactggcttaaataaccatctgagtccaaagattctatattttagttaaacaaaagataatgtgcctataagtttgcgaaagccaatcggcacactaccatattatctagaacggcaaatcatccgccgaattatcttgtattgattgagcctgcgattgctgtgactgttgcggctgctgtaccgaagcggcaacgggttgctgcatggaagctgtagctcccgcaccggggttagttcctttcggagtcagcatttccatattatctacataaatctctgtagtataacgtgtagcacctgcctgatctgtgtacgaacgggttctaatctttccttccagatacaacttgtcacctttgtgtacgtatttgtctacaatctcagccaaacggttggatgcaacgatattatgccactctgtcctgtcgggaatctgagtcccatttgctaacgtataaccgcgttctgttgttgccaacggaaaagtagctacagccgagcctgcatcgaagtattttacacgtggatcctgacccacgtttcctaacaatatcactttatttactgacatatacgtatcaagtttatgattcttaaatccaaatctgctgccaaatttaaacagaataacaataggatgcaagaattgttataacttttatttcagaccgatatacttctcaatgaaagcgtgcaccaagcgagaaacagcgtatcgctccaattcctcagcttttattttttggaatttaccgaaagaagcagttccttcgggcaatatcacttcataaaaattagcataaatcacccgatgcgacaatatatgttttacctctctgcataccggacgcaccacaggttgctctccgggggcaaacaacgtctgaaattccggcaaagccaaaaactcttcttccggcaaagaggatgaagtctctattaaaggcagttcaaacaaattcttccaaatatcattatccgtccgtttattaataaaggtatgcgcgcccgcacgtacataaatataattgaagtaacgattcgttgacttcgtcttatgttgcttcaccggaagcacggtaaccagccctttcgataaagccgaacagccgacagataacggacaaaacagacagtcgggtgactgcggtgtacattgaatcgccccgaaatccataattccctgattatacagggcaggctgtttcttgtccaacatctcgttcgccaattctgtaaacagtttcttccctgctgtcgagtcaatcggtgtttcaataccaaaatagcgcgaaagtacacgatacacattcccgtccaccaccgcataaggcatattatatgcaaacgaacagatggcagccgccgtatattcccctactcctttcaaagccagtacctccggatacgttttcggaaaaacaccattcatgctttttgccgccgcatgaagattgcgggcacgggaataatatcccaacccctgccaatacttcatcacctcgtcctcctccgcatccgccaatgtagatacatcgggaaagcgtccgataaaacgaaggaaataatcatatccttgaactacacgcgtctgttgaagaatgacttccgaaatccatatcaaataaggatcagaagaatcacgccacggcaaatcacgtttattttctttataccattctataatcgtttccgtaaacatattagcatattggcacatcagtatatcttttttccgacaaaagtaactcttttggttctaagaaacctctatgcaaccatttttttagaaaaatgtgtagaatatatttttttaggagcttaaaaagctatatatttgcagtccaaaaaattagcaataacatagtaataatattttttttaaggaaaaatgactaaagcagatattgtaaacgagattacaaagaaaactgggattgacaagcagacagttcttactacagtagaagccttcatggatgccgtaaaagattctttgtctaacgatgaaaatgtgtatttacgtggatttggtagtttcgtagtgaaaaaaagagcacagaaaactgctcgtaatatttcaaagaatactactatcattatccctgagcacaacattccggctttcaaaccggctaagacatttacaatttcagtaaagaaataataaacaagagtattaacccataaaatgtgaagctatgccaagcggaaaaaagaaaaaaagacataaaatgtctacgcacaagcgtaaaaaaagattaagaaagaacagacataaaagcaaaaaataatttttaggtctggatcacacagaaataaagaacaaacttgcgaagctaatgtctttcaagtttgttctttgtttaagtagttaactcaaaatgaacaatttgttaaaatagttgttcgtacaaatgagattcaatcaataataaggaaacaaaacagtgacaagtgaactagtagttgacgtacagcctaaagaggtttccatcgctcttctcgaagataagagcttggtggaacttcaaagcgaaggaagaaatatttccttttctgtgggcaatatgtatttaggacgtatcaagaaattgatgcccggactgaatgcatgctttgtggacgttggttacgagaaagacgctttcctccattatttagatttgggtcctcaatttaactcactcgaaaagtttgtaaagcagactttaagcgacaaaaagaagctgaactccatcagcaaggcaaccctgcttcccgacctcgacaaggatgggactgtatccaacacactcaaggtgggacaagaagtagtggtgcaaatcgtaaaggaaccgatctccactaagggaccgcgactgacatccgaaatttcgtttgcagggcgctatctcgtactcatccctttcaatgacaaggtttccgtatcacaaaaaattaaatcgagcgaagaacgcgcccgtctgaaacaactgctgatgagtatcaagccgaaaaacttcggtgtcattgtccgtaccgtagcagaaggaaaacgcgtagccgaactcgacggagagcttagagtcctgatcaaacattgggaagatgcaatggtgaaagtacagaaagccaccaagtatccgacgttgatttatgaagaaaccagccgcgccgtaggtttgttgcgcgacctcttcaacccttcttttgagaacatccacgtcaacgacgaggccgtgtacaatgaaattaaagattacgtaacattaattgcgcccgaccgggccaatatcgtaaaactgtacaaaggccaacttcccatttacgacaattttggtatcaccaaacagattaaatcatcgtttggtaaaacaatctcttacaagagtggtgcctatctgattattgagcacactgaggcgcttcacgtagtagacgtgaatagcggcaaccgcaccaagaatgccaacgggcaggaaggtaacgcactcgaagtaaatcttggagccgccgatgagctggcacgccaattgagattaagagatatgggtggtatcattgtcgtcgacttcattgacatgaatgaagccgaaaaccgtcagaagctttatgaacgtatgtgtgccaatatgcaaaaagacagggcacggcataatattctgccgctcagcaaattcgggctgatgcagattacacgccaacgtgtgcgtccggcaatggacgtcaacacgaccgaaacttgtcctacttgcttcggcaagggcactatcaaatcgtccattctctttacggacactttggagagtaaaattgactacctggtcaacaaactgaaggttaagaaattctcgttacatgtccatccgtatgttgccgcctatatcaatcagggactcgtttctctgaaacggaaatggcagatgaaatacggattcggtattaaggttattccaagtcagaaactcgctttcctacaatatgtattctacgatacacatggagaggaaatcgatatgaaggaagaaatcgaaatcaaatagacagagaaacggcgcctcgttgcaacgagacgccgttttgttattgaaactatatagaaagcaatgccggaagctccgataaacgggtaataaaaggtataccgacttctcctgttctgccttccggacaaccttgaacaacctgacaaccaagagacaatcccggttgaatgtcatttttcatcgagtcaccgacaaccagcacttcttcataggcaaatccggcacggtcaattgcccgtttccacaaggaaggatcaggcttacgtacaccttcaagcgtcgaatctgtgatagagtgaaaataagatacaattcccaaatccgttacaatcttcttaagatttccataataattggaaacaagcaacagggtgtatgagcgatgtaactcatcaagtacagtacgggatgcgaccacataatccgatgaataatccgtcacaaggcgggctgcttttaaaggcaacccctccctattctccggtgtatccggcaaaacgccacgttctatcagacttttaaactgtaagtcggtcttaaatgcctgcgtctcaagcagggaatgttcgggctttactagttgcaattgctccatcatccgctccgcatacacatacgaatctcgaaaattttcttttgtcaaaggaagattcaacttcatcgtataaagatgaatgtaaatatccatccaatgcaaaaaaggcgagtcaagcgttccgccaaaatcaaaagcaaccgcttttatcttatctttatctatcattttttatttcctatcttcattaatgcaagacctatcacaatccagaataattcgcgaacacgggtgatcagtgctgtatatacaccataggctcccgacagggacaaaccacctaccgccaaagcaaatccgccttcacggcctcctaactgcataggcaagaaaaacaataaattggccagtaaggaagagaatgccaaaatcaaaacgcaactcacaaaactgacattagtagtaagcacattcaatataagccatacttccatacaactaacaacacgtgcgagatattccaaaaacaacgcactataaaatgtacttttcttttgacgatgtaacaaggcaatctggctatctatattttccagtttcgccttatgagtctccgagaaacggataacccatttcttcagaaacggtattttacttcccaaatggacacaagccactgccatcccatgacggtatcccttcacaaacaggatactcaacagcaaacagaaaaccgttaccaatcccagcacaatccccatttcccaagtgacaggatagaacaccgcataaattacgacagcgctcaaccataaacagaaatgcgagaaaatgtgcatcattacataaaggatgaccgacgaagtagcacgttccactcctacgtagggagtaagttccatgatacgataaggctcccctcccatcagtcccaccggagtaacatagttgatagcaaatccggagaccgtaaatttatacaacttagagaaagtcaatgaagatacttttcccccgctacgcacaataatataccacgaaagagcattaatggcatagataaccagccacagcaacaacaccaacggcagataaatccccgcacgcttcagattgttcaacaactcctcataagatacatcaaaagtgaaaagcatgataacaacagctacaatgccaaacacaaggaaaatgtttctaaaacgactcttcataaatattataagttttggtacatttgtctgcacaaccgctcgtgctgacatatcatatatatcagtaatccgttaagtacggtcagttcaaagacaaaataaatccaaggcagattgaccaataacgaaataaacaacacgataacacgtgtattgaatgaaagaatattggtgtatttcattaatggaagactaccttcacgaaaacggtttctaacctcttgcggatatacttcgccatatttcgcacgtaacgctgcaaaaaaacgctggaaagccggagagaattgttcctgcgaatgcgtataacccgtataaaaccaaaggaatgttttccgcaccaagtctttcttccatgacaacgaaagatacaactcgcgttgttgcacggaattatccaactcactgccggatttccctttcaagaagaaaagatgcacattccggtaataatccgccatagccgcctgcttactatgcgaaaatcctgctaccgcagccaatagccaaatccaatacccccattccggtgtcagtcgtaaacagatagctacataaatagaaataaaccaaaaatcaccggatactccatccagaatacgaccaatttcagacttttgcccagtcatacgtgctaactgtccgtcagcactgtcatacatattcgcccaaacgagcaaacacatacctattatatttatcagcaggtcattataataaaacaatataccggcagctatccccaaaaagatagaagctatggtgatagcgttaggagtaactcccaaacgacgaaacagaagagcccaacgataaccgataggacggtagaacaacaagtcgatccattcttccgtatcagtagacttcaaggttgcctccagcccctttgcacttacttcattattcataatcctacgttctctacttttcttatgataattccaccaatcgccttcgccgcttcctgacgacaaggagcaaaactaggccaatcgttaaaatcaatgatacgaatcgttccatccggtgctacgatacagtcgccaccatataccgtcacatccagcactttcgccgcatcactgcaaagttgatgcaacccctcttccgagaaaggaatgccagacggagcaccattaatctcttcaaggccaaatttgctatgattaccctcctgcggataaaaccaatagaagaaatcagtaccggctactccatagaatttaaccaaatcacctttcaaatgctcattaatcaccacacgttcgataccacgcaaagcatattccgcaatgacctcctgcaattcggcagaagtacgtacaaacgttacatcttcacgatgaatggcatgaaagtccgcacgtttcaaccaacaaggctcaaatacaggttttatcaatgcttcggggacaccatcattcgtatcccatatcaaacttcgagggtgagaaatctgattttcaagcagcagagtagtcattcgctcacgtgtgcaattctcgataccatgtccggaattgaccgcaaagcaatcctctttttcttccaacttctgcaacttccgcacagaagccttactacgcatcatggtaaatatatacttctcgcctttcaacgaattagtcaggaattcctgttccgtatacatattcacctgatgaccattttctttcaaatactgggcaacagccgaaaagatggcggcatcattgccgacatgattgggtgaaaaaagagaatatcgctgtattcccgcaaaaatcaaggatctcatttaatcagttgttcatctaaaaaaagttcggctttcttcacatccgccgcatggtctatgtctattacttttgagaatgggtaagcccgcaactgcaaaccggcatcaaccagatattgctggaaaccgcgcatacgggaaactcctgcctccatcgctaaaggcaactgtgccaaagcacgctgattcatacaataaattcctcccgatatataacgcaagccgtcataagcctcactggcatatcccgtaatccgcaaattatccgctgtcttgacataaagaggacgttcgtcgtcaatataatccgtaacagccatcaaagcatcagcagattcatcagcacgaaaagtacgaatataatcagcaaactctgcttcacgaaagatcgggtctaccgttgtcagacagaattttccttcgccttgcagataaggcatgagttcataaaaactatggaaagaatcgggagtggattttacaatcacattcagaggtatgggtagttgtcgctgttgttgttccaaaaaacaacgaacttcggacatttcttcattaataatgatgcagatagactctgcatcattatcaaggaaaatgcgaaataatcggcttaatagaggagtcccccccacttgtacaagcggtttaggaaccttcaccccttcagagacaaggcgagaaccttgccctgcggctattaacgcatatttcattctattatatcttcctatttaagccaaataatcaggttctttttcaccaatcatgttacgcaatgtctgttttaccattctccattgagtgaacaagtcgtgttccggttggtgttcaaaatcatgcatcgggctcttgcagaagaatgacaaccaagtctggatgccacacatacctgcacgcattgccaaatcgctgaacaatacaaggtcgagcgcgataggagcagcaaggatagagtcacggcaaaggaaatttaccttgatttccatcggatagcccatccatccgaagatgtcgatattgtcccatgcttctttgttgtctttgcgaggaggatagtagttgatacgtaccttatgataaacatctccgtaaagatcggggaatttttcaggttcgaagatagtatcgattacagacagcttgctgacttcttttgttttgaagttttccggctgatcaagcacttcaccatcacgattacccaatatattggtagagaaccaaccgctcacacccaacatacgagtcttgaacatcggagccaatacagtcttcatcaaagtctgaccactcttgaagtcttttcctgagataggcacattcatctttttagagaattcccacatagccggagtatctacgcacaagttaggagcacccataataaacggagcaccttctgcaatagcagcataagcgtaacacatactcggagaaataacttccgtattattctccttcattgctttttccaaagcagcgagtgactgatgctcgtcagacaacggaacgtagatttctgtgctggcagcccaaagaacaacgatgcggtcgcagttgttagcagccttaaagtcacggatatcctgacggagttgttctaccatgtcccaacgggtagcagcattcttgatataagtaccattcagacgtttagcaaaattgtgatcgaaagctgccggcattggcttgatggcttccaattcgtcttttactccgttcaggtctttttctttcaagacttctgcatacatagcagcctcgtatgcgttatccgggaaaatatcccaacctccgaaaacaatgtcattcaaatctgtcaaaggtacaacatctttgataagtttttcctcattgttttccatgcgcatagtagccaactgtgaaatagatcctatcggttttgccagtcccttgcgagaggctagtgtacccgtaatcattgtggtagcaactgctccacccactccaactaccaacacgccgagacgtccggtagcgggcttaatttcttgtttcatttctattctattaaaattaaactaaaattgttgcaaaaataagattaattaattattaaaacgagctttatttgtcatataaacatggcaattagcaggatttaacttttagaaggtcatgtggagacttatcctcaatcctgatttgtcaattccgggtgcatcacggtatgtaagcctccacacatagtccaagcgtaataccttgagaatattttcaatacctatccccgcctccacgtatggtgttttccccattgactgtgtgttcgctatcggaaaagcgaacaagccatcactcaaggccggattgttcttatcacttaaatgcccatacaacccgcgacatgagacaacctccctccattttagcttctttaacaatggaatacgattgaataaccaaccgttaaggaaataggtaacatcccatgagaaatattcgtcattcataaattccatcgcattcatcaatgaataagattcaggctgaatggtataagaaaggttggcattgggcatgattaacaaggggaaaggaactttgttccacactttaccagctttcagaataatatccgtatagccgaaagcagaaaaccagaaccgcttctggataccggcctcagtatggttatatgtataatcgctacctaaaatacccttaccggcaatagtatgcgataaggtaaagacaggtgcatccaacgaaacggggaaacggttccattgagtttggaaaaacttctcattaggggcataacgcaacttcaactcagccgcactggtagaaaaatccttgaccggagtataaacgtcgccttcttttcgcagaaaaggaatcagatacgaagactcatccgtccgcctgcgggctgtcaattggaaagaaaagcccgaatagaattcattggtataggtcatttccgcctgtttgaaataaccgatacggtcatccttttcacgtttcaaagctagaaacacattatctttactcgtatacaggtagttttgtccgtattggttgacatcagactcgtaatgtaacttcaaagagtgaataggaaattcgttagcatattcttttttctttttgaacgaatattccagttccgccaatcctttcacacgttcatccttaaaaccgtacgcaatgtacccttttgcaaacagatgaggattaagccaggcagttgtcatccctccggcacgaatacggggaccttcgagtgtattaccgctaatagtggcgttcatcgggccaatatagaaaagaggcgcttccttagaggtcgggatatatccggtaaagaggatagaaagcaccttctctgtccaataatagaccggataactgcgcaactgtgccatcaagtgatctaccgaattttcttgttgcgagatagcggcttccgggcgattctccgcccaaaaagattcggaacgcgccaaagcctccgtttcttcaatgatacgttccggcttggtgaaagccttgtcggcttctgcagtcggtgcaaatgtataattgctataatccgccacacgacgggcaaatatcccatcctgcccttcggtcaacttaaattcaaccgtaatgctttcatgatcgagtaggcgcgtaccgtcttcggcacgtttgaattcctgttcgagcaacatatagtctacaaaattcaggtttatctttttgggaaagttgaacacggcacgtttgacaaaataagtagagtcgagcactacatacagatgtccgttgaatccgaaagactcggagttaaatggggtgaaagccagatccacacaaggttcaccggctatctgcaatgtatccatcagataatacttatagaatcccgtaccgattcgggacagtggactgacaaacttattggtaaacagggaaatgttattttcgtaaatatccacatccttgaaaacttcgttgatagcagcctgcatcccttgtttggaaaggaactcatcaacacccgcctgtttgcgtcctttcacccattgtttctcggagcggggagatttccgataatagtccgtagcaagcaactctcgggctgatacggtaagaataggtttaccggtgacggcagaagtatctatatactcggtaagaaaatcaaatttacgatataaccatttcttctgcttctcttcatcaaaattattcagcgcgaaagtagtcttctcataacgttcgcgttgccaaaaatctttttcatttggagaataattatcacgactctcaatcatccgacgaacaaactccactgccggattatcttttttccggtaacgttcccgtttgggttttaccacgacttcagaaaggtcataagcagtaggtgcaagcgctactttgtaggataaattacgggctggataaatcctccgactattttcgttatagccgatgaccgatatcacaagaattgcttcggaacggttggtcttgaaataaaagcgtccatcactgccggtcgtagttccctcagtcgtgtctttcaaacgtacagatgcataaggtagaggttcttttgtcagagaatcagtcaccactccttgcactacatactgtgcgcttagaggaatactgattaacaataaaagaaagagcgtcagtgtaccttttacgattagtctcataccttaaaatcctattgaattgagcgggacaaaggtacaggtatttaaggacaaaaaaaggtctgtttgacggaagaagtgttcttatttgacacaatcaaagaagaacagtccgatttatttgcaataatcgggaaggcgcacagtgaaacgggttcccttacccacttcggaagttacagagatagttccttttaaacgctcgacaattgtttgacagatactcaatcccaatcctgccccttgtgtgaaattatcaactttatagaaccgttcaaagatgtgccggataccttcttccgaaatgccgactccggtatcttctacaaagatacgggtatatccgggctcttcctcttcttcataaccgaaagtgatagaaccgctgaatgtaaacttagccgcattattaatcagattattcactacctgttgcaggcgtacgttatctgtctgaaggtactttttatccccttcgggcatacgtagcagcagttccactcccggaggcatattcaaccgctgcgaatcgtgaacagtcttcaacagcagaggtaagttatgttccgcaaagataaattccatcgtacctgactctatacgggacaagtcaagaatatcattaatcaatgccaacagcaaaccacaatttttattaatagtcgcaataaactgagcaacttcttctgttgtaaacccacttgtatcactcagtaaatcagagaaaccaacaatagcattcaatggagtacgaatctcatggctcatattggcaaggaaggctgatttcagtttatcggtctgaagagctttatcacgcgcttccctcatttcctgttcggccgtcttatatcgctgaatactttgacagacacctaatatattatacagcgagtcttgcgtcaatcctgtgataacggaagaacggtattcccaccactcgtattcaccatcggcgttacgttgacggaagttcaggcgcgtattcgtatcttctccggtcagcgccctgtcaaataacagtttcacttccttcaaatcgtccggatgaaccgtccgctccatatcctcacgtgaaattatcgtaaccgattcttcatatcccagacgtgtcaaaaagccttgaggaaagatgaaacaatttgtttccacatcgaattgccacggataaatggaactttcatccatcgccatatcaaaaaaacgtttttgcatttcttcatccgagatattccgggcggaaaacgccataccggtaatcataccccttgaacggataggtacaatttctccagacaccgggaaatacttatcgctatgcacctctttcataaaagagccctgaggtatctgcacgctctcccctgtgctggccacttgtttcaacatcttatgaagaatatcctgcccctcattatatatattgaaaatactgcctgccatcatcccttcataaacacgtcctcccgcctcgctaggcaaatggagcattttcagcagagaactattcgtaaaatgaatatgcaaatcagtatcatacgttatcaccccatcgcggatagaatggaaaatattatcaaactcattacgctgttctaccaacttattctgcaccaataaacgggtttgtgcttgaatccgccgtttagattcgcgccggttaaccctcatcagccatacgacggaaacaaccaacaacgccaaaatagacggataaagaagaataaataggaatttatacttctcccaataaggttcattgacaattattccacttgaggctaccttatcaggatcaacgtagaagaaatccaattgcttataatcatatataaatccctgcttgctttccgttactcctatttcttgtggagatgtccccttcaatacttgagaagccttttgcccagccaataatgccgaagtataagcatcactgtcataggcacagaatacaccattagtcagccccacattctggcttgcaaacacaggagctttagaattcttcccgacaaatgagaggaaaggagaccatttaggagctatgacaagacgcccgtgactgttacgcggataacaaatagctgcaataatatgactggttgtatgattctgggtattatagattttcatatcataatccggatgatctttctgaaagatgtcccactcctcttgaaagtcattaagcccccttgcactcagaaaactattgtctatcacacaaagcacttctttccgtaaaggaaatattttctgagcctgacggagaatcacatcaaagtcaggattggcaataaacccgcaaacattaggatgggcagcaatcaatttttcatcaggatatttaatatcgaaaaacactaccggaatctgcaagggcaacgaatcgccacaggcaaaaagcgtgtaaaaggcctcatcacttgccgtaacaatcaaatcggtcttcctttcacgggcacgttcacaaaagcggcgcatgattaccttctccgaccggaatgtccaaaaatcggcatccagatattctgttgtaatattcacctttatcccactctctctgaatccttttgccaatccttggtttaggctgctatgccaaggagtctgcgctgtataagattgtagaaaaagtatattgaatgtacgttccgtagctgccgcctgaataagaacagcccaaaagagaactacaaacaaacagcaatatcgtcgattcataagcaaaagccagcgttgttttcaatattatgcgtacaaagataagttattatattgaaaacaatgcaaatagccctatatttttattccttccacaaagctgtatccggttatgtatgatggaaaggctactgatcttccgacagcaaatcctgccctaatgagtagttgcctccaccttttcccggtcacgaatttcttttgcttttcgcacatagacaatcatacgcatagattgatcataagtgaaataattccatatccagttaagaagcacgaccaccttgttacgcactccaagaatggaacgcagatgaactaccaaccacataacccaagccaaccagccttgcatctgcactttactaaattccgcaacagcacggttacgtcctactgtcgccatagagccccaaatacgtccgccacgacctatcaacgatgggttcatgttaccgatagttactccggtaacaccacttacccaaataaaagtacgtgtagcgatttctattccatcttcgagtataactttatggtcgcgatagtctatcactcgtttattcagcaaaatattcacttccatctcacgaagaaatttttctgcgtgcaatgacgaatcctccgacatcccggcaagtaatctcggtcccgcttctatcaaatatatgtgcatcaggctgctaggcatatccggatagtcattcggcaattcttttttatcaaacagtaacctaccgcagacgcaaacggtctcctacttcggggacatattcgccatccttacgattcatcttatacagattcttaaggcggataccgtatttttgagagatgccgtgcatggaatctccatcttttacaatatatacggtataaggtttggaagcctttttcttcttgctcttcagatagataatatctccttctactaacgtataatcacgttgcagatcattgtatttcacaagcttcttccaactaatatcaaactccttacctaaatctttaaaggtatcgccgttacgggcaacgatataggcaatatcattggcaatatatacctgatgaggattcatcagccaaggatttttgcgtaacttacgttccgaataaacacctttgcggtcatatttgtagagatcgtaatcttcgataatcgtaatcaaacggttagcataggaagggtcagttgcgtatcccgctttcttcaatccgcgcgcccatcctttataatcggtaatatcaagtttgaaaaggaaggcataacgggctcctcttcgaagaaaatcggaatggtcttcgtaagaatcacgcggacgcttataagcacgaaaacattcattgcgcgcatcgtcatcatgacggacgctgcgcccccgccaactgctgccacatttgataccaaaatggttattgctctttcgcgccaactgactatatcctgcaccactttccagcaatccctgcgccaacgtgatactagcgggaatcttatgaagtttcatttgttcaacagccagctcgctatacttgtttatatattctacatagcgggcattccgcctctgcgcttgcatccctatggcaaagaagaaaactacggctaaaaagacaagtctatacagtttgttctccattttaattcagatatgtattataaggacacaaaaatccgaaaaataattgggaatatcaatctctttcctaactttgtaacattaattgtagaaaccaataccgtaacgcgtatgaaagacctcataattaccgcagtgattaaagtatatcaatatgatgagctgaatgaggccgaccaggcactcgttaaaaccgccaaagatgcaacagcacgcagctattccccttattcgcatttttcggtaggcgctgccgtacttctcggcaacggaattgtcgtaacaggaacaaatcaagagaatgccgcctacccgtcgggactttgcgcggaacgtaccacgctgttctatgccaattcccaatatcccgaccagccggtcgttacccttgccgttgcagcaagaacggaaaaagattttatagaccgaccgattcctccgtgcggtgcctgccgacaagtgattctggaaacggagaaacgctatgggcaaccaatacgtatcttgctctacggcaaagaatgtatttacgaaataaagaatataggtgatttgctaccgctatcatttgatgcatcagctatggaggaataagtatgttacaacaatatcacacaaaactaaaaggcactcttgcactcacggattcttatctgacagagaaagcgttacaaagagaaaaaggactctataagtttatatgggtgcgcaacggaagtatcacggtagaaattgaccaccaggaaatggtattggtcaaggatgaggtaatctcacttacccatctgcaacacctcgaattcaaatcaatcgacggtgaatacctgaccctcctattcaacagcaacttctattgtatttatggaaatgatcatgaagtatcatgcagcggtttcctattcaacggttcgtcccatctgatccgcttcatgctgaatgagcaagaacgcaaggaattggataccatcaccgaagcgttggaaaacgagttcaccgtaactgacagtttgcaggaagaaatgttgcgtatcctgctgaaacggttcatcattcaatgtacgcgcattgcacgcaaccgtatgaatatcacccgcgaaaaagaatccggctttgaaatcgtacgccaatactacaatctagttgacgagcatttccgtacgaagaaacaggttcaggattatgccgatatgttacacaaatcccccaaaacactatcgaatatcttttccacatgcaaactcccctctccgctccgagtgattcacgagagagtagaagcggaagccaaacgccttctgctttacagcaacaaaagcgcaaaggagattgctgatattctaggttttgaggatcaggcttctttcagccgtttctttaaaaatataagcggacagagtgcagtacaatttagaaatacacaagaagggaaaaattgataagggatacggaagtattgccattgggaaaatattggaaaagtacgatctttgcggtgtaagttaaaccaataaagccccaacaagatgaaagagaaatttatcactctactaaccttcacatccggtctgaagaatttcggtatcaaatttatccgcgtagctatcttagtagtattcgtatggattggcggattgaagtattttcactatgaggccgacgggattgtcccgtttgttgccaacagtcctttcatgagtttcttctatgctaaagacgcacccgaatacaaagaatacaaaaatccggaaggcgctttcgtaccggagaatcgtacatggcacgaagcaaacaatacatatactttctcctatggattgggagcgctcatcatgagtatcggcattctagtatttctaggaatctttttcccgaaagtaggactgataggcgacacattagccattatcatgacactcggcacactatcctttctcgtcacgactcccgaagtatgggttcctaatctgggtagtggagaattcggctttccattactctccggtgcagggcggctggtgattaaagacattgtgatcctggccagtgctgtagtattattatccgactcgtcacaacgcgtactcaaaataattaaaaaagactaatctgactccgtaaggagttccgacttcttgagataacgaaacaaataggctttaccctgtgttatatagcctaatacaaatcgttaatcaaagaagttatgaaacagtatgatgcaattattataggattcggcaaggcaggaaaagtcctggctgccgaactttccaatcgaggatggcaagttgccatcgtagaacgctccaacatgatgtacggaggttcttgtcctaacatagcctgcatcccgacaaaggcattgatacatgaagcagagatgtcttcactgctataccatggggattttctgaagcagactaatatgtataagcagactattgcccgtaagaacaggctaacctcttttcttcgggaaactaattacgagaatctaagcaagcgcccgaatgtgactatttatacagggacagcttcctttgtatcacctaacactataaaagtagtacttcccaacggagatattgaactgcaaggaaaggaaattttcatcaataccggttccactccgatcattccggcaatcgacgggattcaacaaagtaagtatgtgtataccagctccacacttttggatatgaatgtcctgccaaaacatttaattattgtcggcggcggatatatcggtttggagttcgcttcgatgtttgccggatttggcagtaaagtgacgattctagaaggaggcaaccgttttatgcctcgcaacgatcaagatatcgctaacaatgtcaaagatgtaatggagaaaaaaggcattgagattcatttgaatacacgcgcacagtctattcatgatacgagtgacggagtgacactgacttattcggatgtatctgaccgcactccttactttgtagacggagacgcaattcttatcgcaacagggcggaaaccgatgatcgaaggattgaatttacaagcagcaggtgtaaaagtagatgcacacggagcaattgttgtaaacgatcagttgcgcaccaccgttcctcacgtatgggcaatgggagacgtaaaaggcggaccacaatttacttatttttcactagatgattttcggattatacgcgatcaactcttcggagataagaaacgtgatatcggagatagggatcctgttcaatatgccgtatttattgatccgcctttggcgcatatcggcattactgaagaagaagcactgaaaagaggttattcgttcaaagtatcccgacttccggcaacttccgttgtccgttcacgtacattgcaacagacggacggtatgctgaaagcaatcatcaacaatcataatgggaaaattatgggatgtaccttattttgcgctgacgcttcagaaatcatcaatatcgtagctatggcgataaaaacagggcaaacctctacattcttgcgcgattttatcttcacgcatcccagtatgagtgagggattaaatcaactgtttgatgtataagaataagaaagaatataactcacttctaaaacagagcctctgaatagggtaaacagaggctctatttggagtaatcggaggctctgaatgaggtaaacggagcctctaaataaatgaaattcattctttttcagtcttaatagagtgaaatctaatagaaagtgttatctttgcagccaagttaaactatatacctaccacaatgagaattactaagtaagacaacacttctaagtaaacatcacttttcttatatgctttttctattttgttaagcatcacgaaatccgtgttgtttagccagtattgtgtttgtcgttcccccctatcctgtgattttccctcactctattttcaacctcaaacccaatagatcattatgtctataagtattcagcaaatcagctatatccatccggataaagaagtattattcagtgatctcaatttcgccatcagtaaggggcagaaactgggattagtcggtaacaatgggtgcggtaaatctactttgctgcaaattattgccggacaactttcaccctcttccggtgtcattgtccgcccggacgacctatattatatcccgcaacatttcgggcaatatgattcattgactatcgctcaagcactccagatagaacataagcaacaagccttacatgctatcctgtcaggagatgcctcaaacgaaaatttcgtcatcctggatgatgactggaatattgaagaacgttccattgccgctctcgatttatgggggctaggacagtttactctatcctacccgatgaatttgcttagcggcggtgaaaagacccgtgtatttctgacagggatggacattcatcacccatctgtcgtacttatggatgaaccgaccaatcatctcgattcttccggcagacaacgtttatatgactgggtagagaaatatcgttccaccctgttagtggtaagtcatgaccgtactctgctcaatcttctccccgaaatttgcgaactggagaagcatcaaatcaattattatggcggaaattacgaattctacaaagaacaaaaaacgctgatgcaggaagcattgcaacaacgtattgaagaaaaagaaaaggcactacgtattgcccgtaaagtggctcacgaaacggccgaacgcagagacaaacagaatgtacgcggcgaaaagagtaatataaaaaaaggagttccacgcattgtattaaacgcactccaagggaaatccgagaagagcactagtaaactgactggcgtccatcaggagaaagccgagaagttaacaaatgaacgcaaccagcttcgaggttcgctctctccgactgcggcattaaaaaccgacttcaacagttcctcgcttcataccgggaagatattagtgacagcaaaagagattaacttcagttatcattccaattcggttaacaatgatattctgacgaataataaaataaattcgtctgacacaggttatcttcccaatccgaatagcaatgatattcaggaaaatagtatctcaaaacaacagctttggcaagctcctgtcagctttcagctaaagagcggagaccgcttccgtatagaaggagccaacggtagcgggaaaacaactctattgaaattaatcaccggccaacttcaaccacaggaaggaactctgacgcggacggactttagctatgtctatttgaatcaagagtattcgatcattgacgaccggaacagtattcttgaacaggcttacgctttcaacagccggaatctgccggagcatgaaataaagattattctaaaccgttacttgtttcctgcatccgaatgggacaaatcctgccggaaacttagtggtggtgagaaaatgcgtctcgctttctgctgtctgatgattagtaacaatacccctgatatgtttatcctggatgaacctaccaacaatttggacatacaaagtattgaaattatcactgctactatcaaaaattatgcaggtactgtgatagcaatctcacacgacaattattttattcaggaaattggtgtcgaacaatgcattttattgagttagtctattgatattttatccagggcaaccgcaccaaaatttaattcatatccgcacagttttgaataaaataatggagtattctggaaacgttgtggtaaatctgaaaaagatgattgagtttttaagattccccgttatctttttattataagatatgggtccagggtgaggggtggtgagggtagatttataaccttttattattttattttctatactatctccttttttatcctcaaaaaaatacgaaagttataaatctaccctcaccacccctcaccctggacccattcattagcgcaccgtttaactcgtttctatgcagttttgattcttttcaccacagaggacacggaggacacagaggttataattatctctgaattagaactttgaaacctctgcgtcctccgtgtcctctgtggtgaaacagtccatttatgcacggttatgaatcaaattttggtgcggttgcactgtattttatctgataagtctaaatatcaatctagtttttttataacttcgcagcgcgaagatcaagaattagaattaaaatgaatcagacagcacaatcatggtggtttatcttttacaaagaccaactgcttcttgagaaaaaagaggatggtatatataccgtcccatgtggagaaagctctcctattgttattaaagaaaaaacaaccgtacacaatatcactacactggaagggagaaactgcaaggctttctccctctcctctcccattgaagaatcggagcaatggatcatgatagggcttcgtgcctcctatgaatatcttcctttgtctcattatcagacagcaggaaaagcacatgagattctgcattgggatagaaacagccgcttttgttccgcctgcggcacgcctatggaacagaaagaatctatcatgaagcgttgtccgaaatgtggccgggaggtatatccttccatttccacagcgattcttgtattagtgagaaaaaaagattcactacttttagtgcacgcccgcaattttaaaggaacattcaacagtctcgttgccggatttctggaaaccggagaaacgctagaagaatgtgtagcacgtgaagtgaaagaagaaaccggactggatgtaaagaatatcacttatttcggtaatcagccctggccttatcccagcggactaatggtcggctttattgctgattatgccggaggggaaatcaacctccaagatgaagaattgagctcgggagacttttatacaagagacaatttacccgaacttcccagaaaacttagtcttgcccgaaagatgattgattggtggatagagcatccaaatgaataaatcaaacatggaaaatatcatcaaaggaatccgtcagtattatccggtatccgacagttctttggaagtactcttcagctatatgaagaaaatggagcttcccaaaaaacatttactgatacacggtggagtactagaccgccacgtctactttattgaaaaaggattttgtagatcctattgtttacgtgacggagaagaaatcacgatctggttttcacgcgaaggtgatattacctttgccatgaaagatttatatcataatcaaccgggatacgaatatgtagaattactggaagattgtgaactatatgccatacgtattgaagatttaaatcaaatttatgaaactaatatagaaattgccaactggggacgtgtcattcatcaggaatgtttgttgtacatggatattcaccatatcaaccgattgtatcttccggctaaagaacgttatgaacaacttttacgtgagcaacccgatgtcattcaccgtgcccaattgggatatatagcctcctttctaggcatgactccccaacatcttagccgcctacgctccgaatcttgaatctttttaatctatgtgaatttttatatcacaagaaagcagtacttttgtcagcgaatacaaaaaaactgataaggataagtatcgtgattaacacattaacttctttacgaatattatttgccttgatggtattcggggcacattgttatgttctggatccgagcttcgacactcacttctttaaagaaggatttgttggagtcagcttttttttcatccttagtggcttcattattgcctataattatgaagaaaagttattggaaacgaccaccaccaaacgtactttttgggtagcacgcattgcccgcatttatcccctccatctacttactctattaattgccgcatgtataggagggtatgttcaatacaacgatacgacagactggataaaacacttcgccgcttccacttttttattgcaaccattcttcccttctgcagattattttttctcattcaatagtccttcgtggagtctgggctgcgaacagttattttatttctgtttccccctcatcattcctttcttaaatagtaaacggaatctatgtatcactcttttcatctgcctgctgattatgctgacaggtatgcatctgactgctgaagaacaaattaaagcatactggtatgtaaatccaatcacccgcctgccggacttttttgtaggtgttttactttatcagttttatcggtcgatatacaataaaaagatttcttattccaccggaacactattggaaataggagtagtcattttattttttgttttctatttttgtgccgcagacattcccaaagtataccgctattcttgttactactggctacccgtttctttggtgatacttatctttgccttacaaagagggtatatatcccggttactatccaatcgggtcttagtgataggaggagaaatcagttatagtttctatctgatacatttatttattatactcacatacctccaaatggctactctgtatcaatggcacatacattggatgataagtgtccccgtcattttttgcatcactattgcgcttagcttactttcttattattattttgaaaagcctgccaatagatgggtaaaacgaatactaactaaaaaacaatcataaattagccccatggaattatcaacaaaaacaccccgaattgaagtagtagatgctcttagaggatttgctgtaatggccatccttctggttcataacctggagcatttcattttccccgtatatccggaaagttctcctgaatggctcaccattttggatgccggagtatttaatgcgacattttcactgcttgccggaaagtcttatgcaatattcgctctgcttttcggattcactttctatatccagtcgcacaaccagcagttgaaaggaaaagattttggttaccgctttttatggagaatgatattgctggcaggattcgccactttgaatgctgctttcttcccggcaggagatgtcctgcttctgtttgttgtagtcagtcttgtactatttatcgtacgtaaatggagtgacaaagcgattctaatcaccgccatcttgttttcactgcaaccgattgaatggtttcattatataatgagccttttcaatcctgcttataccctacccgatttgaatgtcggagccatgtatgctgaagtagcggaatacaccaaagccggaaacttttgggattttctgataggtaatgttactttaggacagaaagcaagcctgttttgggctatcggtgccggacgtttcttacagactgccggacttttcctgtttggcttatatatcggacgcaaagaattgttcgtagctaccgaatctcatttgaagttctggatgaaagcacttattattgcagctatcagtttcgcgccactgtattctctgaaagaacagattatgcaaagtgacagcagtttaattcagcaaacggtaggtactgcctttgatatgtggcagaaattcgcatttacgattgtacttgttgcttctttcgtgttgctttatcagaaggatcagttcaagaaaactgtatctaatctgcgattctacggaaaaatgagtttgaccaactatatttcccaatctattttaggagctattatctattttccattcgggctttatcttgctccttactgtggatatactcttagcctgattatcggtattattcttttcctggcgcaagttcggttctgcaaatggtggctgtctaaacataaacaaggaccattggaaacaatatggcataaatggacttggataggcacgaagaaataacagaaaaaaaagaaatagcactgactgaaaaatagactaagaaagcaggccacgaaatacacataactacaaacgaacaacttacgaatatgaaactgaacgtatcactctaaagcatcaacaaaacatgtgtatccgcagcctgcgggttgaaattgagatgatgtcaatacaacaagattctcgcaagaaggattagcaagtggacttaaagaatgcaaaggaaatgaaagaactgtgccaagttggggaaaaagcccgaaaatagacagaatcagggctatgtatagagaaaaagaagcgcctccataatcttcgaaaagaccatggaggcgctatttagtatttatctttcgttatctatatctgaaatttcagaagaaacaaaatcagatacccaatgatttcttcactgcttcaatcttttccattgcagcagattcggcagaagcataacaattgcggcaacccatttcaccctgaacttccatatagaacttaatcttaggttctgtacctgaaggacgaacagaaactttgctaccgtcttcagtgaaatattgaagtacgttagatggttccggcatatcgattgcagttacgttacctttatcatctgtctgtttcagtgtcttataatctttgctcaagatcactttagagccacccaattctttcggaggattggcacggaagttctccatcatagctttgatttcttctgcaccgctcttacccggtttcactacgtttacagtaaactctttagagaatccgtattctacgtagatatccagcaacaactgatacaaggatttaccattatcttttgcccatgcagcaacttcagcaatcaaacagcaagctgatacggcatctttatcgcgaacgaaatcttcggcaaggaatccgtagctttcttcaccgccaccgatatatttctgtttgccttcacgcagacggatttcacgggcaatccatttaaatccggtgtagcagtcaagcatttcgatattgttcttatctgcgattttcttgattaattcagttgtaacaattgtcttcacacagaactcgccacctttaatcttacccagttgtttgtactgcgtcagaatataataaaggtacatcatacaggtctggttaccgttaatcagtacccattcgcctttatcatccttgcaagcaatacccacacggtcagcatccggatcggaagccataacgaggtcagcatcaatttctttggcaaggtttacagccatagaaagagcttccgcgttttccgggttcggagatacgacagtcgggaagttaccgtccttaatcatctgttcgggcacagtaaatacgttttcgaatccccacattttcaatgcacgaggaatcaacatcatacctgtaccatggatcggagtatagacaatcttcatgtctttgtgacgggcgatagctgccggatcaatagaaacagttttcaccatatccagataaaccttatcgatgtcttcaccgataatctgaatcaaatccggatttccctggaatttgatatcggcagcagaagcaattgcatttacttcgtcgatgatacccttatcgtgtggagccaatacctgtgcaccatcgtcccaatatgccttgtaaccgttgtattccttcggattgtgagaagcagtcagaatgataccgctctggcaaccgaggtgacggatggcgaaagacatttccggtgtcggacgcatgtcgtcaaacagatatactttgataccattggcagagaaaatattagcagaagtttccgcaaacaaacggctgttgttacggcagtcgtgacctactactacagaaatctgcggcagatccttgaagttcttcttcagataattggaaagtccttgagtggcagcacctactgtataaatgttcatacggttgctacctacccccatgataccgcgcaaaccgcctgtaccaaattccaaatccttatagaaagcttcaattagttcggttttatcatcgttttccaacatacgtttcacttcagcctgagtttcagcatcataagctggggtcagccatttttcggctttctcagtgacctgtttaattagttcctgattttccatttcgattgttatttattggttaatgaattattcattgctattttcttgagcacacaaatgtaaaataataagtttacaattcctagttatttaatggataattatcgattatccattaaataactatttcactaaatatctgtcaccggtttgtttcacatactcctgcaaaaactctttcgggtatccgggacgaagcactcctgcaggttgtccgatagaattacgttcaaactgtccgtctttcatacgcttcactaccccatcgttgtactttacaatcaggaacgtacccaattgcttccaagtatcaaaagtactttgagctgtcatgttagtataatttgtcaggaaattgattgctgcatccttatccttttccaatagtttgactgccatttcttcaataccagcctgtgctgtgttgaatgtgctttccatctctttctgtgtttcccgcacatccccaatcatcagatcataacgcggataaaccatattggacacccaattgaaaatccagaaagcagaattccatgagaacgtaatgtagtcggcaccatccacacgtgtataacataccggcaccttagtagcgcaacaataaacaggagtaaatacagtcatattcgcatcatccacaccaaaccaaagtactccccctaccggatccggcatatgagcacgcatctgtgcaacaaatacaaaaccgctctgttgagtagagataggacgttcattgaaatattccttatcatcgactttaaagttcagaggagaaaggcgatagggtgttttataaggaccggctccaaaatcattggagatatcaagcggagtaccttcgtaatgatcgcgcatcatatttttcacatcctgcacggataatttctgcttcggcttaacgaaaagcggcatcggagtatcggtttttccttcgatataaggaagatattcatttcctctatcagtgaatttgttgaaataactccatacacgagcttcacaaaagcgacgtgcaccaaaatcaagaggggcataagccaatgaaaaactaaaatccttgtttactccattaaaatatcccttctcacgggcaaaagaaacgacatccggagagtacctacagttttccttatcattcatatcaaactgatgaatgcgcgcttgattagcatgagccgagatacaatcgtccggcacacggacagctacccaaaccgctccgcgaatgccgggacctttaccaatcatctccataatccatacttcgttcggatcggcaatggtaaaagattcacccccactataatatccatattcctgtaccagatcagtcataatctttatggcttcgcgagcagtacgcgaacgttgcaatccaatataaatcaaacttccataatcaataatacccgtagaatccgtcaactcgggacgaccgccgaaagtagtttccccaatagtgacctgatattcattcatattgccaaccacattataagtctgacgagcctgctcgatttctcccagatatttaccggtgtcccattcgtacactttcaacatggtccctttcggatacgtagctgccggataatgataaagttctccgaataagccatacgagtcggctgaataggaaacaatggtcgaaccatcagcggacgcattttttccgacaatcaaattagtacaggcgaaagtattcgccacagccgtcatccatacggcaaaacacaaaataatacttctcttcataatatatcattcattttttataattaccagacaaaactttcacgggcaatactcgtattcccgcaatgatcgacaaccgtaaattcaacagtatgttttctccctttcttcacacgcttcggatcaagtttgcattcccaataagactttacaatattaggccgtccgaaaagtgcatattttccgtcaatcgttccccgataagaagcaatgccacttcctttatctttcaaccgatagactatctttccattccttccccactgattcttattgacagggataatttccggtggaaccgtatcaacagcgacagtataagtccccaattcacgaatagacgtcttcatgtatccgtcttcgtattttcctcctacactgtacttacttcctttcggagtaacccgtgccacataatacttggccgtatcagcaaccgttttcctacgcagtccgatacggagttcacaacccgcatgaagcggaatggatttatcattaatctgataggtgaacgccactgccccactatcggcttttacctgataattgagcggagtatttttatataacattcctttcggaaccaccaggctcaatcccggttcttgcagataattggttttatcccaagtaaagaaatacttttcccgataatcgaaaggttcaatcggctgctttcgcccacgcacgacaaagctatattttgaagtatttccaaaagcgtctttcaaaatatacagaaattgataatccctctcttcgtcaatcgtgaccagaccgcgattttcatttgaggctttcagcaaacgcaacgtatttcccggatcgataaaagatttcatatattgcccgtacgtccacgaattgatcatccggttttcctcttgagagaaacggtctactgtactacggaacacctcattaccatccaccgtaagaataacggaatatactccgtaatggttgtttacgccatccatgtaatcgtatgccttaatgcccgtacctatcaccccccacgcctccaccggacgttcgctattcgggagtatcgtttttatctcttgttttccgtctaccactccctcaccgggctgcggaaaaaacataataccatcagctttcggagcacgtgtatcctttatttttgatttaaagaaaggcataggatctatataatctcccgattccgtttcaaacatatccaaatgaagatgcggaccgaaagaatatccggtattcccgctccaagctatctgctgtccgctttttaccggatattcatccggttcgggaataatctcaacctcccagctctcattcccatattgaagttcctccaccctttcggcaatgggagaaataaaaccgctcaaatgccggttaatagtagaatatccattatgatagcagacatcaagcacataccccgaaccgttagtcacccgaatacgcgagatataaccatcggcaagggcacgaaccggtttgccgaccacacctcctgttttaaaatccaacccgccatgaaagtggttggaacgaatttcaccgaaatttccgctcaatgtaagaggaaaatcaaaagggggtacaaaagtcgcttgctttttttcctgcccataacctccgatgcagccagccaacatcaaagcagtgatatattgttttatcattccattctcttttttacttccggcaaatgtacactattccaactaaattacgaaatatccagaaagaatgatgcaataagagactagttaataattcttttattattagattcattattggcttaaatccattatatttgtatttttgtatccgtttttttaattataattaaatataaagaactcaatgagaatgtatgtaagagtaatggcagcggtcattgcatgtatattgctgagtggagaagccctttcggcatttgcaattacccccgctacagaaaatctgagttggtttaagaagaaaaagaaaaaaccagaagagagagaagagaagagtaaaagtgactacgagaaactagtggaaggcagcaaaacgacaaaaggaatgtttgctgtacatcaaaagaaaaatgatttctattttgaaattcctaccgcacttttaggacgcgatttattggttgtcaataaactgcaacgggttccagccgaattgaatgaggcaggtgtgaatcgtggagtaaactacgagaatcagatggtttgcatggaatgggacaaagcaagtggcaaactgatgttccgccaacaacgcccgttacctcttgcgccccgcactgacgccattttccgttcggtacaagataattttatttctccattgattgccgcattcaaaatcgaagctgtcaatgccgattctactgcattggtaatcaaagtgaatgatatttatgacggcacggaaaccagtattaataatgtgtttaccaatatcaacctgggcacatcggctatcaaaaatttatcacgtatcctgtctatcaaatctttctcaaacaatgtcgtggcaacttccgagctgacaaccagagtgacagaaggaactacaacagtgtatgtgacagtggaagtcagttcttccattcttttattacccgaaacgccgatgatgggacgttttgataatcagaaagtcggatacttcaccaaccctttattgaactttagcgacgcccaacaaggaacggacaagacacaatacattacccgttggcgcatggagccgaaaccggaagaccgtgaagcctatctaaaaggacagattgtggagcctgccaaaccaatcgtattttatattgataactcaactccctaccaatggcgttcgtacatcaaaaaaggaatcgaagattggcaggtcgcttttgaaaaagccggtttcaaaaatgcgattatcgccaaagaaataacggacagtatgcacgtagacatggatgatgtcaattactccgtgctgacatacgctgcttcggaaaagaaaaacgcaatgggaccttctcttctggaccctcgttccggagagattctggaagcggatatcatgtggtggcacaacgtgctttctatggtacgtgaatggattacggtacagaccggaaccgtttgccccgaagcacgcaaagtacaactgcctgatgacttgatgggagacgccatccggttcgttgcctgccacgaagtaggacactcattggggttacgtcataacatgatgggatcgtgggctttcccgacggattcattgcgttccgaaacattcacttccaaaatgaattctactgcttcatccattatggattatgcacgcttcaactatatcgcccaaccgggagacggtgtgaaggttctttctccacacatcggtccatacgatatgttcgctatcgaatacggttaccgttggtatgggaaaaatactccggaagaagaaaaaactctcttatttaactttttgagcaaacacaccgaccgcctctataaatatagcgaagcacaagatgttcgtgacgcagtagatccgcgcgcacaaaatgaagatttaggtgacgacccggttcgttcctccctactgggtattgaaaacctgaaacgtattgtgccacagattctccaatggactacaaccggagaaaagggacagacttatgaagaagcgtcacgcctctattatgctgtcatcaatcagtggaacaactacttatatcatgtactcgccaacatcggtggtatttatatcgaaaatacaactgtgggagatggcatcaagacctatacattcgtagaaaaagagaagcagcaggccgcacttaagttcctgttaaatgaggtattgacctatcctaaatggttgtttgacacggaagtgggacagtacacctatcttctgcgtaatactccggtgggaaaacaggagaacgctcctactcagattctcaaaaatgcacaggcttacattctttgggatttactgggcaacaatcgcttgatgcgtatgattgaaaatgaatccgtcaatgggaaaaaagcctttacggtagtagaactgatggatggacttcataaaaatatttttggagttaccgaacggggaggtgtccccaatgtcatggaacgttctttacaaaagaatttccttgatgcattgctgacagccgcagcagaacccgaagcagtaaaaatcaacaaaaagattgccgatgagcacttcttgcttgaccatgccactccgttctgtagttgttatgcagctgaacaacgggcacttcgccaggaagaccgcatgggagctccacgtgtgctcaacttctacggtagccagcttaaccgcatctcagatgcaatctcagtaaagcgcggtgagttgttacgtatcaagaagctgttgcagaatcgtctcggaacttccgatacggctacacgctaccattatgaagatatgattttacgaattaacacagctctaggagtcaaataaaacaaatcaatcactaaacatttacaattaatgagaaaaagacatctttgtattttgatatgccttttcgccaacgcattgttttttgccaatgcagcaaatcgcactatcaccggaatcgtaatctccggtgaagataatgagccactcatcggcgcctcagtttacgtatcagccgatgaactgaaaaaagccggagtaccacaaacatctctaggtacgattacagatatagacggaaagttttccttgtctgtcccggaaaaagtaacccggattcattgtagctacatcggttttgaagaacaaagtgtaccattacagtctggaaaagaaaattaccatattgtacttcaagcctcatcacatacattaggggacgtagtagtaaccggttatcaagagttggaacgccgcaaactgaccgcctccattgccaaagtagatgttacagatgcaatggtaggtgccgcaaaaagtatcgaccaggcattagccggacaaatagccggtgtatccgttacgacaacctccggtgctccgggtgcccccgcacgtatccgtattcgtggtacagcgtcgttaaacggaacgcaagacccgctgtgggtgttggacggaattccattggaagggacggatattccggacttagacagtgatacggataatgatattgtaaatataggacaatcatcaattgccggaatcagtccgtacgacattgaaagtattacaattttgaaagacgctgctgcaacagccatttacggtgcacgcgcagcaaacggtgtaattgtaattactaccaaaagaggacgcacaggtaaacctatagtcaatttcaacacaagattgagttatacgcccaatttgaatacttcgcgattgaatctattaaattccgaacagaaagtcaatttggaattggaattgatgaaagaaccggatgacatattcactgcccatcctttttatcgcaagggaggagtcgcttctgtcttaaggcaatacaatttatttgaaacttaccaacagcaaggatgggacggattaagcagtgaggctcaaaacgctatcaaccgattgaaaacaattaatactgattggaacgacctcttgttcagaagtgcatttacccaagaatacaatttcagtatttcaggaggtagcgaaaaaaccacctattacaattcattaagttactctaaagaaaatggtaatgtaccaggtgttgatatgagccgttttaacctgacaagcaaaacctcttatcaggtaaaccgaatgctaaaaatcggtgcttccatatttgccaaccgacggaagaaccaagattttgtaagtgacaaatacggttactcaaatccaatttattattcgcgtgtggcaaacccatatcaggaaatatacgatgcggaaaataactatatctacgactacgatatccgctcgacaagtgataacgaaccggaccccaaacgagggttcaatatccttgaagaacgtaacaatacgagtaaagagacagtgacaactgctatcaattcgatcttcaatgttgatttacgtttcaatgatcattggaaagtgacttcacaagtcggattgcaatgggagcagtctaaagttgaacaatatatcggtccaaacacattctccatgcgttatatgcgcgaagagagcaaagatggagagagctatattattccggaaggaggaatgcataaagtaagcaactccactacctcgcaaatcacttggaagatacaaggcgaatggaaccagactttcaaagatatccatgaggtacaaattatgggtggttcggaaatacgcaaaaattggtatgatgcacttgcatccaccgcttacggttatgatcctaagacactcacaacaaagccacttaacattgacccgagagacgctgacgattacccgctgcacataaaatcttatacagaaaacgcttttgcatctttctatgctaacggttcctatacacttatgaaacgctacacattaggagcaagcgtacgtatggatggctccgatctattcggggtagacaagaagtaccgtttcttacccatttactctatcagtggattatggagaatctccaatgaggcattcttgaaaccggctaatcaatggatggataatttagctttgagattatcctacggtctgcaaggtaatattgataaaaatacttctcctttcttactcggtaattatagtaaccaaacagtaattgataaaaatgagacaattataaccatcggttcagctcccaacgacaaactacgttgggaaaagactgcgtcttacaatgccggaatagatctctccgtactcaaatcagccatcaatctcagtatagactattattacagaaggggaagtgaccttatcggctacaaggacttgcctttggaaaacggcttctcctcacaagcaatcaattgggccagcatggagaacaagggagtagaaataaacctacaaacccgtaatataacaactaaggatttttcttggtacactacattcaattttgcttataacaacaacaaagtacttaaagatcataaaaaggaaaacagcccgactccaggactggaaggttacccagtaggtactatttttgcaatcaaaagcaaggttgatccggaaacaggacgcatacttatctatccaaaaggaagcgatgaagctgttactgttgaaaaattattcgaaatggtagacctaaccggaggacttggaggcttttatgagtatgatgcgactgcagaattccaacaaagcctatacgaatatgccggaacaaatgacgctccctacacaggtggtttaatcaatacattcaactaccgcaattgggaattgaatctcaacttttcatattactttggtgcacatgtacgtacaaatccttcttacgatattgtcggatttgaccccggacataatacaaatcaggatatccttgaacgctggacacccgaaaaccatagtggaaagtttccggctttactcacaaaaaataattatcctgccgattatgcacttttcggtgatctgcctgccatttataagaaccttgacttatgggtaaaacgtctcaactatgtacgcctacagaatataagactagcatataagttaccgcaagaatggctccgtaaaatcaacatcaacggagcgactgttgctgtagaaggacgtaatctattagtttttggctctagttataaaaactatatggacccggaatcaatgagcaatctctattccactccggtgcccaaatcagtaacattcaacctcagtcttaatttttaagtaattctccaatatgaaaagaataaaatcaatatacagatttcttgtattgacaggttgcattgtcatgacatcatgcagtaactaccttgacatacagcctgtcggaaaagtcatccccaacactctagaagaatatagagcattgatgactacggcatactcaaaagaccttttagacaggagtgtttgtgatatgcgtacaaaagacatcaccgtaaaaaaagacaatatagaccaaaataattacggtgatatagaaaaatggataaacaatagtacatctgccagagaattcggctggctagattattatgaaaatatatattatgccaatgctatcatcgacaagcaagatgaaataacggaaggaagcgaacaggacatcaaccaattggtgggagaagcctatttaatgagaggatatatgcacttccttttggtcaacttctacgggcaaccttacactaaagagggtgcaccgaagacaaaatccattccattgaaactaaccctcgaccttgaagagattccatcacgcaatacagtagaagaagtgtatacttctattcttgaggacatagaaagcgcacgcaatctcattacaaaaaaagaatgggaattaggttataattacaggttcaatactctttccgtagatgcttttgaagcacgggtacgcctttacaaaggagaatggcaacttgcatacgatgcagcagaacgtgtcttaaaacaaaaagcgacactcgaagattacaataatccggatgccaaagccaatttatatacctctgttgaatcaattactgcgtatgagagaatttatgagccaaccagcacattagatgcatcaaaagctacacaatcatttgtagatatgtttagtgaaggagatttacgccccataagatatttcggagaaaaggacaatgaagttgattattatcccataattaaaacaaacggaagtgtagattataaatgtagtttccgtgtcggtgaactttacttgaattctgcagaagcagctgcccgtctaggtcatttaccagaagctagaaaccgcttattacaattaatggaaaagagatataatccggaaaaatatgagctgaaaaaggatgagataaataagatggaacaagagattctaatttctgaaatattggatgaacgtgcccgcgaattagcattcgaaggtcatcgctggtttgacttacgccgtactacccgtccgagaatagaaaaaactttatatagcggacaaaccatcattttggaacagaatgacgaacgctataccttaggcattcctcaaagtgctattgaagctaatccgaatctctccaattagagttgttctgatattcactataaactccctttgcaaactcatcagcaaagggagttttttcattgtatcatatttattctgctatttcaaattattattgaagaactgttctatcttatcgaatgggattacttgcagattatcgtacaaatctacatgattggctccgggaataatcaataatcccttattgtcacctttcagtttcttgaacgcatcctcactaaagtagcgggaatgagccttttctccgtgaatcatcagcactgcactacgtatctcgtcgctataggacagaataggcatattgataaacgaaagcgaagaagtcttattccaaccatcattagaattgagtgaacgtttatggtaaccgcgttcggccttgtaatagtcgtaatattctttcacaaattgtggagcatcatccggtaatggatcaatcacccctccggcaagtgtataagaaccatcgcggtagtcttcggttctctgagcattgagttgcttgcgtaattcataacgggcggcagcatccattatatcattgtaaccattagcattcacacggctcatgtcatacatcgtaaccgttactgttgctttgattcgagtatcgatagccgccgcattgagtgccataccaccccaaccgcaaataccgagtataccgatacgatccgtatccacatcgtcacggttggcaagataatccaccgctgcactgaaatcttccgtattaatatccggtgaagccacataacgaggctcaccaccactctcacctgtataagacggatcgaaagcaatcgtcaagaatcccctttctgccagcgtttgagcatacagtcccgaagattgttctttcaccgcaccaaacgggccgctaatggcgattgccgacaatttaccttctgcatttttggggatatacaagtcagcagcaagcgtgataccataacggttgtgaaaagtaactttcgagtgacgtactttatcgttttcgggaaacgtcttgtcccactcttgaatcaggtttaatttcttttccgtaaacttattatttctgtcagaaagattacctgcagacaacagcttgcctgcaatacaaagacatactgtcattactacacgcgaaaagttcaatgttcgtctcatacattctattatttatgttatcaatcatttttctattcccttttaggaatgttgcaaaattagatagatttatgcctaaccccagtagacaaattactgatactacatctcaatcataacctgaattacagattttataatactgacgaaagctgtaagtaaggtggaatccgtaactgaggttatataatccgtaattaaggttgttagaatgacagaattatcccgtatttttgtaaacgatatacaacggaagtgcttttaaaacattaaacagcaataattatgaacaagatattcaacttaggcagtgtagaccaatacaataaattatacggccttgaaactttgaatccgttggtcagtgtgatcaatttaaataaagccacccggcagatgaattatgcacactggcattatggtatctatgcactttacctgaaactcgaaaaagcgtgtgacatcagatatgggcggcaaaattatgattatcaagaaggaaccattgtatgttttgctcccggacaggatgcggaaacgacattgatcacagatcgcgtgcaagtgaatgcgcttggcatactttttcatccggatttattactaggaacatcacttggcaagacaatcaagaaatacacgttcttctcgtatgaagtaaacgaagcccttcatctttctgaagaggaacggaatattattatggattgcctgagaatcatccgccttgaactagagcacggagtggataagcatagtaaaacattgctcgtaaactatatagaactgctccttaactactgtatgcgtttctatgaacgacaattcgtcacccgcagtaaagcgaaccatgatgtgttgacacgtttcgagcaattacttgacaactacttttcaggaacttttgcagaacaaaacggcttacctactgtcaaatatttcgctgacaaaatatgcctttcccccaattacttcggcgatatggtaaagaaagaaaccggcaggacaccacaggaacatattcaggaaaaagtaatcgaaatggcaaaggaacgtatgaccggcacagaagatacagtcagccagattgcctactcattgggattccagtacccgcagcatttttgccgcctgttcaaaaaacgggtaggatgtactcctaacgaataccgtgtacagaataatctgtgaaaagaatatgaagaagaaaaatacattggacttgaataccgtgcatgaatgcaatcgttgtctggactgcaaaacattgcatcctcaggtgagtcttattaatttggagaatccgtgtctggagcaggatactgtcaagttcgagttctacgctatcttactgatagaagactgtccggacgaatgttcatgttgcggccggaagtattatgattattccaatgcgacaatggtctttcttaagccgggtgaagttttccgaatgagcaaggaaaagaccttacccagcaaaggctttttgctggtgtttcatccggacttgctgtttcagaccacattgaagaaccatatcaataattacaccttcttccactaccacaaagaagaggcattgcatctatcacaacgtgaaacagagaaagtcacctgctgtctatggaatatagaggaagaactgcatcattcgattgatacacatagcaggactatcctttcacggcatatcgaactattactggattactgcacttgttactacgaacgtcagtttatcacccgcgaaaacaggaataaggcaattctcagaaaaatggaacagttacttgagaattatatagagttggggaaattacaaaatggcaaacttcctacacccgactatctggcggaaaggctcaatctttctcctgtttattttacagacctgctgaaatttgaaacaggcaagactttggaacagtatttccaactcaaacgattggagactgctaaacgaatgctgatgaaagactgtgccacacccactgccgtttcccgtcaattaggctatccgaatgtacagcatttcagccttatattcaagaaaataacaggtatgtcaccaagtgattatccaaaacaggtgaattaaaactactcttttttcatatttatcctccaaaagcattgttattcaacaagaaaacaatatctttgtttccacttattacgattaataacgtagaagcgtttagaatattatctctgttcagaatctggtaaattcattaacggtgggataatggcaactaagcgttcacgtctttgttatatgcaagggcgtggactctgttgttcattcaccgttaggcttaccagagccctgaacaggatgaactaacgacgtccacgcttcttttgtatatatacggtatccggacgcatactaccacaacaaacaatcgtaaaatgaacaacattattacaaagttttttgcatctttattagcctacagggtagctaataagaaaaagcgtttttcggcaatcggtcatttctctgagggattagctccggccagaggtaaaatacaatggggatacatagacaaagaaaatcaagaaatacttccttttaaatacgatatagcagaacccttttataacaacatagcccgagcgggtctctatggaaaaagcatgaaaatcaataagcagggcagcgaatgtctgtaaccaaccactccggcattcatttcatctcagcctacagccttctgccttaacgctcattttcaccacagattacacggatttacacagataatagatattgatatattaaaatctaatctgagaaaatccgtgtaaatctgtggtgaattatgatacagcctttactagaaatatttcttctccgccgcccgttgccaagcctccaccaattctgtcatgacttccgatactgactgtctgcgggatataatggcggatacttgaccgatctccagctcaccctcttccaaatcaccttcgaatatgcctttcttggcacgaccgcgtccgagcaaaattcttaattcttcgggagtagcaccactatcctccgcttcctccacagcttcccgaaaagcattcttcaccaaacgtgtcggagccagtttcttcaacagcaatttcgtgtctccttcacccaaactcaaacaatagtctttgaataccggactggcagagctttcttccgtcagggcaaaacgggttccgatctgcaccccttcggctcccaacaccatagctgctagaataccttcacccgtaccgataccgcctgccgcaatcaacggcaatgtagtagcttcacgcacggctggaatcagacagaaagtcgttgtttcctcacgtccattgtgcccgccggcttcaaaaccttcggcaactaccgcatccactcccgcttcctcacatttcactgcaaaacgggaagaagaaacgacatgaatcaccgtaatgccacgttctttcaaccatcctgtccacgttttcgggtttcctgcagaagtaaagacaatctttactccttcctccaccacaatattcattatttcttctatctgaggatacatcaaaggaatgttcaccccaaaagaaaatttcgttgccacacggcatttacggatatgctcgcgcaaagtctccggatgcattgaaccggcaccgatcagtcctaagccacccgcgttactcactgcggaagccagtcgccaaccgctacaccaaaccataccaccttgaataatgggataccggatccctagaagagaagttattctgttcataataaataatgtatcaatacatttatataacgattttaccgggtaatctgttcgataggtttatttatcaacacggtagttgaatctccgtaagttttcaacacttctaacgtgcggatacggttatctcttcctgttttgttccagaattctttcgtaaaggcagccatcaaatcaagcccgctaatagttccgccacaaactgagacatcctcccctatccgtatttcattcgctttccggttacgtgtccggttcgtatagaatctctgccgacacagttcgtagaaagaatctccccgccatgtattcttgttcactctgatctttttctgataaacaggatcccagttatagcgggtatttgccttatacggcataagagtcaacacaactttcggtttaggcagtgcttcgggaagcgactcatcgggcaacatccaacgcttttcctccgacatacggggagtacccaccgcaccaccgaaatcaatctgcttgaccgccttcggattcagcttcagttcctcactgccctccaacaacttttgcagtttgagcgaatcttgcgcagaccattgggcatagcatacccctgtcagcagcagtgagactgccgatataaataaacgtttcctcattttttattgttttttatcttccgaaggctctctcctttttaccaccaacgatagcctgttccacaaagtggctcatcgtgacacgggtcaatcgtccaccgggttttaggatattgccgttcctcccaccagctacggtaacaggcagctgcatcgagcacttcctcatcggtcaggaaatagatggcctcataattttcagcatttgccagcaccatcttgcagcctaacgacggaggtgtaccttgacggatatactcaatcacccaaagcatacactcacccaaacggatcttaccgttgttcgtattatagaccgacggaaacgaaggaataattgtcagatcttccgcatatttcaaaagttcgggaatatcctcctccatgaaatgaggcacttccaccactcctttatcattcttcattttatatgtacccgccttcaattgtttcacaaagagatcaacatccggattgttataatccatttcttcgctactgcatcccgcaaaagatacaatcaggcaaacagccatccacagcattaatagtgtttttttcattttcataagggttaatacgtcatgcgaagtccgcagagcaagttaaagttagtcggccgcttcgtgcgtaccgtagccagtttcgaatcggtactgaaatgatgcgaaacaccgggctcggcaaaaaccgcaagccggtcattaatcttataattgattccaataccggcagttaccgccaattggacaggttcttccttaaaactgttatccgacgcaccggctatacatttatccgccactccgcctacggtagcataaaggtctactttcttcgtatctaccagtgtcacgtttacccgcacgggtatacccagataatgtaaatgctgtccggccgaacgaagatttgaataaagcagtccggtttctatccccagatagtcgttcaactttcgttctactgttactcctgcggaaacaggtatcttgtaagtaccgtcctctgccggaagcgccatgcctacttgagctttcacagcccagcaacgtttcttcattattttctccgaagtcacaggtaaatccgcccgttcttcctcccggccgacagaagtttccgtatttccattcgctgcctgccaataaccactatggcgttcgttaccgtaagggcgctcatgccctgtagccgtggacgagaaagagaacgacatcgagaaagtaaaggcaagcgagtcctcatcttccgtatattgcgacaacattccgaatgactgaggagccggtttctgcaataccggttctaccggcagcggcagttgattgacacgtatcccgtctccatccatctgccctccattcgtcgcggctatcttggtaaacgcttcctccatctcttctttaggtgagaaatacaggaaagtggccgacgaagctgccagaacaagcagtacggacgccgcagccgccacacggaagagcaggagccgacgacgatgttgacaagccacaggaatatcctgcgaaagctcttcccaaaaaccatcccgtacattcatcccggtatcggcgagacgtgcgcgaaacagatcggttatttcatcattttctttcttcatggttcctatactctttaattctttttgctaacaaatatttggcccggtgtaactgcgaagtagacgaatgctctttaatacgaagcagcttggctatctccttgtgtgacttctcttcaaacacataaaggttgaaaacggttcgacaaccatccggcaattcggcaacaaatgtcatcaattgctcttcggagatacctgcccctcctcccgaatctgatatatcggggatatcgggaagttgctcttcatgcaccaccaactgatttacccgtttctcccgccgcaggtaatcaagtgcttgagtcaccatcactcgggttatccacgtacagagcgaagactcgccccgaaaggagaaattggtaaaaatcttgatgaaaccgtcatgcagtacatcgtgcgccacatccatatcacccgtatagcggaaacataccgccagcatttgtttggaatagagggtgtaaagttcctttcgggctgaatcctttcctgcccgacagccctttatcagttctatctcgttttccaaagtcaattacctttttaaaatcggacgtatgtctgcgtcgttttactcattagacgcaagaatttgaggaatgctgcaatggatattgctaaaagaagttaaacagattcaccacagaggacacagagtacacagaggatttaaacttactttataggaagaatttcctatcattattcctctgtgtactctgtgtcctctgtggtgaaaaaaatcagcacgctttgaagctcatgtccagtcctttcacggaatgcgtcaaagccccgacggagataaagtcaacgccacattcggcataatcacgaagagtatcaaaggtgataccgccggaagattcggtttcatacttgccagccaccatttctactgcctttttagtcatttcgggagtgaagttgtcgaacatgatacggtctacaccacctaaatcaagcacttgttgcagttcgtcgaagttgcggacttctatttctatcttcagttctttacctttttccttgcagtattctttggcacgggtgatggccttgtcgatacctccggcaaaatccacatgattgtctttcaacagaatcatgtcgaacaacccgatacgatgatttacgccaccgccaatctttactgccatcttttcaaggatacgcataccgggagttgtcttacgggtatccaatacgcgggtatgagtgccttcaagtttcttcgcatatttgcgtgtcatggtcgcgataccgctcatgcgctgcatcacgttcaacatcaggcgttcggtttgaagcaaggactgcaccttaccttccaccaccattgccacatcacccggcttcacctccgcaccgtcattgataaacacttcaactttcatcgtcgggtcgaaacgattgaagatttctttagccacttcgataccggccagcacaccgacttccttgataagcaattttgattttcccattgccgtagcgggaatacatgacagggtggtatggtcaccatcacctatatcttctgcaaaagcaagatcgatcagtttgtcgatcagttctttttccttattcattgattttgtcaattcttatttggtgtattaaacatttatcctgtacttttttcagaaagcagttcacacgaaagtttccgttcgttgtggccaacgtaccgataacgaaacttgactcgtcccgctttccctgatggttcactgtaaacccattgactttattcttcgtgaagaagtcttgcatcacagcggtcgctttctgtttgtcaacgtttgtcgagctaccttggagcaccaggtttaccttgtcccccatatacttactcagctcttgtgagcttcctcttttaaatgccgtaatcactcctgccggtatctcctgcgccattagcaacgagaaggaaagaagcaaagcggccattcctacgagcactcgttttttcataaatacaagcttttaagttgtagtttaaagacttaaactttcaactaatgataggcaaaggtaagcattaattgcagaataacataaaaaatgcctatttttgtgcaattaaatacaattgcaaagatatgaaaacaaccttgctcgtcgtaggacgaaccgtagaacagcattatattacagctatcaacgactatatacagcgtacgaaacgttatatcacttttgatatggaagtgatccccgaactgaaaaatacaaaaagtctttcgatggaggtgcagaaagaaaaggaaggggagctgattctgaaagcccttcaaccgggtgatgtggtggtgttattggatgagcacgggaaagagatgcgttcccttgaatttgccgagtatatgaaacggaaaatgaatacggtaaataaacgactggttttcattatcggaggaccgtatggcttttcggaaaaagtatatcaagcggcacacgaaaagatttcaatgtcaaagatgactttctcgcaccagatgatccgactgatattcgtggagcagatttatcgagctatgactatattaaatggagggccgtatcatcacgaataaaaacatagcctgtcatgttaaaagagtcaatctgtttggctgatttcaaataaaacagtttctttgtaaagaatataatggataatatgcaagaaagcaaggattacatatcaaaactatcccaccacttgttttgggatatagacatatccaatgcagacatggacaagactatcgaacccaatactttggaattgctaaaaaagcttccccaataagttgtaataaaagggaaatatcatttatctccctttttcttccaaatacaatttatcagttactcccgattcatcaaacgatgttccgccatctgttcgaactttgttcccggacgaccgtaattggcatacggataaatggaaataccaccacgtggagtaaagattccggttacttcaatgtatttgggattcatcaactttatcaaatctttcattataatattcacacaatcttcatgaaaggctccatgattacggaaactgaaaagatagagtttcaagctcttgctttctaccatttttatatcgggaatgtagctgatacgtatttccgcaaagtccggctgtccggtaataggacacagacttgtgaactccgggcagttgaaacgtacccaataatcattttcaggatgcttattatcaaaggcttccaatacttccggagcataatcttgcttatactcggtttttcttcccaataaggaaagctggtcttttaattcagtcattgcacttactagttacgagctctacactaaacaaaaaacgtattttctctatcacctatcaccatcaactcccagcccacgtttgctttatcctcatcttacttgttacggtgtgtttcacggcatgaaacagaatgtttcacactggagaacagatagtttcttacggcagaaccaatagtttcaagcgccggaaactttagtttcatgccactgaaactttagtttctcactgatgaaacaacagtttcaagctgttgaaactaatttaaaccaccgcttatcggacaaaactaccgtagatacaaagcttactatcatttgctagccggagcttaccggtgacaacagatgtgacaacaaaacttcaaatttagctgctgtcactgcttgctgtcacaagatatacaatttataatcaattgtttatctataagaatgtgacagatgacagcaaaaaatacattttaatctctgtgtagagatattattgattcttactttttaaatacttctccaatccttcccgacgcaacttacaagccggacaatgtccgcagccatccccttgaacgccattatagcacgtcaaagtctcgttacgaatcaactccaacacacccagttcgtcggccaaagcccatgtttccgctttatcaatccacatcaaaggagtatggatcacaaattgttcatccatagccaagttcaacgttacattgagagacttgataaaggaatcacggcaatcgggataaccgctgaaatcggtttgggaaacccctgttaccaagtggtttataccgcgttcacgggcatataccgctgcaatgctcagaaaaaacagattacgccccggcacaaaagtattgggaacagtatctgcgggcttttcctgatccatcaccattgtagtgtcagtcaaagagttatgtccaagtcgcccgacaaaagacacgtccatcacatcaaattccacttccgctttccgggctatctcccgtgcaaactccacttctttctgatgtttctgaccatacaggaaactcagagcatacactttcttaaagttgcgttttgcccaaaacagacacgtagtagagtcttgccctccactgaacacaaccaatgctgcttctctattcataaatctatcttaaatatctttgattttcagtacattgtaggatatatcggtatcgtaaacatcgctaccatctatttgcttaatagctttcaccacacggatagttaccgggaggataatcacttcgtacatggacttcagcacaatctgaatacccatcataataagcaactctttccaagcgatgattcctccgaaagccaccgggaagaatatcaacgaatccgccgtttcacctacaacggttgacaaaatggcacgagcggaaaagttacgcccttgactggcaattttcattttgctcatcacatacgcattgaggaacgagccaaccaagaaagccatcagactggcagctacgatacggggagccataccgaatacaaaatcgaaatgttcttctccttcccaaaaaggggcagccggaatggctacggctatcagcccgagagtgacaacaaagaaattcatggcaaaaccgctccaaattatcaagcgggctttcttgaatccccatacttcggcgatacaatcattaataatataagaaattgggaaaaccaacaatcctgcagtcacggtcagactaccaatctggattacttttgtctcaagaagattcgccgcaataaggcatacattaaataaaatgcccagcagcataaaaggtacggatactttttctttcataattcctgttttttacgtggtgttctagaatacacgaccgctattcacggcatcatactttattttatctttcggggtgcaaagatagaaaataaaactgaaacaagcgcatcaagactgccgaattctattatccatatatagaaaaacaggcacaccactcaaaatcaagaactttactttaagcagagaagtctttaagttcctccttcagccgtttgcggataaaaaataaacggctctttaccgttcccatcggcaaccctaacttgtcggcaatctcccgatacttaaatcctgccacaaacatctggaaaggaactttcatttcttccggtatcgaatgtatcacacgatacagatgtttcatgtcatatgtaaattcaaatctatccgcatcttcatcttcaatctgatattgttgattgatagaataattatcatccatgatattcatttcgcgaacagtacggcgatagttattgacaaaaatgttacgcatcagtgtatacatccaccccttcaggttcttactatacgtaaacttctcctgattatctaatgcctgcaacacacaatcctgcaccaaatcattggcagaatcacggtctgccgtcaacttatatgcaaagcgatgtaaatccggctgtatcgctaatattccttgagtaaattctactttttccatcgtcgtattttctttatctgattactacggtacaaagatccgtctttttagaatgattataaatagcaattcttccgattagtttggcaatttttcctttgcctctctcaaccatttctttttttagttgttctttgggcattcacctaaaacttaactgataatgaaaactagtttcaaaatggtagcaatgctactgggaatgggaattttccccctctgtgccaatgcgcagaaaaaggtaatcatcgaagacgaggaacctaattccatcatgtttatctcccgtgacaaagcaggagacgagatcatccggattatgaacgaccgttcgcaactgcgtttccatgatccgaatgctccccgcttcctgctgactgaccagaaaggaaaattcgctttaggtatcggaggctacgtccgtgcgacagcagaatatgactttggcggtatcgtagatgatgtggatttctacccggcgttgatcccgcaacgtggaagcggaaatttcgctaaaaatcagtttcagatggacatcaccacttctaccctcttccttaaattggtaggacgtacgaagcatctcggagactttgttgtctatactgccggaaactttcgtggagacgggaaaacatttgaattacaaaatgcttatgcacaatttctcggtttcaccatcggttacagttacggttcgttcatggacctcgccgctctccctcccactatcgactttgcgggccctaacggttcagcattctaccgtactacacaattaagctatatgtgcgataagttgaaaaactggaagttcggtgtcgctatggaaatgccttcggtagacggtacaaccaacagtgatgtttccatcaacacgcaacgtatgccggactttgccacttccgcacaatataactggaacagcagcagccatatcaaactaagcgctataatacgtagcatgacttattcaagtaatgtgtacgacaaagcttattccaaaaccggattcggtttgcaagcgtctacaacattcaatgtcacaaaaaaattacaagcttacggacagttaaactatggcaagggaatcggctcttatcttaacgacttgagtaatctgaatgtagatatcgtccccgacccggacaatgaaggtaaaatgcaggttcttcctatgttaggatggtatgcaggattacagtacaacttctgcccaagtttctttgtttccggaacgtacagcctgtccagactatattccgaaaacggatacccaagcggaaatccggaatcataccgtaaaggccagtatcttgtagccaatgccttctggaatgtcagcaacaatatgcaggtcggagttgaatatctgagagggtggcgtacagatttcagctcttcaacccgtcacgcgaaccggttaaatttgctgatgcagtattctttctaatttatagatataggaaaggagaggcataatgaataataaaacgcaagattaacgcgaattatcgcagattatttcatatatatagatataataatcaacaacctataaattcgtttctgtgataatccgcattaatcctgtgttttaattattcattataaacccatacacattaccggcaaaatctgtcacatacaaaacgttttccgcaacagatactgtagaaaatataggcacaccaatttggtatttccacagcaatttaccacttatacggttcaatgcatacagtattccgtcagaagccccaaagaaaacagtatctccaaccaacactggactagtctctacagttgaagatgatggtttagaataaggagatgtataaatcaaagcggggtttgttttaaaattccatttctcttctaaggtctgcttgtctaaagctatgactccattagcagctgttccaaatattatctcggattcagtaattaaaggagttgaattcacatcgaccgaacaattcatttttttacgtactataacctcaccgttctttgaattcaatataaaaaaggaacgggaagaaagaagatagagattctctccttcccaagcaacagaggccgaacgatattttaattccgcatctttattctcccacaacaactcaccattaactgcattattagcatacaaccccttccagtttgcatgcccaatcagaatattacgtccaagagaaagtgttgccacgcatccttcccccctgctccaagcttcattcttccagataagttcccccgtagctgctttcaaggcacataaggattttcctgtaccggcatatactacatccgaagcagcaaccagcccgtcattcaaaggaggaagtacaccgatatttaattttttttcccaaaccaatgtcccggtttctgcttgaatcgcatatatgtagccatgtacatcttgggcaaagaccagtccatcagcaatcgcaatactactgcgtacagagccacggagtgaataccgccaacagactgttccattttgcgcatccatacacactacagccgctttccccgattcattatcatcgaccgatgccgtaaagagacgtttccgatataccaaaggagcagacatgaaaatagaagcacctacatttttaatccatgacaaccgcaaaggcaattgtttcctttcaggcttttcataaaaaaacgaacgcctgcatcgccttacctctccattattgaaaaatgcctccactattacagtaagctgccgatgttcccattgagaaagcaaaggaatttccgcataccaattgaaatcactctgacgtttcaaaagattggaggaaagaacttttttaccttccgattcacaccaataacgcatggatcgtattggggaaaccgtagagtaggcattgacggacaaaggaatctttccggaaggaagtgttggcagctgtccattctccaacgaaacaatatgtaatgaaggagacagataactgtatcggaactcggacgccacgtttccctctgtatcaacagtcagtacacgaaaagcagaaggtgcatggtcaataccaccacaagcaggcgtagaggtacagatagtatacacccctgtcactttatgcttatgcacatgatttacgtgccagtgaccgtacaaccaagctttcaatcccatagccggcaagtctatatactccgtatcactaataccatatttaaaagctaccgtatcttccggcaggctatgattgaaaacaatgatcgacttctccttgcctacataagcaagatcatttttcatccagcgatatacatcttccttagtatactccggtaaataatctccatgaagcataggtgtcattatgtaatgtgtattccccacatcaaatgaatagaataccggtccgtagagtttctcgaaaagttcttccccataagcacctttcaccaagtcatgattgcctattccataaaagatttgcgtgtcttccatcaaagcggtattcagcaagcctatatgactgttcagtcccgattcataacaaatatcccctgtatgcacgataaaagctattttctcattggccgaatagtcacggagattatccacccacgcttgattcccttcttttccacgtatttctgtatcagagatatgtataaaccggtgactaccgtcagcttgaattcctccataacaaggatataccggaaaatcgtattccgtacgaccgttctctatccggtaatagtaggcattatcagtcttatatccggaaggagtagtaataaacagaaaatgcatacgggaatgtccgggcaattgatatgcgccatttgaatctgtctgtaccacatttaacccatcggaaacagagacccgatgcaatcgtttttcaccttcatcgaggagaccatttctgttctcatcaacgaaaacctttcctgtatattgagccatagcttgtaaagtcatactacccagcaaaccaatagccatacagtatttcatgtatctactcacctttagccatttgaatactgacatcagtctgcccctctacttctattgttttatcggcaaatccttttttcgagaaaataagtctgccattatctttcaccttgatagtatatgtgccccgatagtcagtcaatgcactttcaccggattcttcagactgtactttcactccggcaagcggagttgcctgtatatcacggacagttccttttacttgaatcacttttccatctgtccgtgatttgaaagaagtaccggacaccgtctgtcctccctttccggaagaaccgatatacaccggaaggttgaaataaatccggtcggaagaagtacctacctgtaattcaaatttgcccgattcgagataacgattgcccaaatcatctgtcagataaaattcatgaacaggaatcattatagtcgtttcccgtgtctgtccgggaagtaaatctacttttctgaaacctttcaactgcttcaccggtgtcatcaccgagctgaccacatctcgcatatatacctgtatcacctctttcccggttcttttccccgtatttttcaattgaacagtcacacaaacggtatcattagcctgatagagttccttatctgtaacagctttcagatattcaaattgagtatagctcaatccatatccaaatgcccatagcggggaactatttgagaaaacataatctcttcccggcttttcataagttcccggctctttataatatcctttatccgtaggcaaatagttataatagacagggagatgccccgtactttgcggaaatgaaaaagtcagttttccggaagggttcacattgccaaacaaaatatccgcaatagagtttccttcctgttcgccagcataccattgcgccaatatcgccggaatattctctttcacccacggtatggcaaaaggctttccagccaccaatacaacaaccaccggctttcccacagcaaagacctcacgtattaattgttcttgtgcaccggtcaaagaaatatcacttaaatcgattccttctccactggtagacggctcttgagtatgacgtacgaacgctgtactcgaacttcccacaaatatcaaagcaacatcactatgacgggcagcatccacagcctccgctatccccgaagtatccaaagaagccaaagaacatcctttagcgtagttgattttcaccctatcacccaacaagtttttaattccttgaagcggtgtcactccatcttctttctttttactccaggtataatctccaaattgtacattatccgcattaggaccaatcaccgctactgacttcagattccgggcattcaacggcaacaactgtccatcgttcttcagcaatacggtcgattcgtctgcaatcctgcgtgaaagcttcacactttcttccgaacggagaggaagccgatagactgcttgttcctgatagggatcttcaaataatcccaactcaaatttagcacgaagcactcgtctcacagcctgatcgatatacctgatatcaaactctccattccgtattttatcagccagcactgcataacaagagctggaagcctccacgtccattccggcagtcaatacctgccgggccgcttcgaaatcatccgccgccgtcttatggaaagtcttcagcatactgacaactccccaatccgaataaacatatccccgaaaaccaaatttattgcgcaaaatatccgtcagcataaaacgggaagcagaattaggaattctattccaagaattataactggacatgacagccataatttccgtttcagcaagcacagcctcaaatggtttcaaataaatatcaaataaatcacgtacaccacactccaccgaagccagattcaatccgcccaaaggattgccatgtggtccgtaatgcttcaacatcggagaaattccatgttccatatatccttttacctcagcaaccgccatctttgaacaaaggaaaggatcttcaccaaaagactcttctacacgtccccaacgtaaatcacgtacaacatcaatacaaggtgccagcacttgcttcactcccatcgtattcagttcgccagcaatatgtttagtcttttcataagccagttccggattgaaagtactccccatcgctatattctgagggtagatagttgttccttcatgcaccactccatgcaaagattcggcaaccgggaatccaggaatacccagccgtgttttttctaccatataggtttgtatctcacggaaagtcttacgacaacttgcagccgtcaaaggaaaaccttcaaagaacccatatcctattccaccacacatcttatccaacttctcttgattcaagacctgtccatcgaacacatcccacgaatgcaaatgacgaatctgagcgatcttttcttccagtgtcatccggtccagcaagtcattcactcttaattctgtaggaagaagcgggttcttataagaaaatgattgctgtgcgttaactgtaagtatacagcccgataacgccactagtacgaggcttatatatttcttcatattctcttatttggattaatctatttatctaagttcaaactttacactactacgaatatcggctgaggaggctcctatcaaagctcgaaattctcccggttccgccacccattcgtgtttctcatcgtcataataggataattcctcttttcctatagtgaaagaaacaacctgctcttcctccggctgcaaatagactttcttaaaccctttgagttcttttaccggacgaggtagcctggagtttatgtcattgatatacaattgtacaatctcagctcctgccttaccaccagtattttttacagaaacagtaaaggtaatacgatcggtctcagtcacctctttcttatccgccattattttaccatattgaaaagtagtataactaagtccatgtccaaatgcaaatagcggtttgatcttctctttatccgcccaacgatacccaacaaaaattccttctttatacgccactttctttccatcacccggaaactctccgatagagtgagcactattatcttccaatttaacaggaaaagtaaaaggtaacttacccgacggatttacttcaccaaacaatactgaagccaatgcgttgcctgcttcagtaccattgtaccagctcatcacaatagcattcacctgctttacccacggcattgcaacggcatttccggcaataaggacaaccaccacatttgagtttacttttgctaattcatcaatcaactcattttgctgatatggcaaatcaaacgtttgcctgtctgcaccttccgcatcttgattccaattcttattgagccctcccacgaagagcacgatatcagcctgttcagccgcttgtgctgcttccattctcaattgtaaagcatttgcccccttagatgacgcataaccggcaacataattcacctctacctgccgccctgcccatgtacgaatcccttgaagcggacttacttcatacttcactttcaacgtggatgagcctcccccgtcgcacaaagtctttacagcgttctcacccactaccaaaattttttttgtacggtctttgtcaataggtaacaaatcttctttgttctgcaaaagcacaattccttcttgagcaactttccgtcctgtcatagcatgttcctttgttccaaaagacccataaggacgattaggattcatcgtagtacggaatatcaaacgaagaatacgccggactttatcattcaattctttatctgagacctctccgcttttgagtttcttcagatacggagtagacaaatagtaatttttataatcattatctatatctttggcggattcatttgaccaagtaccgaattctatgtccaatccattatgaatagcttgatccgtatcacgggtcgccccccaatcggaaactacaactccatcaaattgccaatctcttttcagaatatcattaatcagatattgattatgactacaaaattgccccttataactattgtacgcccccatgatagtccaagcctttccttcttggacagccgctttgaaagcaggcagatagatttcgtataatgcacggtcacccacttctacatcaacataatgcctgtccgtttcttgattattcagtgcataatgtttcacacatgcagctactccgtttttttgtacaccttttatgtatggtactaccatacgggatgccaaaaacgggtcttctcccatatattcgaaattccggccgttcagcgggctacgatagatattaactcccggtcccaataggacattcttattgcggtagcgtgtttcttctccaatattgcttccgtatatataagataattcgggattccacgtagccgccaaacaggttaatgccggaaaggcaatacaagaatcatttgtccacttagctatattccattgatcccaaagcagttcttcacgtacaccgtgtggaccgtcagacatccagttttcaggaattcctaaacgaggaacaccgggagaactgaacttagattgggcatgggtcattgccgctttttcttccaaagtcatacgtgccaaagcatcctccacacgtttttctataggctgattattatccaaatatataggaacctctcgctgctgtgcaaaactacatatcgtccaaaggctcaccgctcctaatatccatactttcattataatatctttttattcattactcaaacttgggtttatgctctttagggtagctgaaggtattattcattacccaacgccccttataaattttagcaccgtagatgctaaatagtttcttacctttctcgtttatcagaccatcagaccaccactcagtagtaggatacaacatcagtaccccgtcggcactattacacacactcttcacagcgtaaagcggataaatcaattcagctttgttgttctttatatcatattgccacacattctcattagtagtaatccataacacatcggtcttgtcatacacgggaaagagatcatgtccgcacgattcggtgctgggtaattcgaagattacgcttcgatcttgtaatctaggctccttgcggttgaaattgtacttataagtacacaatttaatcccttcggtggtgtaaagcaactctctttggagatcccataccacgttgtgagcactaggaagctcgtaggaggcaaaccacttgccggttcctttgatggtatcagtcataaatgtacgtaacttaccatcggtagacgatacagccacgagatttccatcgggtaaaatctctgcagagtgtgggttttcacccacatacgcataatacatcaatttactgtcggcaatacgtataagagctacagccccacctgatgcagtcatcaagatatactggttgttgaacactgacttaacctcactaggattgtgaaaccacgtttgacaattggagggtacaccggcttttcccggattccaactccatacagtacgataagtggaagcatcgagtatcacaacagacttagaggcttgctcagccaatacaattgctttgtcgggcagcgtaaaaggagattggcaatctgcttcgggttcatcgctggaactacaacaaaagaacaataccgcacacatagcagcatataaaatcttttccattattctattttcttttaaaatctacttaagtcggctttatacagttacttcttttctataatcaacatactgttggttaccttacggggtacccgatcatcggcgggtgtattcaaaatagggaaagtcggcttcccaacatcattcacttttcggattataagcgtagtcgaccctcctccgtcaaggttgatagcgttataacatcccacagccttcatcatggtagctagatggggcaaagtaagtcccaacgcaaagaaagagtcttttctacgaccgtccaccacaaatacatacatagtctttctatcttgagaaagccccacactagtacgcggatgggtattctgcaaatcacccatctcttcgtaaaaattttgaactaccccatccttaactaatagcccatatcctcccaacgcatgcaacagattggcttcgtgagtcaatgcctcatcagcttgtcccacgtaggtctcaccatttttcagttgatacaacacctcatcgtgcccttcaaaatattgcgaattgatgcacactccgtccttatagaaaagacccatgacacgacgtggattgtcagcataataatcaccatttacaccaagccaaacagtttttccgtttgcttcggccgcaaaagcatgaatcgggagaggcgcactagattcaggtcctgttgccggcacattcttatcgtcttttgtagccggagtaaaagttagtttgtttaagtcgattgtagccacaaaaatatgctgagactctccaaacgttttaaaagccaattcattcaattttattccatcacgcagtacactctcgttatctaaagtcacgtcattggccatacctgattctaccaattgccgtcctatggcggtttgtggcatagcctcttcagaattactactagaacaagcacaactaaaagataataccagtgctcccaatataagcttcattgttaagaatttacttttcataatatttttaattaggtaaacaaataaagaaagcaattctttattatgaactatagagaattgctttctatattacactatattctatttattggcttgccactcaaatgcaccgatatcaattccagcgttcgatatacgagcatctccttgaatatcaagtagcaaattccaatcttttaccacagagttcaaaccggcatcaaccaacggagagttctctgtgggctgatagttcttacctgccgcatcagcaaattgaggaccatcggtagcggcattatccgtattcagattaatacagttagatacttgaggagtatttccatcattataaatccatccgccttgaatagcacaattcttaaagatagcagccttgttctgatccaaatagccactgtgtaaatcacctttagtatgaacattaccccataccacgcaattcaccatctggcaggtaccactacctaaacgaacaccagcactactaccagcacttctattgtttaccacagtcacattgtatagacaagtgctttgttgaacattcattgtagaagatgtacttaatgtttcgttatcacgtatcacacagttaatcaatgtacacaagaaatatgcgccaccagcatcacgggcacaagtattatttctcaccacacagtttctaatcatccaatattcataagctatcaaagcgccttcaccttgttttcccttagagtctacaaattcaaaaccatcaacaacacgtgttgtaccttctgtcaatttatacatgtaaacagaaggccagacattagatggtgcagcatgaagaatagatttacgcttcatggtacgttcagccactgtagtctcttttccttcaaaaccgccgtagaaattcaccttcttaaactcggtccaatctttcaaataatagtcacctgcagctacccacatttgcatatcaccatagtgagcacaggctgacagaccttcttcgatagtgccaaacgctctctcccagctagatccatcaccattggctccggccttcacataaacaatctgactgtagagacgctgagtaacatagagagtatccgatacttctaccacatcgccctgattcttgataactacatatcctgttctgtcttcaaatccgtcgttaggatccagttcgacaggaatgtttacatcctgcacaatatcaccgctaaactcaggaagttcacccacatgaatccaagaatgagaaaccttacaatcaaattgtaaattcaaagagactggaatgtttaattgtgttccttttttgccagtaatcatatttttctctgtttcggataaagaaatagacaacatcttttccacattggtctggacaattgtcaatttggtttctgtagtcttacccgtgtcggataaaataacactctttcttatttcggccccagtggtgttcttagcaactttaactttcaaatgagtatcgtctactttcttaaaggtaaatccaccaatctgttcctcttctacatcccattcaagatcggttactacatccaagacagcttcaccgccattaatattaaagtaaagtacctccttagataacgtaatcaatgaaccacgaccgttttgtttcacaacaatgcgtttcgacatttgatccatcaaacgaatctcaatccagccttcgcgcaatgccatctctgggttttcttcgatttcagccactatagagtcgggcaacaaagcctgcccacgatagcgtttcagtttaatccatgaagcggaagcttcggcaaaccatggatacgaagagtgtaaatcaattacttggcgagaagcgacaggccccatcgacaattcatcttgaatttcaagagttggttcaacgcgacgtatcaaatcggagtcatcacacgaagctatgaaagctaccaagagcacccccaacactcccctaaaccaagcatggaatttcatattatatgtattcatactattccgttttttaattagttttttcaataacttgtaagccgtttatcaccgatctggcaggattgtctgaaggttgattcattacctcaaatgacactgaactgcccttttctacccgacgtaccatagtggtagaaccaccgccatccatattgaacgcttggtaacaaccagcaccttgacagagtaacatcatgtcctcaagacgcataccgttagagtattcgggctgacgaccatcaacaacaaataaataaaccttacgattgtcagcagacacacctacaaaggtacgtggatggaattgcatggcgttgtcatttacggtaaagttcttcactacctcaccgtcttgcaccattctttgccaaccaccaatagcatgcaccacctctcgctctactaatttaaactctggaacagaagtaatatgtgccgtaccgtctttgagcatatagaatacatgatcagcctcccaacctatttcagtcttgatagctacaccgtctttgtagaatagcccaccaggaatccaaagatcatttttcttagaatagaagtcgccattagttcccaaaatcactttgcgtccggctgcttcagctttctcggcctgcacagttacctgttgcagaattttacctacctccggcttattatcaggcgtagaggtaactatggtcacgttcttgttcaaatctacttcagcaataatcatacgggtaggtttagcgcaataggtaaagacaacatcggtaatgcgtaccccatcatacaagtcgtaagttaattctttttctaccgactgaatgtaaggcacattatcggctattccttgcataatgggaagtgtggctcctttgtgaagctccaatttatcttcactagaacagctgcacaataacatcatgagtgacagcatcaatgctactcgaaaattcttcgcaatgtatgacatagtgtatttcatattttccatttttcttttcatttacagtaattaactacttattcccaacccggattctgaggaagcagattcgggtttaatgatatttcgtccaacggaatgttgtacaggtaatttttagccgtaaaattcatactataagtaactcgcttagcgtagggagtaataaagccatcggcatcgaatcctacttgatctttaatagtctttatctcatcggcagagtacaagttggggtccatcttagcaccacgacgcacacggttaaatacgacctcgcctacattccaacgacaaacgtcgtcccaacgataaccttcggcaaacaactcaatgcgacgttcgcgacggatttcacgaatcaagttagcgttatcacctttcacattaggatatttagcaatcaaatccggatcagctatcggatcagcttccaacttaaaagtaaatcctacacgggcacgaagctgattgatggttttatccaattcgggatcttttcccaactcagcaccagcctcagcacgaatcaacaagacctcagcataacgcatcacaggagcatcaatgccacctttgtgattacccacatagtgctcagacgccttataaaacttacataccgaatatccggtacaagatgcagcgtagaaggttcgagtgtccgagttgggaagaatagaaaagatattaggagccccacctttcaacagaccgccagtagtacgatataaaaaacgagcatatttactaccagattcgggcaaacatactgtttgcaacagacgtccgtcgcgattcttcatctctgcattatatcccatgttaggattgtggcaaccacaaagagaaatgggctttcctgtgttagcacacaagtattcctcaaaacaatcacggctcataccctgttcgctattaggaatactattaggcacgttgtgccccatattgagtgcggggtcatactcacgcgagagaattacttccgaattatcattgtaattatcttgtatgaaaagatcgaaatagctatcgtctgtacccgatgccttatacaattcataaccataccccatcaactctccagaagctttgtaagcctcttcgaggaattttacatcgccctctacattacgataacgacgccaagtaccttcataaagacagatacgggctttgagtaatagagcggcatcgcggctcacacgataaactttagtcttgcgaggtaaaaactcaatagccttattaatggtagccaaaatattggtcatcactaaatcacgagaatcacgtcctttatataattcggggttatctttattcaacgtagagtcataccaaggcacctcaccaaaaaggcacaccttattaaaataatcaaaagctttgaaaaataagatttctccggcaaatttctttttatcaatatccgaagcgggagacttttcataattctccagaaaagcattacaacctctcaccgtagaccaatcccagtcagtactactagtcattacagtgttttgaccaaatgtaatactactagcaccagctgctaaaaggttatcagactgatactcttgcataatcatatttccaatattccaagacaaaggatcaccatgtcccttgatgagtttaggataataaagattgcaatattgctctaatgcggcagcattagaagtctcccagaaacgatcactagaaattgcgtcacccggttcagtatccaagtaatcacatccagacagtgacaagcacaaaatgcaaatacatgaaaatatatattttttcataatacctatctatttttaaaatgttatattaataccgaatgaataacttctcataaatgcatattctttaccactgttctcgctagacaagctattatcagttatttgatctacaatatcaggagtcataaatgggggcaaaccagtcttctcccacaaattcataccacttacatagatacgtacctgctccattttcatcttggccaaccaactcttgggtatagtatagctcaaagtaatatctttcaagcggatatatgccgcattttgtaagtatttagtttgaatctgcttactacgtttattgccattagcattcaaacgaggatagtaagctgtaggattctcataggtccaaatattatcgatatggtattgggttacacaagagttataaatacctctagagaatccccaaaagatatcactacttgtccacatatcgcgtttacccaccccttcgaaaatagcacggatatcgaaaccacgccaaccaatacctccttgcaaattaaaacgatatcgaggagtagagttacctataaccttttggtcacccggattagccaatgtacgattaccttgatctatcataccatcaccatttaaatctttgtaacgaatatcgcccggataccacttagaagaaatgtatttctgtacatagttcattttggctgcttcaaaatcgtccataatataaccatcagtcacatacccccagatttcacccagtttctgtccttcataatacataccactagccaacgaaccgttagggttatcgtatttggttatctcagcttggtaatcggacaaacctacggtaagcgaatagtccataggacttcccaacacattcttaatacgatctttccacgtcaattccaactcccagccagtggtacgcatatcagcaatattctctttaccacccgaagtacccaatacggcaggcagtgtaaccgaacgtaccatatctttggtatcgcgtacatagaaatcgaatgtacccatcaaacgattgttgaacaatgaccagtccaaacccaaatctttcgtcacaaccttctcccaagtcactacactaggcaaagaaggaatattcaacgcattgaccattttaccatccatcatatagttggtcaacactttacctgaaagaatagacatatagtcatgatagccgttagttatctgattacccaaagcacctacagaggcacgaagtttcaaattgtctactacgttggaaagtggtttgaagaatttttcttccgaaattcgccaaccaatagaggctgaggggaaaaacgcccaacggtcgtctttggcatacttagaagagccgtcataacgaccatttacctcaaatagatatttggaacgatagtcatagttcaagcgaaagaaagccccctgtacacgccagatatctgcaccttcagcattctctttatagttgatggctaagtcggaaataggcaactcgttatcatacaagtcagtcatggtatatgaggtgttagcataagtcttctcctcttggttataaccacccattaccgaaatgttgtgaacatcgttgaacgaagttttatactcggcccatacattgatagcgtggtaaatattgttcgagttatagtttttcacataattgggagtctctacgatccattcaggacctccctcaggaaaagtttgcttaatttctttacggtgaaatttctgaacagtagaataacgattccaagagtaatcgcccttaatagatagtcctttcaatggatgtaaatcgaaacgcccgatgtaccattggtcccaagtctcttttttattacgtccagctaaagccatctttccaataacgttataattaccactgttgagatacatacctgcaaaatcaccattaggtaaaaagatagaaagtgtaggaaacatacgatatacctcataataccaagtttgagaactgctaccaccattgtccatataaggttcatcattcttaatgttactcatacgagtagcaaaactcacgtccagccaactagttagtttcgtatcgaagttgaacgctaaattgaagcgcttataagagtcatttccatagcgaaaaatacccgactgatctttaaaaccaatagaagcatagtaattgttacgctcggtaccacctgaaaggcttacattatgttgctgcataaaagccgatttttgatagaactcggacaaccaatcggtgttgcccacataggcccatcccggattactagggctataatttgaattttgaataccttcggtatcaaccaaaattgcaggattgtgttctggatcggcaatatgtgcatcgagtttctccataaacttttcgttaaagtaatatccacccggagtgtcatattcgtaagccttattccacatacgcgcccatatatccgaacgaggcatttcgggaaggcgagccggtgaactccatgaaaggttattgctatatgacaccttagtcttttggttgcgagccccctttttggtggtgaccaacatcacaccaaaagcagcacgcgcaccatatacagcagcggccgaagcatctttcaatacagaaacactttctacatcttgaggattgatgagagataaatcggaaatttccacaccatctaccaagacaagagcgttaccaccattcaatgaggtattaccacgaatgttgatattagcagcttggttgggctgtccactattgaatgtaatattcaagttgggtaccataccttgcaaaccttgtgcaatattaccaatcggacggttttccagaatctcccctgaagctgttgtaacagctcctgtcaaattaagtttcttctgtgtaccataacctacgactaccacttcattcaaagatgccgagctttcttcaagcacaatcttcaaagaaccggtttctgcagagacccacactttctccgtactaaaaccaatgtaagatgctactaacaaggcacgtttcccatctctgattcgcaatgtaaataaaccggatagatcggtagtaactccagtagttgtcccttgtacagttatattgacgcctggtaatggttgaccgttgacatctactattgttcctttaacttcataatctttctctacggctacaggagtagttgtttttttttcttctttctgaggttggcggacaataatcacttgtcttcctttcactgtatatgtcagttgcttggggggtaatactctattcaatatagatacaactgactcgttttgtgctttgactgttactttttcatttttctgtagaacatcttctttaaaaaagaacacataatcactcttcttttccaacgttttaaataatgtttcaaaagaaacatctatcaaattgagggtgacatacgtagattgaagattcataaaaccatcttttgcccaagtttttggtacataagacgttaaaaaaacgcataaaagcaaaaacccataaccaatataggttaatttttcactcttatttctaaaatgagagttatttttcatatatttgtaaaattagattagtgataactttggtgagttatttacaattctaaatctgaaccgagtaatatttcgcagatattattcggtttctctttttaaattaaggtggaatgtttttcatgtattggttcttttaaaggtttgtactttctttatctattttttccggagaaagaattattatctccccttttcggacaattctcagtggagtggttaatgagatagattctaacacttcctcaagtgtgcaattcaaatcaaggcttccatagcacttctcatctttcaagctacctattatttcaattttcgtattatagtattgagataaagtatttaatatagtagtcaacttctgaccatcaaagttcataatatcatctttccaacaaatatagccatacacatcaacttcgtttatttttaccgctccacttgccattgaaagtctttgatttggtagtagtcgctgctttgctttattatccactttcacatctacacttccacgaacaagtaccactgaagtttccacattcttcgcatagtcattcacattgaatgccgttcccaatacacttacttccaaatgagtggttttcacgataaaagggtgcttctcatcttttttaacatccaaaaaaacttctccctgtacattcaaccttctattcgtcgcaaaatctgaactataagaaatacacgaccctgaattaatccataaagaagatccatccggcaaaattatttttgtgcgttttccataaggaaccacaacctgattcattaaaattttttctccctttgaagccactactaatttatcatccactattacggctccattttcatctactctgatttccgcattattcttatccaatcctacagcttgcttaccatctaaaagcacctgaacctgatctgaacgactcaatgaatcaatcatatcagcagtcaattcaacttcttcctgtactttaaaagttgaaacccaataataagagcccaaacagagaagtagaaaagcggcaatacttgccacataggcaataactttcctatatgaatgtgttctgtgaggctgtacagacttaatatcttgtgaatgaagcttattcatcattctattaaaactttgcattttatatgcttgagaagtagactcagtatcttccacaactttcatactccgaatcacagcaatagccaattctatcctttcttcacaaccggggtgttgaagtttataagattcaatgtcaaaaccattatcagcaaatccagactttgcccattggaagagatcatcatccaacaaaaaaacttctatatctttaaatgtatattgaaccatttttcactttattttctattatgacaaataagcgaactgatttatactcactgagaatatttttttagataaaaaataaaataacagcaagaatggcttctttccttagtttttccatagaacgaactaacaaatttcttgctgactggatattaatttccattatttctgaaatttcatcaaaactcatctcatgaataaaacgaagataaataatttctttctgacgccccgttaatcctcttagcattcgatagacctcatcagataatccctgatcctgagttaaaaacagttgatcatcaatcgtataattcaaatcaaaagaaaaatcatagtctggcaatggctgaagttttgaactacgaagtaattgattataaattagattctttagtgcacgaaacagaaaagggcgcaatcttgtattgtcttcaagagtaatttttttctgataaagtttcaagaacagatcttgaatcaagtcttccaccgtttcattatctccccctaccctacgcccataagttagcaagtcgtcaaaaaaaagacaatacaattgagaaaatgcaatttcatttccatccaaaaattgcatccacaaacttattatacgtttctgatcgttgagagtcatatgctagatttaaatcaagccccaaaagctaaattgtatttttcatattttattcaatgctaatatgtggcaatattcgtaaaatatcccgagatacgcaaacttttgctattaaaagattatttcataatataaaatgaagaggggagacgacaatagaataccatctccctctcaacattattaacttaaatcgtactacatataaactaaggaaacacctactaaaatctatagtcaatgctaagaccgaatactttattagtgcggctatatacattagttccgggtaaccctgtaccactgtaattctttgaagttttagtataatcttcataagtagtccacatataaccaacattcagatttgctctttcactcaatactactttcgctccaactcctaatgtataagagtcacaagagaaactggtatcgttctgaaagttgtcagataatccataatccgtaatctgtccaccacaactcaacgataattgtttggttacatcccactcaatacccattaaatattcatttgttccctttgtcagatatttctgtttgtcaccagccattcccgctttcttatcatcatagaaatgatactctacagatgcacgcaacactggcaaaatttcataagcaactgcaactgaaagcatagaaggtatgtcgttaggagtatttacaccatctttatagctacctaccaagctctccgctgaatctggatatttcaaattattagtcttattttcaatattcaagttcgtcttgaattcatatttcgcaccaatattgaatttaccaaacttagcatccacaccgagaacaggagtcaatccccaacccgtctgatcacaatccaattccaaatccatcaattcgccaccaccataagcttctttcagattagcatttagaaaacctttataaccacccgtaaaatagttcatacgcccaccagcgaatgcagaaagccaatcattaatcttataagttagtcctagttgtaaagaatatatatattgtttgccatccatagcactattgatgtcatacatattggaagtcacaagtggacggtgcttttcaggatcagagttaaggtatcctggaatactaccttgaaaaatccctgccatagcagccgcgtcaaacataggcagaccgtcatcaaacgaagcctttccacctccgccagttatagcgaagaaaccggaaatagtccaatctcctttcttataggctgcaaacaaactaggaataactggtgcggcagcttttcccttataatatttattaaatggagcatcagattttgtaggtaccggtttcccgtcaactataaccggagccccattattcattgcaattccattataagtatagaaactggcatcaatatttcttgtttgaaaagcactctgaatgctcaatccaatatgaaaaccatcatttggcaagaaagctaaaccagcaggattggacaaagcaccgtctatttcaaaggtagcaccgcgagataacatacgaaggaaagcggcatgttgattagtatttgtcagaagccctccggcaaaagttggaattgaaacgattaacatcacaaatccaatcaaggaaatttttctcatctaaatctttttaaattatttcgggcgcaaagatataacattattgcacacgaaatatatgtttgtgcatttattttctatcactccctattttaattgaaaaagcaaactgtttctaatgaaacaatctatatttatcacttaataaagtccaaacaaatcaaccggcttttacgtttatattataagtaaattataaaagaatattatgttatggcctatacaattgcatttttcggcacaaagccttatgacgaatcgtcgtttaacgataaaaacaaagagttcggatttgaaatacgttattataaaggacatctgaataagaacaatgtactgctgacacaaggcgtagatgcggtctgcatctttgtgaatgatgtcgctgacgcagaagtcatccgcattatggcagagaacggagtaaaattgctggcactgcgatgtgcgggattcaataacgtagatctgaatgcggctgctactgccggaatcaccgtagtacgtgttcctgcttactctccctatgccgttgccgaatacaccgtagctctgatgttatcattgaaccggaaaatcccccgtgcatcctggcgcacgaaagacggaaatttctcccttcatggtttgatgggattcgatatgcatggaaaaacagccggaatcatcggtacggggaaaatagcaaaaatcctgattcatatcctaaaaggtttcggaatgaatgtgctggcatacgatctttatccggattataactttgccagagaagaacaaattgtctacacttcgttggacgaactgtatcatagttcggatatcatttctctgcattgcccgcttactgaagaaacaaaatatcttattaacgactattctatcagtaaaatgaaagacggtgtaatgattatcaataccggtcgcggacagttaattcacaccaatgcactgattgaaggcctgaaaaacaagaaaatcggatcggcaggattggacgtctacgaagaagagagcgaatacttctatgaagaccagtccgaccgcatcatcgacgatgatgtgcttgcccgcttgctctcgttcaacaatgttatcgtcacttcgcatcaagcctttttcacacgtgaagcaatggaaaacatagctataacaactttacaaaatataaaagattttatcaatcacaagcctctgctaaatgaagtgaagagataaaccttttatcctcccactttgtttacgaagcatataaacaacaagaaaaaggagttatttatgaaaaaagtaatacatagagctgatacaagagggcattcccaatacgattggctggatagttatcacaccttcagtttcgatgaatatttcgattccaaccgtatcaatttcggtgctcttcgcgtattgaatgatgacaaagtggcgcccggagaaggattccagacacatcctcacaagaatatggaaattgtatccattcctctgaaaggacatctgcaacatggagacagcaagaaaaacagccggattattaccgtcggagaaatccagactatgagtgccggaaccggaattttccatagcgaagtgaatgccagtcccgtagaaccggttgagttcctgcaaatctggattatgccgagagaacggaacacacgccccgtttatcaggatttcaacatcagtgagctggaatgtcccaacgagctggcagtcatcgtatcacctgacggcagtactcccgcatctcttttgcaagacacctggttctcaataggcaaagtagaggccgacaagaaactggggtatcatatgcatcaaagtcatgcaggcgtatatatattcctcattgaaggagaaattgcagtagaaggcgaagtgctgaaacgtcgtgacggaatggggatctacgaaactaatagttttgaattggaaactttgaaagactcgcatattctattaatagaagtaccgatgtgaaaaattacggaaatatagccgatatccggcaagaatatactaaaagcggattgcgggaaaatgaacttcccaacgacccgcttttgcttttcagtcagtggttgcaagaagccatcgacgcaaaagtagatgaaccgaccgctgtcaccgttggtactgtatctcccgaaggaaagccgtccacacgtaccgtattactgaagggactccacgatggtaagttcgtcttttacacaaattacgaaagccgtaaaggaaaacaattggcacaaaatccatatatttccctctctttcgtatggcatacactcgaaaggcaagtacatatagaaggaatagcaagcaaagtgactccggaagagtcggacgaatacttccggaaacgcccttataagagtcgggtcggtgcacgcatttccccgcaaagccaaccgatttcaagcagaatgcagttaatacgcgctttcatcaaagaggcggcacgttggatagggaaagaagtagaaaggcctgataattggggcggatatgccgttgtccctaccagaattgagttttggcaaggacggccgaaccgtctacatgaccgcttcctatatacgttacaactaaatggagaatgggaaatcagtcgtcttgctccttgatttcgtcgattttccttggcaacttcaactagaatacttaatattgcaatcctaaaatattcagcttatgatactggattatatataccatagcggtttcgccatcgaagcagaaggagtaaccgttatcatcgattactataaagattcttccgaaactgaaaataatcggggaatcgtacatgattaccttttacaaaggccgggcaaattgtacgtactagctacacacttccaccccgatcactttaaccgtgaaatattaacatggaaagagcaacggcccgatattcagtacatcttttccaaagatattctgaaatcacaccgtgccaaaagcgaagacgctttcttcataaaaaaaggagaagcgtacgaagatgatacgatacgaatcgatgcattcggttcgacggatgtcggcagttcatttctgcttcacctccaaggctggagtattttccatgccggtgatttaaataactggcattggagcgaagaatctaccgaagaagagatacgaaaagccaacagtgatttccttgcagaagttaaatatttaaaagaaaaagcgtcgaacattgatttagtgctgtttccggtagatcgaagaatgggaaaagattatatgaaaggagcaaaacagttcatcgaacaaataaaaactactatatttgtgcccatgcatttcagtgaagattatgaaggcggtaatgcgcttcgtcattttgctgaaaatgcaggttgccgtttcgtcaacatcacccatcggggcgaaagttttgagattaccaaataaacacataataattatgaataaatttacaattttgtttcttaccctgcttcttgcattgccggtggcaatgaaggcagaatctgcaaaagaaaaaagagacgacaccagataccttacaggagccgttcctgaagttgatggtaaggtcgtattttccaaagaatttcaaattccgggaatgagtcaggcgcaaatctacgacactattatgaaatggatgcaagaacgcttgaaagagaataagaatattgaaagtcgggtagttttctccgatgaagctaaaggtacggttgccggtatcggagaggaatggattgttttcagttccagtgctttgtcgttagaccgtacactcatcaattaccagattaccgttacctgcaaacccggtaactgcctggtagaattggaaaaaatccgttttacttaccgcgaaacagaaaaatataaggcagaagaatggattaccgataaatatgcacttaataagacaaagaccaagttggtacgtggtctggctaaatggcgtagaaaaacggtagacttcgcagatgatatatttatggatgtagccgtcgctttcggagcaccggatacccgtcctaaagccgaaaagaagaaaaaagaggaagagaagacaactccgtcaattgtcgcagccgcaggtccgattatcattggcagcacagataaaaagaccgatataaagatgacgactactgaacctgccaatacagttcctgctgctactcttactcccgctactccggtcggtaaagcttcatcggatatgccgggttacgtagaaattgacttgaagcaaattccgggtgaggtatatgctttgatgggaagcggcaagctggttatcagtatcggaaaggacgagtttaacatgatcaatatgactgcaaacgccggtggtgcgttgggatatcagtccggtaaggctgtagcttattgtactctttcccccgatcagtcttatgatgccatagaaaaagcggacaattatactctgaaactctatgctccgaaccaaacaactccttcggctgttatagaatgtaagaaattgccttcacagactactccgcaagccggacaaccccgcacatacgtcggagaaattgtgaagctcttaatgaaaaaataagaaaattacaacaatggaaataaaaagtaaatttgaccatttcaatatcaatgtcacggacttggaacggagtattgccttttatgaaaaagcgctcggtttgaaagagcaccatcgaaaagaggcttccgacggttcgttcacgctagtttacctaacagacaatgaaacaggatttcttctggaactgacatggctaaaagatcatgccgctccttatgaacttggagagaatgaaagtcatctttgttttcgggtgtccggtgactatgatgccatcagagcttatcataaagaaatgaattgtgtatgtttcgagaatacagctatggggctgtatttcatcaatgacccggatgactattggattgagatacttccacaaaagtaagtatataaaaaagacggggcaggataattatcctgccccgtcttttttatgagagacttattttttatgtcgatttgccctttttctccggatatccgctttcatctttgcggcacccgaaccatgctgtccacgaatataggttgccttcttcgctttcgttttcaccttttcctcttctttaggcttatctttcttgcctttaaagatgattccgccctgtattgcttcttctatactcatacaatcatttattaatattcacttttccggctacaaatataatccttttctacggatttatttatctttgccaaccaaaacaatacgtaaccactaatggcaacaacaattcttcctgcagaaagggatccgatgggagccgctatttatgattatttcaatcatcacaaagccgatcgcttacgagtattttcctctcaatttgaggaggatgaaattcctgtcaaagagttattccgtacgattcaatctatgcccgcattggaacgcatagccttagaaatggctacaggacggatattggatgtaggagcaggaagtggatgtcatgccttggccctccaagcgatggaaaaggaggtatgcgccattgatatttctccgctatctgtcgaagtaatgaaacaacgtggggtaaatgatgttcgtcttaccaatctgtttgacgaaacattcgatgagacgttcgatacgattttaatgctaatgaatggttccggcattatcggaaaactaaacaatatgccggatttctttcaacgaatgaagcgcatgctccgtcctaaagggtgtatactgatggattcaagcgacttacgttatctttttgaagaagaagacggaagtatagttatcgacttggcaggagattattacggagaaattgattttcagatgcaatataaggatataaaaggagatactttcgactggttatatgtagatttccaaacacttaacttatatgcttccgaatacggtttcaaggctgaattggtaaaagaaggaaaacactacgattacctcgtaaaactcagccttgcttagaaaactcacaaaaacacggggtatgtcgtaatgaatcataatcagcgtaaatttgcatttcaacataccctcattccccttttataaattctctatttatttcagcatttcattaatcatttgcaccaaagaagcaaattcttcttcattatacaaacgagttagttttacaatttttccctctttatctatcaatacgttccttgttattccagagtcgcgcaaagcatacttcgcaaaaatatcagctcccggatctaatcccaacggataagtgattccggtagatttggcaaaagcaaggactttatcaagtggctcatcacggtcaatgccaatcaatgcaaattccgcattatctttatgcttcaaccaaatatctttttctatgaacggcatttctttacgacaaacaccgcaccaacttgctgtaaactgcaacattacgaccttgccacggagagaagacagactcatttgttttccaccagtcagtgtgattgtaaaatccggagctatctcccctacccgaacaatatatcctgtactatctgcttccgaagtcattacatcagcaattatttttacattatctgccgaaaccacagtatccgtcgctccttttttctggccggagcacgccaatacacttatggctaagaaagccgtaccacacacattcataattttctttttcatcttcgtataatcattagtgagattgcaaatataaaaaaaacacatgacgtatttgcatttttaaaataaattcatacctttgcacccgcaaaagaaaataacgcctctttagctcagttggccagagcacgtgatttgtaatctcggggtcgttggttcgaatccgacaagaggctcttcaaagtaaaaagctgtttatcataccgataagcagcttctttcaattaaagaaaattcttttctagtttttttggctttcggaatataaccaagctaacagctatcaaaatcaggataatcccgatagcactgttgacagtgaaaaactcctcaaatacaaaaacaccgatcacgacggctgtcaacggttccatagcacccaaaatagatgtcaaagtaggccctgcatactttattgcctgtactaaagtgatattggaaatagccgtagccggtaatgcaagtcctagaataatcagccatatatatccgtctgttaccaaacgaaaaccggaagtggtaaaagcacctatcagataaaaaagagttcccagccccatgacatagcaagtcaatacagtagaattaattctcacagctcgtgtggtccgcactccgattatataccccgcatatgagaatacagaaacacaagctgccactaagccaaccatcgcattaccattatttgcggccaactctcctaacgaaagcagagccgcacctaacaaagatatcaaaacagcaaatagcacccaaagcgacttcttctcccgaaagaaaaacatcattgcaagagcaaccaccaacggatacataaaatgaatggtggaagccacaccactggctatattctgataggcaataatcagactgaatgaagtgatcgcccgcaataggcttaagccaaagacaactttgaagtcttttacggataagcggaagttacacccggaaaataagcctaacacagtcagcacaattgacgctaccccccaacgataggaaagtacttcaaaagctgaaaatccaatcattaacaaagtgacggaaaagaacggagctagcccaaaagtggaggaagatactgccgcatagagtataccttttatgcgattcatgaggtttttaactattctgttttaatcgtttatttacaactacaaagatagactgatatttctttaagtgcaaagataaaatggaaagattgactttattttcttcttgatggcatgatagacagtattgtttattttcctatatttgcgacgactaatataggaaaaatgaacttaagatgcaatatgcaaacgaactttacgatcagaacagcccaacaatccgacagtgttgagctaagagatttgtacaaaaataccgtacttataataaacagacgtgattattcacaggaagaagttgaagactgggcttcatgcggaaatgatctttctaaaataaagaaaatgatagaaacccattactttattgttgccgtcgaccagcaattacaagtcgtaggtttctcttctatcacttcacaaggatatctacattcaatgttcgttcacaaagactttcaaggtaaaggcattgcgactatacttttgaaagaaatagaacgatatgctattgaacagggaatggaacgaattacatcagaagtgagtttaactgcccgcccattcttcgaaagacaagggtatactgtggaaaaggagcagaaacgacaggctaataaattaagtctgactaatttttggatgcaaaagaccttgaatacttaaaaaaacaaagaaagactagaaattaccttctaatccttcccaattttggaggttcctggcggtcactaaatggggatattcagtaaatgttcctctttctaaaaaatcaagagaaaagctcacgtaaagcaaagcttttctcttgattttttcgttcaactctcccagtcttctatcttttttgtagaatattgtttacatattcttgttttttccttcccacccatgcattatgtacatgtcttttttaggggaagttaaaacctctcctgtttttcctgttattttagtcagattatgctgcctttctttttttcttttcgaccttttctatcatacataccgcattggctgtatgtatcccaaagaaaatccaaagtacttccgttttcctgtttctagcttttatcctggccagtgagtaatgttgtttctgcgttccaaaacttccttccaggcgggtagctctttctcggctgagttccgaccgtaagattctccgaagcggctcatctttggcagctctgcccttacgcttaaaggaagtgcttatatgatattttgtacaaaatttccggttggcattattggcatagattgaatccgccgcaagcgccttaaccctaaccccggtcagttgttgttgcagatgaatacagtctttcaaacgtactccttcgttaaaagccttaaaggagatatgttctataaaggagattccgtctatctgtatattgttgactttggctccgaattcaacggatttggtttccttgcctctgataatggggcgaaggtaatgccggtcgatactcacgatacggttggacacttttttgcctgcaaataaattcttcccttgctcaaggactgtctgtatgaccgagaaacgtctttggtaatcagaggatagtgcaagcctgttcctgtaggatgaatgaagctgctccagctggtcaagtaacttttccaataactgaagtaaccttcgtgtaatcatacgagtctgtgatttcctgcgtttacgcagtttgctataagcaagataggcacggcgtacatcaagatacttgttacggggacgttgtatgtgcaaggtccggcaatgtttgcacagatgacgatgaagccatacaataccttcccataagagtttggtatcagtaggaaaacgcagatgactttcataacaggtggcatcggtcatacagacatgaaggttctcaagataaggtttccaatgctcggcaagaatgagctggagggactcaacgtcaaggcgatccgctagttcctgacgaattgcactaacgattttaggattggtcagtggatgaagcggatcaatctgaacaccacaaaacaactggtaatgaatattaccgtttaaatgctcaatcagttgtgcatcggaaaagttggtataggacttcaagaccatcaaggctattttaccttcgggagaaaaataacttttacgacccaaagcagaggacttcaaatgcatttgtcgggccagttccgagaaagggaatagagaatggagtcgacctaattcactcgttgcaaaactttgacgatattttttaagctgtaatagtcaagacttgttctgacatttgttttactatcggacaaaaaaactgtcagatgtttgttgcgaagttacacaagtttcatcatcctcacaaccgaatgagattttatcctgctcattcggttttatcatttcctgattttgcagttgatactttcttgccacagcgattccttcgataaaagtttgcatgggcgttttcccgaaacagtactttccagagtgtgttctttgggtattgtaggagttcatccacatatcaaggtctgcttgcagctgttcgatagaggtatagattttctttctgaatgcaatagcatagaactcattctgcacggttctgttaaatcgctcacatataccgtttgtctgagggcttttcgccttaatcttagaatgatcaatgtcttccacagccaaatacaattcatactcatgattttctctgtttccgcagtattctgttcctctatctgttagcatacgcatcagtttcaagtcatgctgctcgaaaaaaggaataaccctatcgttaagcatatcggcagcaacaagcgcattctttctgtcatacaacttggcaaatccgattttggagtaagtatcaatgacggtctgctgataaatgtgtcccacacctttgatatatcctacataataagtgtcttgggcaagtagaaaaccgggataataagtttctatctctccataagcctgcttttcttcttttgctttttccaatgccgccacttggttctcatcaaggataatgccctcttgttccactttggctgacaatgctttcaggcgtttctggaaggtctccatatcgtgccgtagccaaatggaacgcactccgcccggcgaaataagaatacctttcttacgtagctcattggatacacggacttgccccaatgcaggattgtctatcgccatctgtacgactgcctgctcgatgtgttcttccacacggttctttatgacaggcttacggcgagaaatctcctgcaaggcgacttcaccgccttgttcatacaactctttgaaacgataaaaactgtcacgactgtagcccataatcttacaagcacgtgatacgtttcctaactgttgggagagttcaagcaatcccagtttgttcttgatgaccttttctgatgttgtcataacttaatctgttttctgttacaaatttattctttttatacgtaactgtcagattaagtcttgactaattcactttactatattcaacgtacgcacctgtccagcaaacctgtacaacccatcgaacaaataacggtgtatgtcacacaatccttttacggttcccacctcaatacgatctatatctccagtttcaaacaaggcatgagctttgcaaaagctcaatttatctatttcatttgtattcataccctattgcattatagacaaatatctttgcaaagaggctatttcggcctcaacaacaagtttttgaaaggcttccggcttattctctgtatgagattcttccagtgctttataataacttattttatcctcgttgctgccttttaaagtaaccaatgtatacccattccgtaaaagataaagattcatcaataaacgtgacgttcgcccgtttccatcgataaacggatgaatgcgtacaagttcgtcgtgaagatatgcggctataagtaccggatgtactttttcttcctccatctgccggtactttatcataaaatcctccatttgtttctgtattaaataaggttgtggcggcatgtgggtactaccagaaatcataacgggaacagtgcgataccgtccggcattttcacggtctattccatgtaagataagagcgtgtatttctttgatagtgcgttcgcttatctctatatccttcttcgctatatctttgatataatcaatagcttcgctatgattgatagcttccaaatgttcacgcatagatttgccggatatggtaactccttcatttactactaatgcggtttcctgtaacgtaagggtattgccttcgatccggttactttcgtaggtgtattctatatccaaggcatcctgtatcttttgcagcgcatcttccggtaatggacgtaaagcggataactctcctttgagtgtatcggctttatctaacaacagttttaaatcttcattcatgactattctactttgatattataaaacgatttctccgctttctattctatccagcaaccgggacaaatctagcacactatttatattgtaattggtatctcttatgcggatcactccaataataccaccggaagaagaaggtgcaaacagttctgtaatatcaacctctaaagcattagctatcttttccagagtttcaagagaaggtgtagatttaccattgacaatattactcatgttggctcttgtgattccaacagtttcagcaagagaagatactttaatatccttactctccaaaatttctctaattcttagttccataattaatgtatcgtttaataatacagcaaatataagacattgtatcgtattgaaataataaaataagttaaaacgtatcgttttacggaaaataattagattatctcttgtatgttttattgtaatacgatacatttgcaacgcaataattatcacagaacgatacactaataattaatgattatgacaaaagaagatttaaaccagatgtgcagagaataccaacaggtattatcaatgagtgaaacagaagtattcgccatgtacgaagaaagcaaagctgaatgtatcgcttcttttgaggcagagattgattattgggaaaattatttcgggtataaatactaataaaatatacgattatggcaacagaatttaaaaacaaaatgagtgaattaatgaagcaggcttggatgctggttaaagtgtacggcttttcaatggctgatgcaatgaaacaagcttggcaggttctgaaactgaaagcagctttgaagaaaggtgtagtaaagttctactatcagaaactgaacggtgaaatccgtactgcatggggtactttgaaagaaggtctgatacctgaaacaaagggtacagaacgcaaaagaaacgagagccttataacttactacgataatgagaaagcaactttcagaagctttaaaatagccaatttaatcaaagtaggataattaactcggtgggggtgtccgtttcgttcactccccaccacaaagatataacaacatggaattttcagaaattggagaaaagtttgaaggtctgacagcaggccaagtttgcaaccttgcaaaatttggcaaggagattttagaaataaacggcactgttacattggcaagatgtttacttgaagttgctcctaccctcatggatgataacagctacagagaagccggatgcattgtcttaacaatagcgaaagcagccatagaactagatcaccaatgttggggtgagcacaaaacacttttaggacttaccggagtaaatatagatgattactgttacgggttaaagggtgcacaagaaattatagtgtatggaaatgaagattgaacccgcaagcaaagagcggacagagcaaggagagcagtttatcgaaagactgctgaagactttacagaacaacgataaagtaacggttaacattatgcattgccaaacttgcgttattgacaggctggtaactgtggaatccggcaccagttttaatgcaggtctcagtaaagacaattgtacagtactaaatgaaatggtctacaactcacatcaataaatgacacatgaaagttgacgccaatcaacaaagccaccccggtaacaatacggttgccgggcttacatttaaaagaatccgattatgaatatacatcaaacatcgccacggcccgattgcatccacttcgccaaatgcggtgaacggtctatagcttattgccggagatatggcgcacatgagtgcctttcgtgtcggctggttaaacggaagccaaaaaaccgggttatagtggacggagtagaacggaagagatgcacacattgcggcaaggttcttccccttcaccgcttctataaccggacggtagtacggaatggcaaaaattatcatttaaaaacgtcatggtgtcggctatgtatgtccggtgctcaatgcgaaaggaacaaaagaaaattagccgggtccaattttggtctcggctgaatataaagcaataacttcttaattataatcgattatgaaaacaagaatcattaaaaacactgaactcaaaaatgagccgagtgcacacaaaagaactatgccatccgtggatattgcggaaatgaccggaaagagacatagtgatgttatgcgctctatccgagcaatggagctgacatggataaaaattagcgaacgcaaatttgcgtcggcctcatacaaagatgaacaaggtaagccaagacccatgtatctactagactaccgggaatgtatgtacatcgctaccaagttcaacgacgaagcccgtgcaaagttaatcctccgttgggatgaactagagaaagaagatagggcaaaggaaagtaacgccctacctgatccgacagattcaggagcagctcatacgatacatgagcttatcgagtgggtaggcgctttgcaaaggttaggcggagcggataaagccttaacactggaactaatgaagaagatagcggaagaaaaaggtttgccaatggttgatatacccgtttctacagagaacacaccggcagaaaaacgcccatgtattgagaagcttaccccatcccctgcaaaagagaaagataaatgtaagatagtacgcaaagcatacactttgacggacctgttaaagatacacgggaaaaagtacacggcagcacaattcaaccagttgttgatagaaaaaggcttcatggagattcgctacaaaaacggggaaccatataaagcaatagccttaaaaggattaaagtacggagtgaatagtacacgcattgattatccggacacgttactacctgtttggtatagcgatactttcccaaggcttgtggaattgatagaagagccggatccgttttgatggaaatttatatctttgtagttggaatcatgtgaattagtcaagacttaatctgacagttacgtataaaaagaataaatttgtaacagaaaacagattaagttatgacaacatcagaaaaggtcatcaagaacaaactgggattgcttgaactctcccaacagttaggaaacgtatcacgtgcttgtaagattatgggctacagtcgtgacagtttttatcgtttcaaagagttgtatgaacaaggcggtgaagtcgccttgcaggagatttctcgccgtaagcctgtcataaagaaccgtgtggaagaacacatcgagcaggcagtcgtacagatggcgatagacaatcctgcattggggcaagtccgtgtatccaatgagctacgtaagaaaggtattcttatttcgccgggcggagtgcgttccatttggctacggcacgatatggagaccttccagaaacgcctgaaagcattgtcagccaaagtggaacaagagggcattatccttgatgagaaccaagtggcggcattggaaaaagcaaaagaagaaaagcaggcttatggagagatagaaacttattatcccggttttctacttgcccaagacacttattatgtaggatatatcaaaggtgtgggacacatttatcagcagaccgtcattgatacttactccaaaatcggatttgccaagttgtatgacagaaagaatgcgcttgttgctgccgatatgcttaacgatagggttattccttttttcgagcagcatgacttgaaactgatgcgtatgctaacagatagaggaacagaatactgcggaaacagagaaaatcatgagtatgaattgtatttggctgtggaagacattgatcattctaagattaaggcgaaaagccctcagacaaacggtatatgtgagcgatttaacagaaccgtgcagaatgagttctatgctattgcattcagaaagaaaatctatacctctatcgaacagctgcaagcagaccttgatatgtggatgaactcctacaatacccaaagaacacactctggaaagtactgtttcgggaaaacgcccatgcaaacttttatcgaaggaatcgctgtggcaagaaagtatcaactgcaaaatcaggaaatgataaaaccgaatgagcaggataaaatctcattcggttgtgaggatgatgaaacttgtgtaacttcgcaacaaacatctgacagtttttttgtccgatagtaaaacaaatgtcagaacaagtcttgactattacaaatcatggactatccttttaagttggttgcaagctatttttgattcattcattaatatttttgttttgtgtttgtgcgcttatgctgtttcgtcgtgagatgaggcagcatttcttatttgctcgtattcctttcagggattgcggttttagagctttctctttttggatgatagtatgtccgcccaataaaagaaaaacgcttatacacaaacaaaacacgaaaacgagcgttaaacaagcgttattcaagtaaaacgacataggacaacgtgagaaaatcccacattatagtactattacttttatgttttacggcatatttcgagtaaaaaacgactataaaaaagcgaaataagataaaatgagataaagaaaacgatagaaacgcactatctttgcatcaaattaaaacattatattatggcatataaggcattagacatcgcaaataaaattatatccaaaacagatttggaacacggtgatactatatcaaatctgaaattgcagaagatgatgtattaccaacaaggttttcatctggcatattttggaacgccattgtttgatgaagatattgttgcttggcaatatggcccggttgttccttctgtatatcaggagtacaaatcatttgaatccaactctatatcaacatccaaagagggtatatctttatcagatgatgaagaagagcttttcaacaatgtttatgaggaatataaccagttttcagctgttgctttgatgaaaatgacacatgaagaatccccctggaaaactacagaaataaattctgtcataagtagggataagatggcggcatttttcaaaacacaaattgaagcgtaataaatgggtggtaagtttaagttaaagcgcaaagatgtaaagcccagtttaaaagataaagaggttgatgcgagaagcaaagaacctcttttctgctttaagtacttggatatgaaaacctctttaaagggatgcgataatagcgtatttaaggattttgtgacgagaatacaaaagttgtgtagtcttacttggaaagacattaacgtgtccggcagacatcagtacggttttgaaatgataccgattaaacagttgaagccaacatcactcccttcggtaataacagaggatattaaggagcttgccgtattcagatatggcggagataacaggccatttgtttgtctgataatggactgtgtgatatatcctatattcatagaagcaaaattcggagacatatacgaccacggaagtaaataaatagcagaagtacatatagattgaatttgatagacaatcgtactaaagtcctttaagttaaaaacggtttggaaacggttataagtacctcaaatatgcattgttttccaaatcatgtacatttatctatatttacattattcgcttagattccaataggtgattattcccgtcttataactagagaaaacggcggggaaacggcggaaaacgagcaaaacaccctaagactaccctaagaataaactaagaataaactaaagaatcacggcaagattacggcaaggaaaatgtgatttttgacaatcctcatgttctataactccaaataaccgttatttggaactgatatgctacaaagatttttttgggtcattacacaggtgagagaagaagaatcacacttctcctaccctaattttgtagtaccaatgtaggggtcaatgtaaaaacctgaggggtaaatttataaattgttatctttgtctccaaattcatagcttatggaattaaacggttatcgccttcttcttcctgaaggcactttagactactttgatcttgttgatgtgaaggaaagtgtaaatgaagttgtgttctaccttgaggagaaaaatatcgttcctgagaagtatacagatcaggatactgagagtaaaggcttttatgaccctgttattgttcaggattttcctctccgtggcaagaaggtcttccttaatattcgtcgtcgtcgctggctcttaaagaagcataatgagtatatttctcgtaactggcgtatggtggctgaaggtactcgtatgacgcaagattttgcgtcttttttaaaagaactatattgatagctatccgatcagttgcaagctcttaggtgttttatatggagttgacggggatttattggagcgtcaataccgtaaccatctaagtggttatctccattgggaccaacttgttcatgcagaggattggctactattcgaaaagaatatcggtgcttatatctgtattgatgaggtagccctctcgcgtggggaactctatactgtactgaccaataaagaagctcacggtggtaaaggtagtatgattgccatcattaaaggtacggacgttcatacggtcacttctgtcctgcttaagctctcccgtcgccgccgttaccaagtgcgcgagataaccttggatatggctcctaacatggagcagattgcacgcatctgctttccttcggccaaacgtgttaccgatcgctttcacgtacagaagttagcttatgaagctgtgcaggagatgcgtgtaaaagctcgctgggaggctttggatgaagagtccactcagattgcttatgcaaaggcctgtggaaagatgtatcatgcacctgttttcgctaatggagatacaagaaagcagttgttagcgagaagtatttatctgctttacaagaaggaatccttatggactcagtctcaaagaatacgggctgaaattcttttcaaggaatatcccgatataaagaaaggatattatctgtctatgcggttaggcttaatctatcatcagtgtaagtttaaggatattgctttgacaaggctggcaaggtggtatgatgaagtagataaatcagggttcctcacctttggaagggtcgcacgttctatacaaacacattatctgaatataatcaatttctttgaaaggagggcaaccaatgcagcagcagagtcattcaatgctaaaatcaaagcatttagagcacagttcagaggagtaagagatagagcttttttcttatatagacttgctaaattatatgcttaaatacaaaatccctcagattgttacgttgaccccaatgtagtaccattttcagttaagagcaaagaaaaaccctttcagaaatcatctgaaagggtttcgtgaggttcctggcggattcgaaccgccgtacacggttttgcagaccgctgactaagccactcatccaaggaaccgtcttttctcgtttgcggttgcaaaggtagtacaaattttgaaactaccaactatccacagcaatttttctttgtactttttttctttacaccgcactcctttcttttcttttccatcatatcctttagttcacagccacttacacaactgtcacaaggatttccactatctcgcgtacgacgaaaaaaagtataaataccatataccaatcggacaatgcagagtacaaccagtacccccactacccattcttgccaattattcatacaaacaaccctccaatctgataaacagtaaatgacacaatccatgccaataccgtagtatagcaagctgcaaaaagcgcccatttccaacttccggattcctgtttgatagctgccaatgccgcaatacatggaaagtaaatcaaaacaaacagcatatagcagaatgcaaccaacggtgttatcggaatccgttcagccaaactaacctcatcagcctccggatcatccacatataaaacccccaaagtacttaccaccaactctttcgctcctacccccgaaatcagaccgatacccagtttccaatcaaaccccataggcttaatcaccggttctatcgcacgcccaagctgacctatatatgaattttcttgctgttcggctaccgtcttatacgcatcatgattcggatagtatcccagaaaccaaatgataatagaagcaatcataataattccccccatctttttcaaatattgcgcccctttctcccatgtatgacggaagatagattttgctgtcggcatccggtacggaggaagctccatcacaaacggagtatcgtcccctttcaccaaaaacttactaaacagtctcgctaacaagaccgccaaaaatatacctattgcataaatactcaacaagaccagactcgcattgttcggaaaaaatgctcctaccaataataaatagataggcagacgagcactacaagacatcaacggattaaccaacatagtaataagccgactttttcgattctctatcgtacgggaagccataatagcgggcacgttacatccgaaccccataatgagcggaataaacgatttgccatgcagccccattttatgcatgatcttatccattataaatgcagcacgtgccatatatccggagtcctccatcaacgatatacagaaatacagaatcaagatgttcggcagaaaaacaatcacacctcctactccgccaacgataccgtcaaccagcatatctttcaatggcccttcagacatattattacgaatcaaatcaccaatctgctcaaccagccattcaatccccatcataggatattcgccgagtacaaatgtcccttcaaacatcaaatacataaacaggaagaaaataggatacccccaaatacggtgagtaacgatagcatccaacactttggtcgtctgcgcctgttctaaatgattatcagtaaacgtttctttcaatgcaccactgatgaaaccgtatttcgcatctgttatggcagactcacaatcttcattcatcgtgctctgtatgcgtttcaccatcttatcacgaataccgacaatgctttcagcattcggcaaagtacgtacaaaacgttctatatccggatcattctccaataacttaatagaaagaaaacgagtagaatatttatgacgaatgtattcattctttgatacttcctctttcacagcctcaatagccctctccaaatcgggaccatgattaatatgaatatggcgaaagacacgtccggtcttccgatgttcccgcacataatcttcgagatgttcctcttcatggtgtttccggtcttccaaagaatcatgccattcagtcaaatctttgagaacttccggattcatatttccgtgtttatcaaagaagtcgactccctcataaagatttataacgacatgaaacaaggtatccaatccacgattttttttactgacagtaggcaccataggcactccgaacaatttactcaataaacgatagtccaatgtatttccactgttctccaattcatcataaatattcaaagccacgaccatgcggacattcatatcaatcaattgagtagtcagatataaattccgttccaaattggaagagtccaccacattaataatgacatccggagtttcgtcgataatatggcgacgaacataaatttcttcgggtgtataagcagacaaagagtatgttcccggtaaatcaacgatccggaaatgataaccttcgaaatcgaaatacccttctttagcgtccacggtcacaccactataatttcccacatgctcgtgagcaccggaagctaaattaaataaagaagtcttgccactgtttggattgccgaccaaagcgacattaatggtacggcgtttacccagcgctagccgtttcatgtcttcttcttttacagaaatatcctcaggcagtccctcgtggtaaatagtctcttcagccaatttcttagcctcttcttcactgactacctcaatcatttcggcttcctgacgacgaagagaaatttcataacctagaactttatatttaatgggatctcttagtggagcattcaacagcacttcaaccgtttttcccttgatgaagcccatctccacgatacgtttacgaaaaccaccgtgccccaatactttaacgatgacacctttctcgcctgtttttaattcggacaaacgcataactttcaaaattttcggcaaagataattcataactttggagcacgcaaattatttagattgtttttaaataacagatattttcatccacaaaatatccatctgccattaaaaacaagcgacattcacttgagatacttcaataaaccattatctttgcaaaatatgatacaacatcgggttacacaatatatagaaaaagaaggtttattctcttccgaaaataaaattctggtggcattgagcggtggtgccgactcagttgcattgttatgcatcctgcatacagcaggttaccgttgtgaagccgcccattgtaatttccacctgcgtggtgaagaatcaaatcgagacgagcagttcgtccgccaattatgcgaaaaatataaaataaacctgcataccattgattttgatactacccgatacgcaaccgaaaaacatatttccatcgaaatgggcgcccgtgaactacgttataattggtttgaaaaaacgagaaaggattgccaggcggatgtcatcgctgtcgcccatcatcaagatgacagcgtagaaacaatattgctgaacctcatcagaggaacaggaatcaccggtttattaggaatccgtccccgtaacggagtagtcgtacgccctttactttgtattaatagggaagaaatcattcactaccttcaaagtatccaacaggaatacgtaaccgacagcacgaatctggaagatgaatacacccgcaataaaatacgcctcaaccttcttccactcatgcagacaatcaatccgtccgtcaaaaacaacttgatagaaaccagcaattatttaaatgatgtagccactctatataataaatatatagaagaaactaagacgaaaatcattacagcagaaggtatacggatcagttctctgctaaaagagccagcccccgaagccatcctttttgaggtgttacatccattaggcttcaactctacacaaataaaagacatcgccagttcgctccacagtcaaccgggaaagcaattttgctgtaaagaatggagaataataaaagatagagaattcttgttattggaagccgttcaatctgtaagcaaagcgactcctccttttcagctgatcagagaagaacaagaatatacttccgactttcagattccacaagagaaacaaacagcctgtttcgatgcagacaaactgaatgaagaaatctgttgccggaaatggcagaccggtgacacctttgtgcccttcggaatgaaaggaaagaaaaaaataagcgattatctgaccgaccgcaagttctctatcagccaaaaggaacgtcaatgggtactctgctgcggagaacgcatcgcatggttgataggtgaacgaacagataaccgctttcgtattgacgaaacaactaaacgggtgattatttatagaatgatctgaggacgtttctgttttttgaaacagtcagacagcaaagctgcaaaaggagtatcatagattcgcgctttcctagtacaggctttcacacaggcacaacatttgatacatttagtctcatccgtatgcaattcatctcctttcgttatagctcctaccggacaacgcgtcacgcacaatccacaatgagtacacatactctcatcttctacccacggagtacggggaagaggcatactgcttttgcgcaacttaataacttttctcaaaaaacggaacaaagggaaaaaaggctgactcggacgtgtgatggcgcgtacatctaccggataaagtttatccatattctcggcagcctgcaccttttccattatttttttcccaaaatccgcagcaaaagccaaatcagaattatcaggacgtccagctgagatcggatgcttgtcagtactatacgaatgctcccctataaaagtagccccggcaatcaccttcattccatgaggtgtggcaaaagcgtccaactccatcaaagccttttcataagcccgatttccatagaccgccaccaacaccgtaggagcatccaaaccacgaatgttccgtaaacgttccatcgccaaaggagcgacatgccctccatatacaggaactaccacaatggctaatgcagatgtaggaatcacaacttcctccgctgcttgctgagttacatttataggaaaaatattttttatacctgccccttgaacaatcgcttccgctatttgtttagaagtatgggtgggcgaaaaataaattaaataagcttcatttactgtcatactattttcttttatctagcaaagatacacttttacgtggaaaaaaacggttgattgtatatgaatccaaaaaaaattattatctttgccccgttgaaacattctacgattcaacatatacatccctaattcataataaagaacaaacatatatgctcacatatctatggccatgagctatagcaatactgtccataattcagcaaaaaagaaatattaataacttaccatactatatgtataacattatccaattaaacgacaaagatctgtcggaacttcaaattattgccaaagaactaggcataaaaaaaacagactcatacaagaaagaagaccttgtttacaaaatactcgatgaacaagctattgtaggagccaccaagaaagtagccgcagacaaactcaaggaagaacgcaaagaagaaaagaaaaagcgctcacgtgtaactccggccaaaaaagaggacaaagtggtttccgcaacaaagaccggagaagttacaaaaacaaaagaagctgctactgcaaaagcacagcaaactcccaaagaagaaacaacaaacaaagaaaaagaaactcccgccgttgaaaccaaagcagaaaacgctgttactcctaaacgtaaagtaggccgtccgcgcaaaaattcagatacaactgataaaaaagaagttgaagaaacgaagcaagtagcttccaacagtgtcgaagcgaagcctgtagttgcggagaaaacacccgaaacaacggaaaaaacagctccggcacagcaaccatctgccgagaagaaagaaaagcctagcaaacccactgtggaaaaagataaacccgctgcagaaaaaactgtagaaaaaaaggtggttgccaaaccgcaaaagaaagctgaaccggttatcgacgaagaaagtaatatcctgaccggtgctgacgatgatgatttcattccaattgaagatctgccgtctgaaaagattgaacttccgacagaactcttcggtaaatttgaagcaacaaagacagagcctgtgcaatcagctcccgaacaagtagcccaacctcagcagcaacagtctcaatctcaacaacaacgtccacgcattgtccgtccacgcgacaacaacaatgcaaacaataacgctaataataattttcagcgtaacaacaaccaaaatcaaggccaaaatcagaatcagcaccaacaacgcttgccaatgccacgcgctacgcagcaaaacaatgcgagcgaaaaccttccggcacagcaaccgcaagagcgtaaagtgattgagcgtgagaaaccttacgaatttgatgacatcctaaacggagtaggagttttggaaattatgcaggacggatacggtttcctccgttcgtccgattacaattatctttcctctccggatgacatctatgtatcgcaatctcaaatcaaattgtttggcttgaaaacaggcgacgtagtagaaggagtgattcgtccgcctaaggaaggagaaaaatattttccgctagtaaaagtctcgaaaatcaacggacgtgacgctgctttcgttcgcgaccgtgttccttttgaacacttaacccctctctttccggatgaaaagttcaaactctgcaaaggcggttattctgattctatgtctgcccgtgtagtagatcttttcgctccgatcggtaaaggtcaacgtgcactgatcgttgctcagcctaagacaggtaagactatcttaatgaaagacatcgccaacgcaatcgcagccaatcatcccgaagtatacatgattatgttgcttattgacgaacgtccagaggaggtgaccgacatggcacgcagcgtaaacgcggaagttatcgcttccactttcgacgagccggcagaacgtcacgtgaaaatcgcgggtatcgtattggaaaaagcaaaacgtttggtagaatgcggtcatgacgtagtaatcttcttagactctatcacccgcctggcacgtgcatacaatactgtctctcctgcatcaggtaaagtactttccggtggtgttgatgcaaatgcacttcacaaaccgaaacgtttcttcggagctgcacgtaacatcgaaaacggtggttcactgactatcattgctaccgccctgattgacaccggttctaagatggatgaagttatcttcgaagaatttaaaggtacaggtaacatggaattgcagcttgaccgcaacctgtctaacaaacgtatcttcccagctgtcaacatcactgcatccagcactcgtcgcgacgacttgttacttgacaaaacaactcttgaccgtatgtggatattacgtaaataccttgcagatatgaatccgattgaagctatggattttgtaaaagaccgtttggaaaaaaccagagataacgatgaattccttatgagtatgaacagctaaaaaggaaatcaacaaatataattcttaagaatgcagattaacacagattgccgcaaattaattcttattatctgttccagtcttgtgttaatctgcattttaattacagcctattctacttctctcctcctcggcactattccatttttgtacaaattactatcactgacgtccaaaacaactcccctagtcttttctgcattctcttttttgctacttttgcttccaaatcaattattacttaattctaaccagaaatgaaaacgatttatccattcatgggattagccttatgtagcgtaacaactcaggcgcaagaaaagcccaatttcctgattatccaatgcgaccatttaacacaacgtgtcgtaggagcttacggacaaacacaaggttgcaccctccctatggacgaagttgcttccagaggagtgatcttctccaatgcctatgtgggctgtcccctcagccaaccttcacgtgcagcgttatggagtggtatgatgcctcacgaaacaaatgtacgttccaattccagtgaacctatcaacacacgcataccagaaaacataccgacattaggaagccttttctccgaaaacggttatgatgcagtacactttggaaagactcacgacatgggttcactaagaggttttaaacataaagaaccagtagccaagccatttaccgatccggaatttccagtcaacaacgatagcttcctggatgtaggaacttgtgaagatgcagtagcctatttaagtaatcctccccaaaagccctttatttgcattgccgatttccaaaatccacacaacatatgcggatttgtaggagcaaacgaaggagtacacaccgatcgtcctattagtggtactctccccgaactacctgccaatttcgacgtagaagattggaacaacatacctactccggtacaatatatttgttgcagccatcgacgaatgacacaagcctcacattggagtgaagaaaactaccgtcattacattgccgctttccaacattatacaaaaatggtatccaagcaagtagacagcgttttaaaagcactctattccacacctgccggtaagaatactattatagtcatcttagccgatcacggtgacggaatggcctcccaccgtatggtaactaaacacatcagtttctacgatgaaatgacaaatgttccgtttatctttgcaggacccggtatcaaacaccagaagaagcccgtagaccatcttctcacacaaccgacactcgacctcttgcctaccctttgtgatttagcaggaattcccgtcccagccgaaaaagctggaatcagccttgccccgacattaaagggaaaaaagcagatgaaaactcatccttatgtagtatccgaatggcacagcgaatatgaatatatcactactcccggacgcatggtacgtggaccaagatacaaatacacccactatttggaaggtaacggagaagaactttacgacatgaagaaagatccgggagaacgtcaaaatctcgctaaagatcctaaatatgtcaaagttcttacagaacaccgtgcaatgctcaatgactatatcaaacatagcaaagatgattaccgtactctgaaagtggacgctgacccacgttgcagaaaacatgctccaggttatcccaatcacgaaggtcccggagcacgcgaaattctcaaaaataaaataaaataataaaaagagcgaggattgttttgtaatcttcgctctttttacttcttttgcagatgaactaacgggcaagcagctaattattaagtgaataagcacaaacatcatattatagcagtagctgtagccatgcttatatctgttactctatatgcggcgcacaccaaccaggcacgcctgtctctgctaaaaccgttaatcaaacacaatacaccattcagtaccgagatttctaccgacagtatcactgtatgggaaaaattactggaacccggattagaagaacaacaacattattcacttttattccaactaaagctactgactgtccgggcattaattacagaaggctatttcagtttggccataaacaaagcgaactcgatgtatcaaaaagcgaaagagatgagttacccgctaggaacagcactttcgctgcaagcaatcggaaatacttacttaaattcatcaacgcctttagcggcaatagaatcttataaagaagcattagagatcatctccaaagacctgatgcagaccaatatgccaagacgattttaacttgtattattctgacaaagcttaaattctggcaaatggcaaatatagaagcagatatccggcaattggaatctctttcaaacaaagacaagaatctaggagatgttttttatcttaattattgtcaggcattctataatattcagacgcatcacctacctgaagcccttaattatttgcaacaagccgagtctataaaccgacaatgccaacattcctatttctttttgatgattgaatatctgtatgcttgttactataccgaatcaaaagaatacactaaagcattaaatatattcgatactattttatcacacactcaaacagccggttcatacaaatctcttctcatactacaagaacgagctcagttactggcattgatgggaaagtatgaagaggcatgccaagcctacgaatcccttaacacactcaaagactcgttggatgcaacgaattatatccggcaaatcaatacgcttcatgctctttaccaaattgataaaaatgaactggacaacctaaacaggcaaaaaataattctctattggagttggctcacgatctcgtgtattgttattaaggctttggaggaggcttaccgaatgcttactgcaaaagaccatcccgtagaccgaatttcagtactgtcacagttaatatcagtcactaaagaaaagaaagataatcaaagactactcaaatatatacaagaacaagaaaatatactttacaaacatattgccgggaatccgtttttgaaagagggatttaccgatgcataccttttcaatgaacttttttacagttattattatctgaatatcaacgctcccgaacaaacatatccccatctgataaaatctaaggaatacttaaataagaatacatatttcacatacagaatactctatttcgatacactcgctcaatacaaccgagctataggaaagtatcaacaagccttgaattatatcgatacaacattgacaatgctgaaaaagaattttcccaacgactatgccgaacagttacttgaaaaagcaagaatatggaaacagatagggcaaaatgagaaagctatcctattctacgaacaggcgttgtccctaaaagattctgtcacaacagtactttcaaacacccagatgaaacagataaaaaagagatacaatatagaaaagaatgaattagaacaggagaaacgaaataacaggactcaactcctatatctagtttttatattcgttattctgattttgctgtttattttcatggcaaggctcttcatgatacgcaaagctttaaaacattcggaatacgaaatccggaaagctatggaagctgtgcgacaaaccaacgaaatgaaaaatcgctttttgtcaaaaatgagctataatatccgtactccgctcaacaatgtggtcggcttttcacaactcattgcctgcgaaccgaatatagacaaggagacaagacaggaatacactaatatcatacaccaaagttcggagaaattaatgaaactcgtcaatgacgttctcgatttatcccgactggaagctcaaatgatgaaatttcaagtacaagattatgatgtcatcgaactatgtaaagaggtgtgttatatggcacgtgtacaaaatgagcaaacaggtattaagatccttcgtttgtatcgcaagagaccatcatacggcatgatatcaacctgttattattacagcatttcggtggaaactacttcataaatcagaaagctcccgaaaatccggaaatagttttcatctaccctattggttccgaaccgaaataaagcgttatctttgcaaaatgtaaacttaaacgcttaattatgtataccaacaaacaaatttggagtgtcagttacccgatactgctaagcttgctggcacaaaatgttatcaatgtcactgatacggcattcctcggacacgtaagtgaagtagcactcggagcttccgcaatggggggattgttctatatatgtgtattcaccattgcattcggattcagtaccggttcacaaatagttattgcccggcgtaatggcgagggacgttatacagatgtaggtccggttatgattcagggagtcatgttcttgtttgctatggcattgttgctgttcggcttcaccaaagcattcggaggagacatcatgcacttgctcatttcttccgagtccatttacgaagggacaatggaatttctggactggcgtatctatggtttcttcttctcattcgtcaacgttatgttccgggcgttatatatcggtatcacacgcaccaaagtattaacaatcaatgctgttgtcatggcactgaccaatgtgatattagattatatgctgatcttcggaaagtttggtatgcccgaaatgggaattaaaggagctgctattgcatccgtactggcagaagcctcctctattctcttcttcctcatctacacatatatcacagtcgacttgaaaaaatacggtctgaatcgattacgcacattcgatccggcgttattgatacggattctgagtatttcctgtttcacaatgctacaatacttcctgtcgatggccacttggttcgtatttttcgtagccgttgaacgattgggacagcgggaactggctatcgccaacatcgtccggagtatttatgtagtattgctaatcccggtcaatgcgctggcaaccacgaccaatagccttgtgagcaatgctatcggtgcaggaggtatccgatacgtaatgccgctcatcaacaaaatcgcccggttctcatttttcattatgctagggctggttgcactatcagcattgttcccacagttcctgctttccatttacaccagtgaaaacgcactcattacagaatccgtaccttcagtatatgtcatctgttgcgccatgctgattgcatcggtagccaatgtcgtgttcaatggtatctcaggaacaggaaacacacaagcggctttgttgctcgaaacgatcacaataatcatctacggctcatatatcatcttcattggaatgtggctgaaagcaccgattgaaatctgctttacaattgagatactgtactataccttactgctgataacaagttatatttacctcaaaaaagcaaaatggcagaataaaaagatataaatacgagagatttttgtacatttgcaggctcaaatattaattagtaattaaacaactatgttcgataatttaagtgaaagactagaacggtcattcaagattctgaaaggtgaaggcaaaatcaccgaaatcaacgtagcggagacgctgaaagacgtacgcaaggctcttcttgatgccgacgtaaactacaaagtggcaaagaatttcactgatacggtgaaagagaaagcgcttggtcagaacgtgcttacggcagtgaaaccgagccagttgatggtgaagattgtgcacgacgaacttactcagttaatgggaggagagacagccgagattaatatcgattctcgcccggcagtaatcctgatgtcaggtctgcaaggttcgggtaagactactttttccggcaaattggcacgaatgctgaaaagtaaaaagaatcgcaaaccgttgctggtagcttgtgacgtatatcgtccggcagctatcgaacagttacgcgtattggcagaacaaatagaagtaccgatgtactgcgaactggacagcaaaaatccggtagaaatcgcacagcacgctattcaggaagctaaagctaaaggatacgatctcgtcattgtcgataccgccggacgtctggcagtagacgaacaaatgatgaacgagattgcagccatcaaagaagcaatcaacccgaacgaaattttgttcgtggtagactccatgaccggtcaggatgcagtaaatacagccaaagaatttaacgatcgtctggactttaacggtgtagtactgaccaaactcgatggtgacacacgtggcggtgcagctctttccatccgttcggtagtcaataaacctatcaaattcgtcggtacaggcgaaaagttggacgcaatagatcagttccacccggcccgtatggccgaccgtattctcggtatgggtgatatcgtatcactggtagaacgtgcgcaagaacaatatgacgaagaagaagctaaacgcttgcagaagaagattgcaaagaatcaatttgacttcaatgacttcctcagccagattgcccaaatcaagaaaatgggtaacttgaaagatcttgcctccatgattccaggagtaggaaaagcaatcaaagatatcgatattgacgataatgcgttcaaaagtatcgaagctatcatttactccatgactccggcagagcgttccaacccggaaatattgaacggttcacgtcgtacacgtatcgccaaaggtagcggaacgaccattcaggaagtcaatcgcctgctgaaacagtttgaccagactcgcaagatgatgaagatggttaccagcagcaaaatgggcaaaatgatgccgaagatgaaaagataatccaccaataaataccttgaaaatatgacactgatagatggaaaagcaatttccgaacaagtgaaacaagaaattgccactgaggtagctgaaattgttgcacgcggtggtaaacgcccgcacttggcagctatccttgtagggcacgacggtggcagtgaaacatacgtagccgccaaagtaaaagcctgcgaaatttgtggattcaaatcttctcttattcgttatgagagtgatgtgactgaagaagaattgctggccaaagtgcgtgagctgaatgaagacaatgatgtagacggttttatcgttcagcttccgttgccgaaacatatttccgaacagaaggtaatcgaaacaatcgactaccgtaaggacgtggacggttttcatccgatcaatgtaggtcgtatgtctatcggacttccttgctatgtatctgctactcctaatggtattcttgaattactgaaacgctatcagatagaaacttcgggtaaaaagtgcgtagttctcggacgtagtaatatcgtaggcaaaccaatggctgcattaatgatgcagaaagcatatccgggagatgcgactgttaccgtatgccacagccgcagcaaagatctggtaaaagaatgccaagaagccgatatcattatcgctgctttgggacaacctaatttcgtaaaagccggaatggtgaaagaaggcgcggtagtaatcgacgtaggtaccacccgcgtaccggattccactaaaaaatccggattcaaactgacaggtgatgttaagttcgacgaagtggcacccaaatgctcctacatcactccggtaccaggtggtgtcggaccgatgacgattgtatcgttaatgaaaaatacacttttagccggtaagaaagccatctatcaatgagatacacattgttcttggtaatcatatttctctccttgtcttgcacttcacggtcgcagacaaggagagattctattaataacaactcgcttgacacactctcggctagcaaaagttgcatacctgccgatactctccgtattctctttgtgggagaccttatgcaacaccaggggcagatcaatgcagcacgaaccgctaaaggatatgactatactacctgcttcgagtatgtcaaagaggaaatagggaaagcagacctcgccatagctaatcttgaggtgacttttggaggaaaaccatacaaaggttatcctgctttcagtgcaccggatgagtttctcaccgccatacacaatgccggatttaatgtccttgtcacagccaacaatcatagtcttgaccgtggcaaaccgggattagaacgtacgatccgcttaatcgactccttgtccattcctcacgccggaacatatataaatcccgaagaacgtgaaaagaaatatccactcattcttgaaaaaaacggattccgcattgctctactcaactatacgtatggtacgaacggcatatacgttacttctcctaacatcgtcaattatattgataccgcaatcattgccaaagatatagaaacaagtaaagtaatgaaaccggatgctattatcgcctgtatgcactggggaatcgaataccagtcgttaccggataaggaacagaaattccttgcagactggttgattcgaaaaggagtaaaccatgtgatcggttcccaccctcacgttgttcagccaattgaagttcgtgaagacagtgtgacaaatgataaaaatcttgtagtttattcattgggaaattatatttccaatatgtctgcacgtcacacagatggaggacttatggtaaagatggagttggtaaaagacagcataacccgtctcaacaaatgtgagtatagtttagtatggactgcccgacctacacaatcaggaaagaaaaatcaccaattactccctgtcaacttaccgacagactccattccggtaaatgcccgtaactctctgaagatcttcgtaaatgatacgcgatccctcttcagcaagtacaatcgaggaataaaagaatatactttttacaaaaaaaagtagtagaatcttttggagattaaaagataatatctatctttgcaccgcgttagagaaacgcagatatggtggctgtagttcagttggttagagcgtcagattgtggttctgaatgtcgtgggttcgagtcccatctgccacccaagataagtccttataagttaaatacttatgagggcttttttattgatggtagtaggtatttagagactgaaatcgggtcaacgtaacaatctgagggattctatatttaagcatataatttagcaagtctatataagaaaaaagctctatctcttactcctctgaactgtgctctaaatgctttgattttagcattgaatgactctgctgcggcattggttgccctcctttcaaagaaattgattatattcagataatgtgtttgtatagaacgtgagacccttccaaaggtgaggaaccctgatttatctacttcatcataccaccttgccagccttgtcaaagcaatatccttaaacttacactgatgatagattaagcctaaccgcatagacagataatatcctttctttatatcgggatattccttgaaaagaatttcagcccgtattctttgagactgagtccataaggattccttcttgtaaagcagataaatacttctcgctaacaactgctttcttgtatctccattagcgaaaacaggtgcatgatacatctttccacaggcctttgcataagcaatctgagtggactcttcatccaaagcctcccagcgagcttttacacgcatctcctgcacagcttcataagctaacttctgtacgtgaaagcgatcggtaacacgtttggccgaaggaaagcagatgcgtgcaatctgctccatgttaggagccatatccaaggttatctcgcgcacttggtaacggcggcgacgggagagcttaagcaggacagaagtgaccgtatgaacgtccgtacctttaatgatggcaatcatactacctttaccaccgtgagcttctttattggtcagtacagtatagagttccccacgcgagagggctacctcatcaatacagatataagcaccgatattcttttcgaatagtagccaatcctctgcatgaacaagttggtcccaatggagataaccacttagatggttacggtattgacgctccaataaatccccgtcaactccatataaaacacctaagagcttgcaactgatcggatagctatcaatatagttcttttaaaaaagacgcaaaatcttgcgtcatacgagtaccttcagccaccatacgccagttacgagaaatatactcattatgcttctttaagagccagcgacgacgacgaatattaaggaagaccttcttgccacggagaggaaaatcctgaacaataacagggtcataaaagcctttactctcagtatcctgatctgtatacttctcaggaacgatatttttctcctcaaggtagaacacaacttcatttacactttccttcacatcaacaagatcaaagtagtctaaagtgccttcaggaagaagaaggcgataaccgtttaattccataagctatgaatttggagacaaagataacaatttataaatttacccctcaggtttttacattgacccctgaaatcaggctcagtagaaatttaggctcagcagattcttcgataaaaacaagttggaattcttatctcaatctgtattttattacaatacatgatgaaaattgaaattaaacttataactttgaagaaagttaatgtgatacaccatgatacagaaattcttgcaaacatataaggaggcgttcggtaatgcagttccacttcctgtcactttcggatatagccatatacctgttacagagataaataaaataccgcgttgcatgataggtagcattcgcaaagtatgtgaaggtgattcactaactctaagtgccgacaatgtactgtgcggtggaggaagcctgtacactgcctttgcccctatgcaagaaaggctgcccaaatttgtgtcagaaacggaacactacaagcagactcccgaacaaatcaagaaatacatacatcgcttagacatccacctgacggataagccttatttgaattttgtccgtatggataaactatcctctctcgatgaaatggaaggtattttgtttttcgccacacctgatatactttcgggcttgtgtacatgggctttttatgataacgatgcagatgatgctgtatgtacacggttcgcatcgggatgttgtagcattgtgacctttgccatacaagagaaccggaagaatggtcgaagttgctttatcggtatgttagatccgtccgcacgtccgttgataccgacaaatgagcttacctttgttataccaatacaccgtttccatgaaatgatgcagacgatggaacattccgctttgttccaaaaggcatattccatagtaagaaaacgaataaatggagagatagggaaatgaaaagaacttacggaacgcgaagttgccaaaaagctacagcagccgcagcagccacattaagtgaatcaacaccatacgacatcggaatacggactacgtaatcagcctcagcaatcgtttcatgtgcgagcccatccccttcactacccaccacaatagctaatttagattcagccatcaagataggatcatcaatggaaaccgaattatctgtaagtgccatagcagctgtacgaaagcccaaattactaagatcagagagagaaccgtccatccatgtccacggaatacagaaaacagctcccatagatactctgaccgcacggcgattcaacggatcacaagaattgcgcctcagcaatacagcatccatccctaatgctgccgccgaacgaaaaatagcaccaatattagtggcatcaacaacgccgtcaatcacgacaatacgccgggcctcatgacagatttcttccaccctacgtaaaataggacgatgcattgcacaaaggacaccgcgcgtcagaacataaccagtaagcttagaaagcaattccctgctaccagtatagactggtaaatcattactatatcgttctattacatcagaagcatcaccaataatatgtttatgttcacacaaaattgccaaaggctcatagccagcctctaaggcccttttgataaccttcggactttctactataaaaagccctttatcacgttcaatgtgataacgcaactgagcttcagtgagagcactgaatatctcaactccaggatgagataaagatgatatttcaataataggcataatagattatttataaattgctactttaataaccccatccaacttgttttcaaagacacggtaagcctcctcaatctcattcaacggaaatcgatgcgtaataagaggagtagtatcaattttcccttcctcaatcagtttgagaatctcggcacaatcacaaccatccactccacctgttttaaaaaccaaattcttgccatacatatcaggtaaaggaagaagttgtggtttatcatagagggctacaatcgtgacaatagcattaggacgggcacaattccaagccaaatggaaggaatcgtcactccctgccacttccaaaacaacatctgcaccaccatggtcactgttcttgagaacaaaatccttgcagttttccggttcagtcaccaacacatcaggataatgctcgcggacaaaccgaattctttcaggagacttctcacagataataatgcgttttggcttcttcagcatcacacacaacaaagtacaaatcccggtaggtccggcaccgataatcagaacagtatcttcctcggtaatttccgagatacgtgctgcccaaaagcctgtcgcaagcacatcaccgacaaacaaggcttgctcatcactcacagtatcaggaatacggttcaaaccttgatctgcataagggactctgacatactccgcctgtccgccgtcaattcgacatcctaaagcccaaccgccattaggatcagtacagttattcacatatccatgcttacagaaaaaacactcaccgcagaaagtttcgacattcacaatcactctgtcaccaggcttcaccgaagtgacatcagcccccacttgttctactacacctaccatctcatgcccaactgttattccgggtacagcacgcggcacactaccatgtttaatatgaagatcactcgtgcaaatactaccaagtgttacacgtacaattgcatcccgtgaatcctttatttccggtctcgctttctcctgtaactcaaactttccgtgttcaatatatgtgtatgcaagcataatatcctccttgttcattaatgtataccttgcaaagataatgatttcattggcaaaacaaatctcttttatcacgttcaatactcccaaaccgaatctcactctacatttataacaatacaaagctgaataaagtcattcactgttttttctacttcagctttgatattctggaaaatattcttacttttatatccaaaataataaataaaaacagcagcacgacttattatatttacacacaagcctatgatagatacttccgaaaatctgattattataaaaggtcaaatcaagactcccgaaatagaaagctgccagaattatgatgacagctataagatagtattccgaaatgttcctagtacgtatacttataaagaagaaaatgtcctttggctgactgatccggacaaaccggaccccaataattatcaaataatcagtaaaggaagaactttatcaaacatcaaagccttatctattttcaaggccggatcacacagctattggcacattcgttttctgaatggtaaagagtatgattacagagaaaaggacttagaaattatcgaatcatgcttgggagagagtcgttcgaaaagtatattcgaatatttgaagaaagttgccgatgcgaacgaattgaaagctgatgacggaacgaagctattggcaaaacaatatgaaaagattcatttcatcgcaaacaacagagctattgctgtatatctgaatcctcaaaaatataaaatgcagacccagactgcctcaaccttgatttttcctttcggttgtaatgcaagccagcaaaaagcagtccaggcagcttttgagaaccaaatcagtgttgtgcaaggacctccgggaactggaaagacccaaacgattctgaacatcattgccaatatccttgtgcgtggtaagactgttcaggtagtatctaataataactccgccatcgtcaatgtacttgagaagttatccaaatacgatatgggattcattgttgcattgcttggtagcacagctaacaaagagaaattcatcgaaactcaagaagaggaaaaacaatatccagaggactttgagtcatggcatgatacggatgccgaccaacctcaatttctcaatcagatacatcatcagacagaagaactaaaaagcatattttccaaacaggaacgccttgccatggcaagacaggaaatacaagctttaaaaatagagtggcaacattatctacaagagttcggaacaaaagaatttactctccaacaacggaaaagttccagctcggcagaccttctgaatttatggaatgaatgtcaacaatttgcagaaaaagaacaatcatcaagttttcggggaatagctgcttttattcaacggttgaaatggttcttctttaaattcaggagcaaagcgatttgtaaaatccccgataaaagtttctataaccgggagatgagtttgattatcgccgacttccaaatcttattctaccaaacaaagtatgcagagctggaagtcgaaatagacacattagaaaaggagcttgccaacaaagatgcagcagaaatggctagacaaatggccgatacatcaatgaaatatctaaagaatcagttatttcatacctatggcaataaccatgacaagcccatctttacgctccctgatctaaaaaataattggcgagaggtacaaaaagaataccctattatattaagtactaccttttcatcattaagcagtctgcaacgagatgccgtatatgattatatcattatggacgaagcatcgcaggtttccgttgagaccggagctttagccttgtcatgtgctaaaaatgcaatcattgtcggcgacaccatgcaacttcccaatgtggtcacggaagaaaataaggaaaagctaaactttatcgctaatgcctgcctgattaagccggaatatgattgtgccaatatgagttttttgcaatccatctgcaaagttattccaaatgtaccgcaaaccttgttacgggaacattatcgatgccatcctcgaatcatcaacttctgtaatcagaaattttatggtggagatctcgtcatcatgacacgtgataaaggagaagaggatatcatttgtgccatacggacagccaaaggtaaccactcccgcagtcacatgaatcaacgggaaatagatgttatcaaagaggaagtactaccgaatctatcttatgaaacagatgaaattggcgtcatagctccatataacaaacaagtagatgcaattaaatccgcacttggagaggatattgatgtcgcaacagtccataagtttcagggaagagaaaaggatgctatcattatgaccactgtcgacgatgtcatcacttccttttccgacgatcccaacctgctcaatgttgctgtttcgcgggctaagtcacaattctatttagtcgtatcgggaaacgaacaacccaaagactgcaatatcagcgatttgattgcttatatcgaatataacaatggcactgtttccaccagtaagattcattctatattcgattatctatatgagcaatatacagatgctcgaattgcctatttgaaaaaacacaagaaaatatccgaatacgattccgagaatcttacatttgccttactcgaagatatcctgaaagaaaatatcaatatgcgtcatttgaatatcatttgccatttaccactctatatgttgattcaggattattctctattgaatgaagaggaaagcaaatatgctgcaaatataaacactcatattgactttctgatttataatcgtgtgagtaaacaaccggtattggctattgagacggatggttatgcattccacaaatcggggacgagtcagtcagaacgtgatattaaaaaggatcgtattttagagttgtacggaatttcattggtgagattgtctactattggtagtaatgagaagaaaattattggagataaacttattgagatactaaaatcacactaacaccatatctcccttaaataatagagtttacaaatcaatagttgcaaccaatgatttgtaaactgctaatattaactaaaccacaactattaccaagtaataactttatccacaatttcctgctgttctaaggcagtccttcttaaatatatacgagtagtttcaatactttcatgccccatcaaatcagccaacaaagaaatatcattgaatttttctagaaaattctttgcaaaacgatgtcgaaatgaatgaggataaacaactttagtattaagttcatacttctcggcatagttctttaattgttgagaaatccctcttgttataattcgttcaccaaaacgattaagaaagagataaccactttcacgattaatagcaattagccaaaccttagtttcatccctaagctttttgggaataaacaaacggcgaatttttccacctttagtataaatatcaaaataaccaatattcacatgctctatttttatttgtattaattcactaacgcgagcaccagtagcagccaaaaaacgcacaacaaaataccattcctgattttcttctttttttaatttgtttttcagaaatatataatcagcgttactaatcacattttccaaataagaacgttgttgtacttttactgactttaggcgaagccgcgttttattaacgaaatcaagatatttatttaaagcttgaattcgtaaatttacagttttaggcttaaaggtttcaattaaatacgttttgtaaagtaacaagtttcttttattcaaatctttatgacgagaataaaaatcatttactgcatattgatatgcagaaattgtattatccgccatattaccctgacgaagaaaggtttcaaatttttccatgattatttttaattaataatacaattaaactatcactcataagataagcataataaaatagcaatagttcctattatgagaagtttctcgctacgggggaagtgaaatgtattgatgacgagattccgtttgagataccgcaggggtgggaatggacacgagtaggcaatatttttttcgttacaaagttagctggatttgaatacactaagttttttaccaaagaagcactatcagcatctaatccaattccaatagtacgtgctcaaaatgttcgtatgggattttttgaagaaaacaaaaatgaagctatttctgaaatattgtcaaatcagttagaaagaagtgctttgaacaaaaaatgtttgttaatgacatttattggtgcaggtataggtgacacttgcatttttcctgctgaaagaaaaaaccacttagctcctaatgttgcaaaaatagaaccacttgatgatagcatttctttaaattatgcagtttttgcgctaatgagtccttgtggacaaagaggagtaaatgcaatcaagaaatccacagctcaaccgagcctatcaatggagactattagaaaattgttgatacctattccacctttaaaggaacaaaaatgtatttcgttaaagttgtccgaagccttaccattggtagaaaagtattcaaaagtacaagaagaacaaaatcaattaaatgtcgaaatccaatacttattaaaaaaatccatattgcaggaggctattcaaggcaagttggttccacagattgcagaggaaggtacagcccaagaattgcttgaacagataaagtttgagaagcaaaaacttgtaaaagagggaaagataaagatgtttgctctcaatgattccatcatcttccgtggtgacgataacaagtattatgagcaggtaggtaaagaaatcaaagaaataacagaagagatactctttgatttaccagacaaatggcaatggtgtagaattggaaccatattcatgcacaacaatgggaaacaactcaataaaggaaataccaaaggtaaattaatgaaatacgtaacaacatcgaatctctattgggatggatttgttcttgataacctaaaggagatgccatttaaagaaaatgaaatagaacgctgtatggctgtcaaaggggatttattggtttgcgaaggtggagatattggacgatcttgcatttggaattacgacttcccgataatgctacaaaaccacatacacaagttgcgtccgtatattccggtatgtacaaaattcttctattatattttcaatctgtacaatttgacaggattgataggaggtaaaggcataggtattcaaggcttttcatccaaggctctacataatactcttgtgcctttgcctccactaaaagagcaacatcgcattgttgcccaaatagaaaaactatttgagcaactgcgataattcatttattcgttctgctatacgttgctgttcagctaaaggtggaataccaatgagcaagttgtagaacaactctttattgaggtgcggtatagccgcacctctttttgaatttctcaattcctctttatagaacaagatgaaagccaagatataaggtttccacatggctgaagaaagccataactgtttgaatgtactccccatataaccatcttgcggaacaatgaaaacttctcctgaattttcaccatctacaagaatgatattgtctccggcatagacaaattttcctttctcaataatagtcgcagatgattttccacgcaagtattttgcatccaaacaaatgccctttccgcttttcttttttccatctattagttggcatatgtcttttaatcgtgccacataccaactattgggatactcaaaaggaaactcaatttcaattgtttgtccatttatcctctcataatacttgttacagttttaatcttttcaacaatacgttgttgctctctatatggtggaattggcaccaaatagtttttgacggttgtcgtggagagttctttttgctttgtacttccggctgatttatcttcaataacagattgaacagtatcgcttgcaaagtaatagtataggtattgtgataatacatatgctttaagaggacgaataactgttacatgactatccgcaaccgcaagttcgtaaggattaagtgccgatttatatatcgccatacgccctaatgttcccaaaccagttgagttccacattaaatctccatcttgtagcaatcgttcctctgcataagaagggagactattcgggtctataaattgggctttatcaatacaaaagccagcccattgattacatttttgtgctattacaggatatttcttgattggggaatatttaggagacttacctctctgtatgtatgaacaaatatcatcaagtctaacccattgccatgtggcaggtatttcaaatggaatttcatctgttatgtctgtgattgttttgccaatcttctcgaagtacttgttatcgtcaccacgaaagataacagaatcagtcaaaacagacttttttagcttgccctcttttacgaaacgttctttttccttgcgaatctcagcaagcagttctttggcagttccttcttctataatttgtggaacgagtttaccttggatagcctcttgtaaaatgctctttttgataacgtcattgagcgaagagtttagggtatttagttcaccttgtaccttatcatatttatcgactacaggaagtacttctttaagtttctctgtaattcgattctgttctgctataggcggtaatggtatcagcaaacctttcagtctattggcagacagcccaggcatagctgttcctacggaagctagattattactctccttttgtaggtacatgaagtaatatacatactcacaaatgccatcaacaaggggtctcaatctatgaatatggttttgaagacaaatatcatagtctttattccatatggcagaacgaccataaccggcacctccttcacacacgagtaagtcacccattgttgcagaacaagtgcgaatttcctcttctgtaaaattcattacttttacattatcaagaacaaaatatccccaatataaatttgaagtggtgataaatttttgtggtgtacctccagccttattattactactttgttgtttaccactcgcatgtatgaatacatttcctatacgagtccattcccacccctgcggtatctcaaacggaatctcgtcatcaatacatttcacttcccccgtagcgagaaacttctcataataggaattgtcatcacctctaaaaataaacgattcgttcttatccttcttaatttttccctccttaataaggcgagctttctctatccgaatcttctctaacaaaaccgatgcaggttcatcattagggtcttgaggtacaagttttccctgtatagcccactgaagtatactattctttaattgcttagcattcataaggattaatcaagtttgatttcaatatccagcagcttctgtatttcagccaatgttttatctatctcataatcaagagctgcacgctttttaaaataattagcaagcaattctgcaggtggcaagatttcttcctcatctttaggaaatttacattgatcaaaattacaatcaagtgaaatcaaatcttgaacagaaaaacaacgagatttctcatttccatcttggcttacaatctctttcctatcgtgccaccactctttaattggttgacaatgctctaacttcattggttttgtcttagagaagtgcttatatccatcaggcatatcaagacgataaaaccaagtttcttttgttgaatacccatcaggagcatcttcaaccctttcattattgaaaaaaagaatatttgtagcaatacttgtataaggagaaaaaatacttccaggcaaacgaataatagtatgtaaattaaaatcttttaatagcttcgttttaattgtaagcttcgcaccgtctacaccaaacaaaaatccatcaggtacaattactgccgcacgaccattagctttcaaacggtacattatcaataccataaataaatccgcagtttcactactacgcatatctgaaggaaagttatttttaacgctcgcttcagtactaccaccataaggtggattcattgcaataacattaaccttgtcgcattctttaaaatccccaacccttgtacccaaagaatcacaatgaataatattaggagcttcaatatcatgcactaaaagattagtgattgataaaagatatggcaaaggtttccattcttgccctattacggctgtctggaataacttaacatcatttgtcgttttaacttgcttatacaaatgatttaacgcagatgtaagaaagcctcccgttcctgacgtaaaatctccaaaagactctcctagttgaggatttagtatttccaccataaaatcagtcagtgcacgaggagtataaaactctccggcattccccgcagattgtaaatccttcaaaatgccttcatatatatcaccgaatgtatgccggtcttcaacatctgaaaaatcaatctcatctatgacattaaccacttgacgaagcaaaattccattcttcatgtactggttaaggtctgaaaagatttctttcactatagttttgcctcttggagtatcttcatttactggtaaggccttaagggtaggaaaaagccttgcatttacaaattccaataaagcgtccccagtaagtgcttccccatctgcattatcaactgcccagtttctccaccttagctcttccggaataattgatttaaattcctttttttcacggcgacttttatactcccacgtttcttcctgtgcatcataaacttttaggaagaatagccaaaccatttgttcaatacgctgtgcatcaccactaatacctgcgtcttgacgcattatattctgtaatcgttttattatattattaactgccataaattatgctacatataattcgttttctaaatctttaagtgctttttcaaatttctcccatccaccaaacaacttaactatcttttgaggcttaccgattgtattaaaaggaggggtatcaaatatatcctcattctcaaattccaaaatgcctttatcagcatatttatctaacaatgcttctaaaacttgtttagccacaccttcatatctagataaataatctctcttctttacattattagcacgttccttccgcgtaagcggttgcttatcaaaagccacatgacatattatatcaaaaatgtctgcattaagcaaatcaggacgcttttcacgaactgcatcaagtaaaacattgtattctttaagttcatcaacaataactttcttcttatcagcagcagtccagttctttataaactcatccaacgtagcatacttacctcgaatattcttacgtgtaaaatctgttaaactttctgtgacaagagtatgtccatcagcaccaaggtatgaaacaatttctgtgtttatctgaatatcttttccattaatgtaatatttcttgcgaccatattcccttggaggttggtcatgtgatacagtccgacgcggacgatatggaggatatgttttactccctccaccttccaactctggatcaccatcaaattctggatctttaaacaattgggtcacattcctgaaatcaagaatttcaaaatgccacttccccttatcagtacgcaaccgagtaccacgccctacaatctgcttaaattctgtcatagaacctatttctttatcaataacaataagtccgcaagtcttacaatcaacaccagtagaaagcatttcggaagtcgtaacgagcgttggatatggttgatctggatctataaaattatcaagttgtttcttcccaatattctcatctccagtgatacgcataatatagcgagaatccttcttgcacaaatcagagttataattaaccaaaagttgccgcatcgcctccgcttcttctatatctgcacaaaagattatagactttgtcatgcgtcctattctatggagcattttagttatgcgtcgagccacaatatcccggcgttgcataataactaactcacgtccaaatgttttccggttataaaaaccagctttaatgagactaccttttatatccaactcatcttcctcgggcgtccatccttctaaatcgatattcaaaaaagagttagttactctatacggagctaaaaaaccatcttcaataccttgctttaatgagtatgtatacaaaggctcattgaaatagtcaaggttattagctccttcttttactttaggggttgcagtcataccaatctgagttgcggaagaaaaatactctaacacttttcgccactccgattcatctttagcacttccacgatgacactcatctacaagaatcaaatcaaagaaagttgatttgaactctctaaaaggatcgggaatattctcgtcataagaaactaattgttgatatagagccatatatatttcaaaagaagagtccatattcttcttttgaatcttcgtcataacttttttaaaaggcttaaaatcttgagccatagtctgatctatcaaaacatttctatctgcaagatataagactcgcctttttaatccagattttgtcaaccgatgaataatctggaaagctgtaaaagtctttcctgtacctgttgccattaccaataaaattcgattttgtccacgggcaacagcttcaattgttctatttatagctattcgctgataataacgaggaatgttagtatgagcatcccaataataaggttcttcaatagcctttatttcttccgaagtatatttcttagaatcacgtaaacgttttaacagttcatcaggagttggaaactcatctatattaatattagtttccttaccagtaagaaaatcatgctcaataaaaccgtctccgttagaactgtaagcaaaaggtatatccagaattttcgcatagtccattgcctgttgcagtccagctcccacaggtttattattatcttttgcctcaactatagcaataggattattagcagaataatgcaataaatagtcagctttctttccttgtttccgggcatgaacattcccttgaaatattactcgtccatcagtaaagtaatattccatctttatgagttctttttgccatccagccttttcaacaatagctggagttataaaacgtaattttatatcctcctctgttaatgacttcttatccatatacctaacacttaacttcttataattgtgtattatcggaagttgcaaatttaattaaaataattaacaagaagaaattatttactcgtttttgtagaaataatgtaattacatagtttcaccaggggtaacacatatatttcactaactatacctaaattaaataatcatccttctgcaatgtttaagaagatatttctcacaaaaaatcagatgactaaaagttactttccgtacaattcaaagaataaaactagagataaaattcagtaccatgtttacctcattcccaatatattgtttacccaaacaaacaataaatttcatcaaataaaatagccaagctacagaaacaaaaacatacactaaaaaataaagcatactttcatttgaattaaactgtttcttgttatctttgcctagacgtattcatttaaagaacaataatatggatgttgaaataaaagagaaagaaaaccggagacatgtcggacgcaatttacaaaggattcgtgtatatttaggcatgaaacaggaagcgctggccgccgatcttggtgtaaatcagcaggtcatttcaaagattgagaaacaagaggaaatagaagaaggctttctaaaaagaattgctgaagtgttggggatatccgaagaagtcattaaagactttgatgttgaaaagacgattttcaatattaatcatcataattataaggatgcaaatatctctgaaggtgctactacatacgccatcgttcaacaaataaatccacttgaaaaaatagttgagttatatgagcgtttgttgaaaagtgagcaagataaaattgagatcctgaaaaaatatatgaaataatcactgctagattcagcaatctaatatatagaagaatggaaacaatagaaaatataaaatcaaatcaccttcaccttgggaaaaagatagaacgtgtacgcagacttcgcggtatgactcaaacggagctaggccaattattaggaataaccaagcaggctgtttcaaaagtggaacaaaccgagaaaattgacgatgaacgattagaaaaaatagcctctgcattaggagttactaccgacggattgaaagagtataacgaagaaactgttttatataacacaaataatttttacgagaattgtggcgtaaaaaatgcaattggtaataaccaaacattcaataattttcccatagaacaaacaattgaactctttgagaaactgttagagaaacagaaagaacaatttgagagcttaaaaaaagagaaatagatgacctttataaaatactcaacttcgtttataacaattatttccctaaggaagttgtagatgaattgatttcctcaaagaacaaagaaattgattggctaaaaatagagataaagaaccttaaacaagaaagagaaaccttgctgcaaataattagggatatgtattgagtatccctaattaccaaatgttgataagaaatccccataacatacaaataaaacaatcccaacgcttcccattcccaaaataaagtcctacttttgtgaagaattctgtttgctatatttacaacggtatttcacaaataaaataaaccctacaagatgaaagaagaacccgatagcctgtctgtcccctacaattttgcccgttgcttcaacgctcaatgtccacaagcccccaaatgcctgcgccacatagttacacaacttgatacagccgacaacctatatatcactatcattaatccggcacgttatcctgcggatgggaatcagtgcgaatgtttcaagactgctgtcaaagttcatgtggcgtggggactaaaacggttgctcgacagaatcccctatgaggatgcagtcagtatcagaatacaattggtaggacactatggaaaaacgggatattatcggttctatcgcggagaacgagggcttatgcctaaagaccaagcctatatcaaacagctattccgcaataaagggataaaagaagaaccaacttaccaacgttacacagaagaatatatttggtgagttgctgtcatctgtcacagttcaggggttaatagtttagtaatgaaccgataagcctgtgacagcaagaggtgacagcagggtgatggcatttttgccgtcacctggttatcagtcttacgacatgatagagtgtaccgctacgcgtatgtttggaagggatttcttgctttttcagtattcttccgaaggaattaaccctcttgacagacatcgggattgaactgcctttttgaatatcttccataatctccgctggagacagccactccccttcttcaggctgtgcggcacgaaaataacggaagaaaagttgctcttccggcgggacttgttcaaattcacggttgttttccaccatgatcttttcttcctcctgatcgaaccagtaacgttcgccatgttccaattcgtacatagcttgtgcgtaaagctgctcatagtctatcggacggttggtgtcaatcactccggtcacttcgatgcaaataaaacgacggctgccggaagggtcagtcaacaagtctttctggttacttgtagctatgaatgaggcgtaccgacgcatttcaagcacggcactgccatgaggtttcttcacattcagtacaggcttttgcagaatatgtttcagaaagccttgttgtgtcgaactcacctggtcaaattcatcgatattgataagcgcaaaacgattgaggtaaagttcggcatctttctttcgggaaaaatcaatactgtcggtatagtaggaacgctcggaagggggcattatgctccggcaaaaggtggatttacgtgtcccttgcggtccgacgagtaagggagaaacactgtttgcatactttttattgcttcctttccaatgagaaaccatattgaggaaccaacggtggaacaaatccatccaatacggattcttacaagggacggtggctgccaatgcacgaatacggtctttaccgtcccatgcgggaagccggtagagaaaatcttccaacgggttgaatacaggcacgcgattggagtaaatataacggctaatatccctgtcccacaaggggatgccttccatttgtgcatccaaagcaatgctgttcaacgcacgtttgtcgagaggattgaagcggaaacgaaaagaaagcctttcacgatattctacctcgccaatttgggtgttatggcggaattcatagcggcgtttcatgaattcttcagtctgcaaggcgagttgctgctctttgcttaggctgatattcttgccgaagcctttgcactcggtatatatattgccaatcatttgccggataagctcttcttgtttatacatatagaagtggaaaacggtacgtctcacgacttcttcttgcggaagtcccgaagcaaaacagtttttagccagttggacaactaaaggatgccatgtgtcttcgctcaattcgagccccgcttcccggagatcggcataagctttccgaaaagcggcttcaaaaagcatcaggaaggcattttccgcatcatatcccggtacggcacgggtcaatggagatttctccgcctgaaccgcttcacggaaagtggtttcttcgggcatggatgacggttgagagagataaaattgaacagaatccggacgatatatgatgtccggatcgtgggataatcgcgagtattgttccagggtcggttctttgggaagtatatcgaacggaatttggggttgataacactttacagccagtcgataggcgtgggcatggaatagttccgcttcttcccgtgttttgggaagggagttgtccggtcgggtaaaggtagcccatattttcaccgttttgccacttgagcccataaaaacacaacgggtttgcggttgctcgcaggctttttgtttcactaatgctatttcagatttattggataaaggaccgatggtcagttctacaataccgttgtagtttttcatctgtttctgaccgtttactcttcggaattcggcagcaggaattatttggggaagtttattggcaaacatacaccgttcatcgggaaggatatatcgcagatgctctctgaatgtagaaacaggacgggattttatttctgtctttatcttatttaccagtatatcaagatccattacgctgagcgctatcgtatcttcattcttacgaaattgagtaattttcattaatttgataataaattgttttgtcagcgcctttgtgatcgttgagactgctaaattagtcataatatccgaaaccgacaaggaaaacaagtttttaatacagaaaattattgatatatcaagcatctctttaaccgaaagaaacggaattgccaccactctattacggggcaaattagttttctccgcttgaaactacagttccagcgaagggaaactatagtttcatcggtgagaaaccaatggtttcaagtaattggaactagagtttcaagcgtatgaaactaaagtttcaaaccgcagaaccaacagtttcgcaccttgaaactgttggtttcaaggcaggacacaattcataagtacgggggtaataaaatgaacaacttatccatttatggctaatactattcattttcgaacagcgtttttattttgttttttaggtgacagcattattgctatcacactgctgtcaccttgtgctgtcacagcattaagcacttatactctgcaagttagattataatctgtgacagatgacagatatattttgtttttcatttcatagagagttgaattctgagttcaagttataaatgcgacaccgacttatttcacagggaacaattattcagtcattgtatcatattccgcaatcttctccttacacaagcgttcagtaatatctttcagaatatctacgcgggaaataaggtattctagttgttcttgtgagatactaaaatctttgttatagcgagcttcaatgtaagaacgacataataaatcaaaacattctttctctgtatccgtattttgaggaaagacagtagttaattccatagaaaaacgctttaccatcccaccaaattctttgattttatgactcttcggacgatagttcgtaaagaccatcagaatacaattataaatccagcaagactgtcaatttttcctgtgtacgtttgggtaaacgttttatagactttttcattatcactcttatttgtaactttacaaaggtacgaactttgccataccctagcaacaaagatacaaaaaacttataataaagttgatatacacaagtctttggtaccggagaccattccttaactattaaaataattcaaaagcgctattttaaattccggattcgttgaggcatactcactgataaatttagaaagttcctgcggattaatgaatgacagcaattgtttgatgtccacatcgggttgtacaacctcttcttcctttgtaactattctcatttttgaaaatgcactacgacttactcgtttattattatcacgaattgccagaagtgctgccacgacatgcttgcagatttctccatcatacggacaatcacagtaccaggattctacttcctttccgttcatagatatttctacattataatcatccgttccctctacggttgcagtccattcaccgggtgaggtttcttccagttcggaaacggcatctgtatcataatactcttctccgcgcactaatattctatagggtacacagctctcaaaattatctaatgtaatcataatgaatattttactcttttatataaccttcttgttcatacgctttcccatatttatgaatcattgccaccaatggccttaaacgttcgtcagaaaccaacatagccctataacgcaaatactgattatcataaagctgccggtttccatccttgagacgcttctccacatccgcaggaatgaaaaattccgcacggttgcccaatttgacatagaattcatttaaaaagatagaaatgccagccaaatctatgtctccgaaatgaatatagcgattggggattatctttagccagttacacaaatccttcgattgcggataacgggacacgaaaagaactttcattccttcaaacaagtacttttgggcacggatatgctggaaattttctccattctctatacccactactacaacatcttcaggaatacgaaaatattcgtaatcctgcatgaaaatagaagtgccttgcaagggagaaagaacacatggttcgccatgaaaagtagcttctataggcgtataacaattgaggagaaaacctttgaacgtacgggtatatctcaatttagagtcccccgccttcgccacttgctccgaacgcgacacttcatccggacagttcttcatctcaatccaatcttccagctccatgccggaagtataattctgggagatgtagatacggcatccttccgggtcaatcatacgaaaactacgcttactccctcggggaacaatagtgatgattccctcatccattaatctatttgctatcagtccatcaaactttgtgtaaggtatgagctcaccgcccagcattttcagaaccagcctcgccattgccaatgtaaataaactgccactcatttttctatcttattataggttaacaatgggacaacctgtgtatttgaccgcccgtctttactcaataaataggtataacgataatcttccacattgtaagtagtgggagaactatttaccaacaatatattccggcaattggcaaagtctagaatacctttcacattgttggggtgtaacttgcctatttcatccatcatacaatggattttaaagtcaccaaacttacgtgacgccttttctttgaacacattaatcagcatgatattgaccattgcttttaccagaatatccgtgccgtcagaacctacattggcaatcttctccacccatcccgtgtcattatcattctctttcacgcggaactccagtttgaatgtatcggcaagcgccaaccgtctgcgtcccggatcgtcgagcaggaatttcataaacgacaacaaatgccggacagccatcgcattgacatcttcacgggaatcctgcgagaacaagtcaacctttcccatattatattggttctcatcactaaaccgtttaatctccagcaataactgcatcagtttatcgctgctctgaagcgggcgaagagctatttcctttattactccggcaaaattccgcttgacaaaatcgtcgttgatatcctttattgttctgtgtatctcgctttcattacgggtcagtcctcccacttcctgcgaaatccggcggattatatccgtataccgttcactgatatgtttctgataatcggaaatcttatcattatctacaaactcgcacagattggaagcgaaatcatagtaatcctgttctccaaccagttccgtacggaaatgaaacgtgttttttgacgaaaagtttccattgaactgcgtcaccgctttcttgaattcttctgtttttctgatagtggatacgatgagcgacttcaactcttccacaataacatcgcaatttttccgggtaggcttctctcctatttctatcacagaaggcggacaaaaagtttcatctttccggaacatatccactttattcaacccgtcctccaataagtgcaattctttgccaatccgctcaagatgctcgtccgccccttttttctgaacctgcaacttctcctttttcagatcgaaacgttcgtccaatgcaactagcttcgcatcctgttctttcttccggcttcgcgtagcaggttctttatcaaacagttcctccttgtctctttcataataaagaacttgcggacgggatttgctgataaattccaattctttatttatttcggcaagcctgtcgtcatacttgcggatagtgaccgtatcagcaccctttccatttagttcattctcctgtgcctgtttcagttccttttcccgctccgcagtttgctgtttcatccgctctatctcttgctgaatgccgacaacaaactcctccagttccttccggagttccgtcctgctatcattatacactttccggcaagctttcaacagtttttcccgttccgccaaatgcttctccttctcgccttccgccacataaagacgatgaccgatatcattcagttgcgcctgtaattcttcggtacatcctcttttccattcctcctctttcgtcttccatgaggcgtaatcagcctgcaaattcttcaattttgcaggaatctgcattcgctcggcttccatcagatgttgttcttccagaataccatgtatttgcttcgaatacttcttctccaaagaagaaacagcttccccctcttcttccgtcagtcgggtgagacggtcggtacagagttgccgggctgcttgttgcctgtcgcgctcctgcttcatttcctcgggagtgcggacagaacgttcgattgctgtcagattgagtgaaacgccgaacaaagtagcttccttattcactaattgaggttgcagttcattgttgtacaacaccagttcctcatccgccaccttgcctatcgtctcctgccaatccggtttgttcttctccagccattcacacaaagaaccttttcgtttctcaatcaaggcatccaatgtttgcaactgttcttcaatcgcgctccgttctttacgaacggtctccatctttgtctgaaattcccatttcaattctttcactttccattcacactcctgtctcaactgctttatttctccctgttgctgacggatgctatgttccagttccttgtcctttttgcgcagttcgttgatgccgtcttcacaatcggacatttccttttgatggggatgttcgtatttcaccttttgaagtttcaggttacactgtgcctgttcgtcgcgcaactgccggatacgattatccaccgtctgcactttctcttcttgcgttacccttactttttcttcttccacacgaagctgttgcatcaattcttcctgcttgtcggcaacctccgcattccgagcatttatccgtgcttgctggttattctcaaaagtacggaaatcagcttccagtttctcaaacaacaatcggtacttactcaatacatcctcataagctcttgtcagttccgatttcatattccggacttgctccagttcctgaatcagtaattcttcgcaagatacccgtttgatgatttcttcaatctgcatctgctcgtaatgcagacgtttctcacgtatctttttgagcaaatcgcttattatacctatatccctaatcaaaccatcacgctcattggtgtacttttgttgcagttcacccataagccgcagcaaccgttcacgttccgtctccgctttagcctgttcttccttcactaacggaatctcatgcaaagcctgtttctccgcaaagttaagctccgcacgcccttcaccaatctgcttttgggtataaatcaagtcacgataggcgttcattactttctccgccatcttccggacaggcacttctccattcttgttcttaaaccaaagcatcacgtccctgtattcctgctcgaattcctttatctggctacgatagaagtccaaatcaacagaaatatcctcatcactcatcgaacggataatggtatcttttataaagtcagcatccagtttggaatttaaaaagacgttctgtatcgtacggggaatattctgatattttgcactttccacaatggcaaacttgcggtaaggtatcatttcatgcttgcggttattaccgaaaataatgtcccgatacatttcatagctagtcacttgtgcagtaatctgaatcttcgaaccgatatgttcgcggatgcgtccccactcggaatgtaccacattgtgttcgtcaatgaaccagtcctgttggaatggcgcatcaataaaacggaaaaacacccgtccctgggatttggcagctaccacacaatacgccccattctcccgcatcacttcatagataatgtaagaattggcgtatggaaagtaaaaagcatcgaagcttttcttctccttcggaatacccagtcttagtttgtcagcattataaaagaataggatggcacggagcagcgtactcttaccaacaccttgcgtacctataaaatgtacgttcccatccaacttcacttccgcatacggaatatgggcactgttcagaaaaataatcttattcaggtatctcatcttgcacctcctctgaaattgtgatacaatcaaccaagtcctccatataatggaaagccgacaatactttatacgtcccgtcaagttcgttttctttctctatcagtcctatactctccagttctttcaacagtttgccgacaacttcatcatatttcttcttatccgagaacagtttggttgccttttctttcagttcgatatcgcatcctatctgaatctcaatatcagcagcacgaaacagaaagcccgggccgaatgccgaatgataggttttcaggaaactcaagtaatcaatccacttctgaattgcttccagtttacgttccaaatcgactttcgattccttgcgagtaaagtagtaataaccgtcaccgccttccagataaaaaccgatgcctttgtagtaatcataataatcgggcaaatcttcctcaatggcatcatacaagcgtttcacttgggtagagacactattggaagaaataaatccccctttgctaagtatattaaatatctcttcagtgtatttcatggtcatctgtttttagtattcagcatacatcatttggcatatattaaagggtattccacttcgtcggagatttcataagtatccgtaaagcgaagttcgtcggcatactgtgacgccagttggcagaaaaagattaatttctctccacgtgtcacctctttccggtagcgatagttcatcacaaaagagaacaggtgggtgctggacgccataaatgaattatgcacctcctgcaagtttacggtatctatcatttgcgactgcccatccagatatccttccggaatggcatctgccagttgtttcattcctttcggagaatttctctgccgcgcgacaagtttcttcaaaatctgaaaagcctcatcggaagtccgtagattatcaatggaaagcttgatgcgataaccgacctgcggctccatccagacaggatttttttgtgcggcaacagaacggatacttgtatgttcttccaacaagaactggtctttcaagtacttcaacttctttactttctcaaagatacggttctgataatcaatgagattcaggtaatggatgatttgtttctggatttcaatcaggttatggtacgagtcatttagctgaagtttcacatcactaactacattccgcatttgtacgtccatcgccacccggaagaaaacaggctgtccgtagtctatcaattcctcacttttacggatcagcagagcaatattattccgtttctcatcaagccggacgagtttggttttctttatcttataattcggttcgttcttataagtattatccatgttccttttcaagtccatcacattgcggactgtagtcagagcaatgtttttcaggcagcgtttcacttcacgctggtagttgtatttacgttgctcgttattctctttcaagtaatagtcaatgttttcattcagtcgcatcaggtaatcctgcacgaaagatacattgatttcttcatttacttcgagcacatcttcaaagaatttcagatagatatcttccatttccagaaagtcaccagtatcccggataaccccatagtcaatcagataacggatacgctcttctttgtactctgtcatttcaagcgcataatcgtagcggaacgaaagagatttccgtttagcaaacatttctttcagaagttctttctccctgtccagacttttgacaagttcttctatagaacgaaaagtacccatattagttttgtcttttaataatgtttactgcttcaatagactacctcaacctattcacttacaaaagtaaaaaaatctatcgtgtcattactattattgaataagaatttgtctctaagtttagtattcatatctttgtgctttcaacaagaaacaagaaacctgtttaataaaaaatagattatgcgctcattcattattcttctctgtctgataccgactctcctttttgcccgacagagccagctcaagacactgttagaacaagctattaaagggaaaaaggcggaaatagggattgccgttattatcgatggaaaagatacagtcactgtgaataacgacatccaatatccgctgatgagtgttttcaagttccatcaggcagtagctttggccgattatatggataaaaagagattgccgctagggactctgttgtcaattaagaaatcagatttaaaaccgaatacatacagtccgttgcgagatcagtttccacagggaggattcgaaatgagtatcgctgatttattgaaatacaccctgcaacagagcgacaataatgcttgtgatattcttttcaattatcaaggcgggccggattctgtcaaccggtatatacaatcactggggattcgtgattgcgagatcactcatacagagaacgatatgcacgaagacttagacctctgctatagcaactggagcacaccgctggctgctgccaaattactggaaatattccgccgcaaaacattgttcgatgaagcctacaaagacttcatctatcagacaatggtagaatgccagaccgggcaggaccgtctggttgccccgttactgggcaaaggggtaaccgtaggacataaaacaggaacgggagatttcaatgcgaaaggacagcagataggctgcaatgacattggcttcgttctcctacccaacggacacgcatacagtatagccgttttcgtgaaagactctgcggaaagcagtctggaaaacagtaagattatcgctgatatttcccgcattgtctataaatatgtaatccggacaacaaagtaatacgacaacaacgataacaataaagataaagacaaaaattaaaatcagcatgaaactacatcatatcgctatctggacttttcgtctggaagaattaaaagatttctatgtccgctttctaggtggaacgagtaatgaaaaatacatcaatccgaagaaaggattcgagtcctatttcatctctttcggagaaggcccttctctggaattgatgagccggacagacgtacaaaatactccgatagaagagaaccgtcttgggctgacgcatcttgccttcaccttccccagccgagaagaagtgcttcgcttcacggaacaaatgcgctccgagggatacatcatagcaggcgagccacgtacttcgggagatggttatttcgaaagtgtagttcttgatcctgacggtaaccggatagaatgcgtatgccccccgcaggcagacgaaccacaggatgattgttcgtttgaaacggaacgcttactcatccggccttttcgggaaaatgatgcagaaacattcttcgcttgttgccagaatccgaatctgggcaataatgccggatgggctccccataaatcgataaaagaatcgcgcgaaatcctccagaacgtgtttatcggtcaggaggatatctgggctataacactgaaagacacccgacagctcatcggctccatcggcatcgtccccgacccgaagcgggagaacccgcaagtacgtatgctgggatactggctcgacgagcctcactggggaaaaggatatatgacggaagcggtacaagctgtgcttaattatggtttcaacgaacttcagctcagccttatcaccgccaactgttatccgcacaacaagcggtctcagcaagtattggaacgcaacggctttatctgtgaaggtgtactgcatcaggcggaacttacctacaacggaaatatatacgatcacctgtgctattatctgcctaatatatgccgacctgttccggaagactacgacaagattctgcaagtatgggaagattccgtacgccatacgcatcacttcctcacggaagagcatatccaattctacaaaccattggtacgcaaccactacttatcggctgtagaactgtatatcatccgcaataccaatggaaagattgtcgcctttatgggactgagcgacgaactcatcgaaatgctgttcgtaagccccggcgaacagggaaaaggatatggcagacgattgctggaatacgccacccggagaaaacagataaataaagtagacgtaaacgagcaaaacgacaaagcactcggattttatctccgcatgggattccggatcataggccgagatgaaacagacggtatgggcaagccttatccgattctccatctgcaactgccggaggcagagaacggcaacaagtaaaaacaactcattccccccaaaaaacgagagccatatgaacctgcgtgcaagactatctgagcgtgtacacatcgagaatatcagagagatacttcattacatacaagacgacgaacgcctcagagaagaaatctaccggttgatatatgatgaggacagcatcgtctcttaccaggcactgtgggtttgtacccatttctcgaaaccggaagtagaatggctgagcgggaaacaaaatgaattgattgatgcaacgcttacctgcccgcattcaggaaaacgaagaatgctcttgaacctgctatgtcagcaaccgctagccgaccctccacgggtggacttgctggatttctgcatagagcgtatggtatcccggcaggaaccgcccggagtgcagtcactttgcatcaaacttgcttaccaactgacccgtttcatcccggagcttcaacaagaattgcgcacaatgctggaaatcatggaacccgaattactggttcccgctatccgctctgtgcgcaaaaacacgttgaaggcaatcaaggcaaagaagaactaataattcttcatcagttccttaaaataccattgcatcttcccaaaattctccagggatatatactcattttcgttatgtatcgtacgctgctcgtactggttcagacaaataggcaagaaacggtagatgtcatcgctcaccgtctgatatttgtaggaatcggtacccccgatcgtaatataagaggtaacgatagctgcgggatatatttttgccatctcttccttgataatctcgaagcctctaacgttttcaggagagatgcttgaaggctcacgttccgataccacatgaatggcaacatcgtaaccttcacacaacttctttacatgctctatcaccccggcaaccgattcaccgggcaaaatgcggaagtttacagtaacctcagcctccgaagccaatacattggccgcatcactgcctttagccatcgtgatggcggttgtagtgcgtaccagcgcattggaggcgggagatttttccatagtcttcagcagtagcggttcgagcagccattgattggctatcgccatctgcgaaaagaatcccatttcctctcctacattatcgaaaaatgctgctatgggagaaatgatttctgccgggaactggttgtcattcagcttctctatgatttctgcagcatacaccagagaactctttgaaggtggcatcgaagaatgccctcccatcccttttatcgtaaggcgcaaggtcagaaagcctttttctcccactcccaccaatgccaacggttcttgtatggattctattgccgaaccgggagctgcaatgatgcctccttcgtcataaaccgcactgaagcgtagccctttctgtttaaaataatcggcaattttgaaagccccctgacgtccgctcacttcctcgtcttgcccgaaagcaaaccagatgtctctttccggttggaagccttcggctatcaggttatccgctccctccatcagcgagaagagcatacatttcatatcaagtgttccacgaccgtatatgcgtccgcctgcaacagctcctgagaagggaggataatcccacttttccgaataagtcctgatgggaggcaacggtttgtcgtcaaaccggaaaaccgtatctgcaacagtcgccgtagacggatcatatccgactactggaaccacatcgtaatgggacaagaataatatcggtttcagatcactgttcttgcctttccaatgaaacaccagcccgtatgtattaatggtatctacatccatcaccctatatacctccggataagaatcggccaggtacttcataaattcatcgaaaggcttgaaatcagtctcttcatacacttcattactgattgtcgggattcgtattcctccgacaaaacgacgtactgattgctccgaaggagctgtgttcaccagttctttatcatccgcattcttgggcactttaccaaatttataagttacggtccgtactatcaaaaccagaataagtataagcaacaggattaataaaactgctaaaatctttttcattttcatatatcaatgctttattataaaacataaatggaacattattgttttgagaatatgcttttgcgagaggaatccgcatcggttgaatacctcgtgaaagcagcttataataaacctttaactagaaattaaaattatgtgtacaagagtcgtttattcggaaaagaaacagacttgtcggaaggagctccggtactcaaattatctatcgccaacggtgaaacttatcatggaaatgcaacgaaagagtttaaaccggcacagccgttcagatttatgggagtaaaaggataaaattatccccggaaacgatccatctgaagcacatcccaaaagtttttgtatctaacttttgagacgtatttcgatcatttccggggataaaatctgtttctttaacagcttgccattaattgaaataataaaggaatacagcaattccttccaacgccttctttggttggtcttttatttcgatagcaaacttgatttccgcttttgccacaccacgcagattagtcagcgagtgcaaagtagtcaccagacggatgctctgtcctgacaatacagcctgaccgaatttcattttgtccatgccgtagttaatcatcattttcaggttattcacctgaataatctgattccacaaataaggaagcatggataatgtcaggtagccgtgagcaatcgtgctatgataagggctgtctactttagcacgttccgtatctacatgaatccattgatgatccagcgttgcatcagcaaaaagattgatacgttcctgcgagagttccacataatcggaaacacctatctgttggcctactagtttttcgaattcttcgtacgaattgataattactttttccataagtcttatcgtttttatgggggttatttactattaaattggggacaaaaataggaaaaataaactgatatgccaccaaatttataaataaaagcaaggaatgaagtatttaggtatgttttacaaaccggaagcccgtttcagtgcttctgacaaaatactgtaacccctgccattcaaatgtaaatcgtcgagagtcaactccggaagtaaagtagacatccaatgcccaaaataccatgtgactgttgccaagaaaggcaaatttaggtttctctcccattctattcatgttacttcattcgataattcacagatttactttacttttgcaaaggtaatcacattcatatatataaaccgatgatacattttttcaagcaacccatttctcaccttgcgttaccggataaattcacttatcctttccactatacgcctcatccattgtgcgtgttggcagcggaagaagtgaaagaatatatcgcgagccgagaagaatggcaagaagaattagctttcggaaaaatgttcggggtactgattgtacaaaaagagaataaacaagagactgcaaaaaaagaagcagtcaatgaaattggttatctcgctgctttctccggcaatctggcagggaagaatctgcatccttattttgtccctcctgtctacgacttattgcaaccggaaggattcttcaaaattgaagaagaacaaatatcttccatcaatatccgtattcgtgaattagaaaacaatcgttcttatctcgatttaaaagaaaagtggaagacggaaacggaacaggctaaagcaatcttgaatcaggctaaagcagcactcaaagcagcaaaggaggcgagagagattcgccgtcaatcatcctctgccctttccgaagaggaacaagcctccctgatccgggaaagccaataccagaaagcggaatacaaacgactggaaaaaaaatggaagaaacgattggaagaactcgaaacggaaacgagacacttcgagactgaaatagaacaactgaaaaccgaacggaaggaacgttcggcagccttgcaaagaaagttgttcgggcagttccggatgctgaatgccagaggagaagtgaaagacctatacactatcttcgagcagacagttcagaaagttcctcctgccggtgcgggtgaatgtgctttgcctaaattgttgcaatatgcgtatcttcatcaattaaagccattggctatggctgaattctggtggggagactctcctaaaaacgaaatccggcatcacggatattattatccttcctgcaagggaaaatgtgaacctattttgcagcatatgttgcaaggactggaagtagacgagaatccgttgctgaactccatccatgaggatgaagaactggaaatcgtatatgaagatgaatggttagtggtagtcaataagccgacaggaatgttgtccgttccgggaaaggaggaggacagagattcagtctatcatcgcctgaaaaagaagtatcccgatgctaccggacctatgattgtacatcgcctcgatatggcgacttccggattattgctcgtagctaaaacaaaagaggtgcatcaacatttgcaggcacaatttgcaagcagaagtatcaagaaacgctatgtagccgtgttggatggggcaacagcaacagtagagaagacagcactgccgcccggaagaacaggaagaatcgaactccctctctgtttgaatcctcttgatcgtccccggcaaatcgtcagtagagaacatgggaaagaagcgattacagaataccgcatcatcagtgaatcagaaaaacacatccggattgctttctatccgttgaccggacggacacaccaattacgggtacacgccgcccatccggagggtttgggttgccccattcttggggatgaactttacggaaagaaagcggacagactatacctccacgccgaatatatagagttccgtcatcccatcagcggaaagattctacgcatacagaaagaggccgacttctaaacagtaaccgtacttgtgaacacctgcttcttcaacctgcgataaacgtagataaatgccggtacgaggaacaaatctgccgctatccaagccatcggatcaccgtagcagacagcaataaaaccgaataccggtacggcatagagactgacaagaatacgagcaatcatctccgccactccggagaacatggcaagattggtaaagcctactccctgaatggtataacgcaagatacacaacaaaccaagcatcgggaagaacatacaggagatatgcaggaataactcggtatccaacagaatttccgtttccgacggatctacaaagatcaatgcaaaatatttagctcccaccatcagaagaacgaatgtaaatgccgcataaacgatcatcatcaaagcactcgccttaattcccaaccagacacgctccggttttcctgccccataattctgtccgctatacgtagccatcgcaattcccagactctcgaacgtgcagataaagaacatcttgatgcgcatagcagacgtaaaagctgccacacacgctgttcccaatgcattattcgcactctgaagcatgatgctgccgatagccgtgatagaaaactgcaatcccataggcacaccaatgtaaagcagcgtcttagccagtttcgactggaaccggcgttctttcggagtaccttgcaatatttcaaacttccggtacatataaatgtagcagagaacagccgacaatccttgcgaaaagacagtagcaatagcagctcccgccactccccagccaagtaccaaaatacagaacaaatcaagaatgatattcagaacagccgcaaacagcagaaaccaaaaaggcgtcttactgtctcccaacgcacggataatgctcgaaagaagattatagaagaaagtacacggcacaccaataaacgtgacaagcaaataagcatacgccccttcgaaaatattctccggcgtacgcatgatccgaagaatatcctcacataaaatacaggtgagaagagcaatcaccacagacattcccgcagccagtttcagactgacggccacataactgcgcatcgtactgtaatcccgcgccccaaacttctgcgcaacgggtattccgaaccctccgcaacatccattgcagaacccgagaataagaaacaccaccgatgtgctagctccaacagaagctaacgcatttattcccaagaactttcctacaattgcagcatcaacaagcgaatacgtttgttgcaacagattgccgagtaaaagcggcagtgtaaactttaaaatgagaggtaatgccggccctgccgtcatttctttagaagttgccatacgtctatgttctaaaatcggatgcaaagatacggaaaattcaatgaattagttcttgatttgcgttcctcttttagttgacataaatcaaaaaaatcagtatgagagcatgagtctcccggtctatcgtttcaccaaccgtttaggtgaaccatgccacgagcatcccaggcagaagacttctgtcaaatcgaacccctccatcgaatcttccggatatttgggaacaacttcaccatcttcgagcacataaaccagcagcctgtcaccctgttcattcttcacatacatagctgcaatcttgcattgcggacacaataactttttcatgctgcaaagatacagattgtttccgtcaaccacaaactcttccaacgatgtttcagaagcccgttcatgatttacagtttatctattcttccagaatcccggataaaacaacaggagtacactaaacaattccagacgtcccaccagcatcagaaaagaaagtatccactttgccagatcaggtaaagaattccacgaatatgcaggcccgcaagttcccaatcccggaccgacattgcctatactcgaaataaccgtactgacggactcggaaaagccaactcccaaaaacaaaagagccgtccacccaatcaggatcagaaccagataaaaagcaaagaaaatcaatacggtagttacgatagaagaagacaccgtctgcttattgatacgtacgggaagcacggcattcgggtggagcagatgtttgaactcattccgaatggcacgtgctacaatcagcaaccgcatattcttgatacctccactggtagaacccgtacaccctcccgaaagcatcgcaataaacaacagtaaccacgtgaaaggaggccacatattataatcatccgtagcaaaaccgcaggaagtatgcaccgtagacacctggaacaatgctttccggaaagccagttcccagtcataatgattttgaaagacgagcgccaacgtgataagaaaagtcaagatacccactgacgccagaaaccagtgcagctcttcatctttgaataaacgaccgacttttcctttcaaacacatcagaaacaaagagaagttgatactggaaacaatcataaagatagccaccacatattctatatacggagaattccagtaagatatactgttctgcttggtagaatatccgcccgtagcagtagtggcaaacgactggcaaatggcatcaaacaagctcatgcccccaaacatcaataagacagtttccgaaactgtcaataccagataaattgtccacaaccacttggccatgacattgattttcggatgggtacggtcgtgcgtcactcccgtagattcagcagagaagagttgcactcctcccgtggtaaagataggaagaatggcaatcgtgaaaaacacaatccccaaaccaccgatccactgcgtcaggcttcgccagaaaagcataccgtgggaaagggattcaatatcatcgagaatagtagctcctgtagtggtaaacccggacatggtttcgaaaaaggcattggttatcgtatcaatgcttccgctaaaataaaaaggaagcatgccgaaaaaggtaaaaaacacccatgaaagagtgaccacacaatatccgtctctccggctcatcttattctccgctccccgtccgtagagcagtaacaatccgcctaccacagcattgatgatacaggtgtaaagaaagtatttataatcactttccccgtaaccagccgacactccggcacaaagtaagaacatccccaattcgatgaatagcaacatacccagcacgcgccctatcatcttccggttaatcatgctattattcttactccgaatatacagactgttatctgaaatgtactcttccataactcatgaattattttgtatgttcccctcatagccaagagtatgccaaaatgaaaaggattctgataattagtttgtaatcaatgcaatatttttttcattttgaaaaagtaatctctaaataccctaccaaaatgaaagggtgcttttcaaaatagaaaaaagaagaaggtgtattttaacagaatacgcctgcatttctgcataatcttcgctatctttgtcattccaaagtgtaaaaaagaaagagatgaaagcatcacgcattgcgcacgaaaagaaaacggtagagttgatgatccgcctctattgccggaaaaaagaaaaaaatacaattctttgtgccgactgtgaagagttgctccgctatgcccacgcacgtctcgaccattgtccgtttggagagaagaagagtgcatgcaaggaatgcaccgtacattgttacaaacccgtcatgcgcgaacgaatgcgacaggtgatgcgtttctccggaccgaggatgttgctttatgcaccctggcaggccatacgacatttattgaacctataacttactaaaaaaatcagtaatgaaaaaagccattatcattggcgctacctccggcatcggacaagaagttgcaaaatgtctgttactggatggatggcaaatcggagtagccggcagacggcaatctgctctcgaaaacctgcaacgggcagcaccggatcagattcaaattcaaacgttggacgtaacccaggaagatgcaggcgagaaattgaatatgctcatcgacaaggtgggcggcatggatttgtttcttcttagttcgggcatcggtttccagaacacgaatctgaacatggaggtggagctgaacacagcatacacgaatgtagagggatttatccgcatggtggataccgctttcatctatttcaggaaaagcggaggcggccacctggcagtcatcagttccatcgcgggaacgaaaggacttggagtggctcctgcctactctgccaccaaacgcttccagaacacttacatagatgctctcgaacaactttcatatttacaaaaactgaatatccattttaccgatatccgtcccggatttgttgccaccgacttgctcaacgacgggaaacattatccgctattgatggatgcaacgaaagtgggacgtcacatcgcctggtcactggagcggaaacaacggatagtagtgatcgactggcgctaccggatactggtctttttctggaaaatgattccccgttggatgtggaaacggctgcccgtgaaaaccaattaacaccaaaagcaaaccaggaaagaaataaatgaataaatagcaaaaccggattacttcttttccaatatttctacttacatttgtcttgtaacataaacttataatctaacaaaaaaagatggaacaaaaattttgtcaaagttgcggtatgccgatagacgactcaacttttggaaaagaaacggacggtagcaagaacgaagattattgccactattgctatgcggacggacatttcacgaaagagtgtaccatggacgagatgatcgagcttaatctgaattatctggatgagttcaataaagactcggaagtgaaatacacagtggaggaagcacggaaaacgatgaaggagtactttccacagttgaagaggtggaaacagtaaatcagtaatatagagatgcgtcagaaactattaagaatatgtttctgacgcatttttagctgacaaagtatcttctttgaaatcaatcaacaacaccatttatttccgggtgtctttccaaccacttcactgcataagagcatgttgctttcggcttcatcccgttagctaatgcataggcgtaagcagcttttaccaaagcagcggcaatcccccgcccttcaatgggttgtggcacaattgtgtggataatatcaagagaatcacctatcaggcgatattgtacaaaggcggtgcgaccgtctacttctgtcttgaacaatttttgttcgggttgatgaataatttcgtaatccataatttctgttgttttaaagttgtctcattgttcgttaagcactccggcaaaataatcttaggttatcaggcgcagattgcgatcagagttgctcgatccacttcaactggctcgtatcgtatccacgacgctcggcagcggtgacgagtttcttcttgatttcttccggcagttggggtgtacggcttagtatccagagatatttatcagtactgctgcctaccagggcataattataattctcttcatccagttccaagacataataatcagaatagaaactaaggaagaaagacactttcagtttgcccggttgtgcgggatcgggtattttggcatgtccgttggcagtcttgcagatgtcgtaaggagaattacgtttgcatccccggttctccacacgaatcatgccgtcgggacggagcgtgtaagtagccgtgacgtctacaagtccgtattcaaaacgattctcgtagcgggctatttcataccaaagtcccatataccggtgcaggtcgagagaggtaaccgtactatggtttgtacctctgaaaaaacgttcgacattgggaatggagaaatgaaatcccgcctccgtcagacgcgttgggcggactctctggccagcagtcaggaaagatgccgcttcaccatataagatacggaaaattcgttgcggagctaccatcgttgtccatgcccgataagcctttcccatcgcacgggtgaaagcatattgcgagatctgctgcggagcaaccaggttatataccccatgtgtctcttcgtgagtgataaagaactccattgcacggcaaagatcccgtatcgatatccacggaaaaacctgtgtaccgggaccgatggcggtggctatcttggtagcttgcaaagggcgaagcatctgctgcatcgctcccccgtccggagaaagcactacgccaaagcgtgtgataacgagccttgtaggttcgggacagtgtttcgcctctttttcccacgcatagcaaagatcggacagaaaaccttctccacgggtacgggtatattcgtccacctccgcttccgaaggataataacctacagcagaagccgaaatcatcagtttcggtttcgttttgactgcgttcaaagcgcggataatacgattggttacaacaatacgactgttgaaaagctcctgtttatattccggtgtccaacgtttattgataggtgcacctgccaggttgatgacaacatcacaatgggtcagtgcctgaatcaaataaccggacataccttcgcgaaacatcgaccttcctagaggaatgatccgatgtccgcccttttctgtaagataattagaaagatgtttacctatatatccggtagctccggtcattgctatattcatcttgattcgttgtttattttaactctattagaaaaacgtataaaatgcaagaaaagttctttgaaaaaagcaaaatgaggttatctttgcaagatagacgtaaacattgaagcatccaaaaaggttataaaatgaaaagacaaatgaaaatcaactatattcttacacttatattagtattttgtatcggtgcttccatcccaatattgacaggcagcagccaagtgaacgaacaacattccgctgaatcggaagtgccttattgtgtcactccgcctactgttcccgcacaggtcaccttcgacggggaaacgattgacctccggcgctatgaccgccgcgaacggatggaccgcgagatgatggccttcacctatatgcactccaccaccatgttattaatcaagcgtgccaaccgttacttccccatcatcgaaccgatactgaaagcaaacggtattcctgatgacttcaaatacctgatggtcatcgagagcaatctgaataacatcgcacgctctccggcaggagcagcaggtctatggcaatttatgcctgccaccggacgggaattcgggctggaagtgaacgataacgtagacgaacgctatcatattgaaaaagcaaccgttgccgcctgcaaatacttcaaacaagcgtatgccaaatatggcgattggatggctgtctccgccgcctataacgccggacagggacgtatctcctcccaacttgaaaagcagttggcaagtcatgccatggacttatggctggtagaggaaacttcccgctacatgttccgcctgctggcagccaaagagatattcaataacccgcaacgttacggattcctcttgaaacaggaacatctgtatccgcctattccttataaagaggtaaccgtcaacacttctatcgacgatctgaacgactacgcaaaatcacagggaatcacctatgcccaacttcgtaatgccaacccctggctgcgcgacacttcattgaagaacaagaccggaaagacatacattctctatattcctacacaagagggaatgtattacaacccgcaaaagaccgttgcctacaataaacagtgggtcatcgactaaaaagactttttctttaattccggccaagcactattgatatgaaactgaaagaaagaatccatcgttttttgcatgacgagaaactgaaacgaaagttatacgtcatcatcttcgaatcggacacccctgccgggaaattgttcgacgtgattcttatcgcctgtattctggtcagcgtattgctcgtcatcatcgaaagtctgaaaggacttcccacctatctgacgactccgttcgtcattatggaattccttttcaccggcttctttactttcgaatacctgacgaggatctactgttcaccccgtccccggaaatacatattcagctttttcggtatcgtagacttactggccacgttgcctctttacatcggtctgctcttcccgggcgcccgctatctactcatcattcgtgccttccgcctgatacgtgtgttccgcgtcttcaagcttttcaactttctgaatgagggggaacggctgctcactgccttgcgtgaaagtagtaagaagattgcagtgttcttcttgtttgtcgtcattctggtgacttccatcggaacgctaatgtatatgattgaaggaacgcaacccaactcccagttcaacaatatcccgaacagcatctattgggctatcgtcaccatgactaccgtaggttatggaaatattactcccgccaccggcctcggaaaattcctttccgcctgtgtcatgctgatcggttacacgattattgccgtacccacaggtatcgtatctgcctccatgatgaaagagtataaacgcaggagagacaaagaatgtcccaactgccatcgctccggacacgaagataatgcagagttttgcaaatattgcggccacagcctaaacccatccgaaaccaaagcggaagagaaataaatcctctacgatctacgccggacgaaatgctcgaataagacaatgaaaacgcatcccacagcatagcaggcaatatctccccaatcgaacgtagaacccagcacaattcgggctacgcggttcgtgacacccaatgtttccaccagccggaagtattgcaagacttctacaaaacaggcaaaaagaaagacataaaacggcatccgcggaatccccgtcggcagaaagatacgtacaaagctatataccagcactaccaccaacatatctccgacataaggtcgtatgaaacggtcgcgcacatacaaagctatcaacacctccatacagaagatcaccagaaagctgattatataaaaaattcttttcttcattatttgctcggtctcgggattaaacatttatttgaatctgcgaatatacgataaaatgaattggatacgttcaaatattactaaatgattgatacaaaaaggggaaataattgtatatttatagtcctaagcatttttccacaaacaataaaaaacagaaaggagattgaacacatgatgttgaatatggattttgtaatccgtttattggtcgccggaatattgggagccatcatcggactggatcgtgaataccgtgccaaagaggccggataccgcactcattttctcgtgtcgctaggtagtgctttgattatgattgtttcccaatacgggtttcaggaaattataaaagaaagtagtgtcacactcgatcccagtcgggtggcggcacaggttgtcagcggcatcggatttatcggtgcaggaaccatcatctttcaaaaacagattgtacgcggactgactaccgccgcaggaatctgggcaacagcaggtatcggcttggcggtaggtgcaggaatgtacaccatcggtattgccgccacggtgttaaccctcgtcggactggaactacttagctatctatttaaaagcatcggaatgaaaagctcgatggtttctttctcaactcccaacaaagacatactgaaacagatagcggacagattcaactctaaagactacctgatagtctcttacgagatggaaacgctacacacgggcgaagcagaatattatcaggttacgatggttatcaagtcgaaacgaaataatgatgaagggcatctgctttcgctgatacaggaatttccggatgtaacggtgcagcgaattgaatagtcagactttcgctcctctcccaaaatggaaatctacttttgcttttccgtcagatacttccaataacgtacaggcatatcctgcctgtgcttcctcggattcatgcgttctttgatacaaatggccttgaaatatgtcttccaaagttgttggaaaagcttctcatccttgtccatcagactttcgtccagcatccccgtaatcaaatgggattcacgactgtcatcatcaaacgagatagtcgtcacctcctgcaagtcataataaaatccgtaacggcgtttcatgtcgtaaataatccacttctgatcggcaaaacggtctttgaaatggtgaaccgtcaacgggagcgcattatactgcggttcgaaagcggcaaagaatgtaccgtcggcagctttctggaaacggacaaactgcatcaggtgtacacgttcgccatccaccttcttccatatttgcgccaattgcaaaacatccggatcaccaaaattggtttcaatggaccggggcgcgtcgatcgctttacggatataacgaaaaataagcatccctacttccggaagctccgacagccaactttgtgtgaggcaacccaaagcggaagaggaaactttcttctgtaatccccgccacacacgcccggccttttcttcatcggtcactaccgtatgcagctcatcacaaaataaaggcaaagcatctccttccgacagcaaagcatcggggaaagtcttgcggaaataggcgtcgaacacagccgtcagcagcccatcaaaggttttatcgtaaatataaacattcataaaaaacaccaagaatatttactattcgccaaaatcaagcaacaactggcgttcatccactttctttttcggtttcggcaacaataagctgcgcacccgttgcggagaaagttcgttcactgtctgcatctggagaggcagttctttgcaagtgatgaaatattgcgctttcttcatcaccactcctatcttcttcagttcataaaatcccagccgcgaaaaacgacgggaagcaacaatcagtttcgccgacttcacccctactcccggcacacggagcaacatttcgtagtctgccttattgatgtcgacaggaaactgttcgggatggcgcaaagcccacgaaagtttcgggtctatttcgagatcgagatccggataggaatcatccacaatttcatctaccttgaattgataaaaacgcaataaccagtcagcctgatagagccggttttcacgtaccagaggcggctgtttcaatgccggaaggcgcttatcatacgtattcacggaaacgtagcccgagtaatagacacgtttcatggtggggcgcccataaagtgccgacgaaagaaaaagaatatctttatccgattcggaggtagctcccacaatcacctgggtactttgtcccgcaggtgcgaaacgcggtgcgtggcgaaacttctgccgttcttctttactctccaacacgccttgttgaatgtatttcatcggagcaaatacacttttatggtctttttccggtgcaagcagtttcaaattttcttctttgggaatttcgacgttgacgctaagacgatcggcatacaatccggcttcattcactaattcgcgactggctccgggaatactcttgagatggatataaccgttaaaacggtacacttgccgcaaatctttggctacacgcacaagtctctccattgtatagtccggattacggaccactccggagctaagaaacagcccttcgatatagttacgacggtagaattccatcgtcagctccaccaattccgaaacggaaaaggtagcgcggggaagatcgttgctacgacggttgacgcaataggcacaatcgtaaatgcaataattggtaagcatgattttcaatagcgagatacatcgaccgtcctcggcaaaactgtggcatatcccccatcctcccacagtgtttcccagcgttcccggcttattggaacgcaccgtaccactggaagaacaggaaacatcgtacttggcagattctgcaagtatcttcagtttagctaagacgttttcgttcatcattcccgatcttgattcttttcgcaaatatacgattaatattaagaatacaaaaaacagactttcacaagcccggttttcagtacataagttgcaaaaagagaagcttaaaaaataaaaagaggatatatcatgataatataccctctcatttcttctgatatcttagtagtttctaatcttactttttagaagcttccaaagatgctttacggaattctttcattgctttttcgatttccaaagaagctttacgagcgcgagttcctgctgctttgttaccattttcaatctgagcgttagcatcttttgcgaagtcagcatacagagctgctactttttctaccaattctttcataatccttttatttttttcgttaataatgtgtcgcaaaaatacactgtttcccgaaataaacgcataaaaacaatcttttttttgaaatattctttgaaaataatgcaaaaaaaggtcttttcgccatttttacctacctttgtagccatgaaaccgcttacagataccgattatatacatactttgattgctgaaggagagcatcaacaacaggacttcaaatttgaaatttccgatgcacgcaagatagccaaaaccttgtccgcttttgccaacaccgacggaggaagattgcttattggcgtgaaagacaatggaaaaatagcaggcgtacgttccgaagaggaaaaatatatgattgaggcggccgcacaactttattgtgtacccgaagtggaatatacaatgcaaacatacatagtagaaggacgacaggtattggtagtcactatcgaagaaacccttcacaaaccggtgtatgccaaagacgaaaccggaaaaccgctcgcctatctccgtatcaaggacgaaaacatattggcgacacctatacatctccgcgtgtggcaacagagcaacaatccccgtggcgaactaatccgttacactgaacgtgaacagcttttgctcgatcaactggaacacggtactctactatcactcaaccgttattgtcgtcagacaggaatctcacgccgtgccgccgaacatctgcttgccaaattcgttcgttatggtattgcagaacctgtattcgaaaatcataaattctacttccggatgaaaagtgaatgatcgcaattacattagagactttatgctaaacaataatggtacttttcggctcatcgcagaagaaagtcggcattcagaatcctgttttcagaaaagagacaatgccggatattgaaaaggacttggaatgttggtgaaacccaactgttttttgtacctttgcacacgaaatatcagcttggttggtatgcaacaaagcaatcacacacgttcaattagtaaattgtaaataataaaattgtaaatacaacaatgggcttatttggtttattcaagaaaaaatccgatgaaacaaaagtcggcaatgtagaagatttcatttctctgacccgggtctatttccagtcagttatcgccactaaccttggtatcacaaatatccgcttcctgccggatgtagccaacttcaaacgtttattcaagatacctacgcaaaacggcaagttaggattggccgaaaagtcagcttcgcgcaaaatgttgatgcaggactatggattgaatgagagtttctttaaagaaatcgattcttccgtaaaacgcaactgccgtactcagaatgatattcaatcttatctgtttatgtatcaaggattctctaacgacttgatgatgttgatggggaatctgatgcaatggaagttccgcatgccgtctatctttaagaaagcactttatggcatgactcagaaaacggtccacgatgtttgcacaaagactgtatggaaagctgatgatgtgcacaagactgcagcggctgtacgtcaatacaaggaacgtctgggatactcggaacagtggatgacggattatgtgtataatattgtcttattggcaaaaaaagagccgaaacgcaagaatgatgacacggaaacgaaaaaataagttgctctaaaatgttagaaaatcgtaaagattagcacgatagaaaaagcggaggtatgaaacttccgcttttttcgtatctttatataccattaaatagagagattgcttatgaaacaaaagaaaatgcttacacttactttttcacaattgaaacaaatctataatcaagaaattccggaagtggtggagatggctgataaaagctcttctgttgaggagtttaagctaaaaatgcaacgatttctggagacttgcagaatggagaataagactgcgaaagaggctagggagcaaattcgacttttactccattatgatggacaggatgtccatgaactgtctacgggacaggatatgtcaataaagacaatacggttgctttatgaatttctgacgggaacattagaaaacatggaattaccgacagacttattcatagaactctttcaaatgttcaaacgattgaaaggggatgtaatacctttaccgtctccgcaacgtatcaaaaaccggaatgaccgttgggaaacaggattagatgaagaggtacgggaagtgcgggatgagaataaggagcggatgttgcatttactgattcaaaagattgaaaacagaaagtcgaaaccttcggcacgttttcattttgaagaagggatgagttatgaagagaaatacagactggtgagtgaatggtggaatgactttcgctttcatttggcaatggctgttaagagtccgggagagttgaaccgttttctaggaaactcactttcgtcagaaacaatgtatttgcttcatcgtgcccgaaagaaaaggatgccgttttttgccactccttattacctgtcattactcaatgttacgggatatggatataacgatgaagcgatccggagctatattctttactcgccacgactggtagaaacttatggaaatatccgcgcatgggagaaagaagatattgtagaggcggaaaaaccgaatgcagcaggatggctattaccggatggacataatattcatcgacgttatccggaggttgctattcttattcccgatacgatgggaagagcgtgcggaggactttgcgcttcttgtcaacggatgtatgattttcagagcgaacggttgaattttgagtttgaaacgttacgaccgaaagagtcatgggaacgcaaattacgacgcttgatgacttattttgaagaagatacgcaattgcgggatattcttatcaccggaggagatgcgctgatgagtcagaataagacacttcaacacattctggatgcagtatatcgaatggccgtacgcaaacagaaagcgaaccttgaccgtccggagggtgaaaaatatgcagaactgcaacgggtaaggttaggttcccgtttaccagcctatttaccgatgcgcattaatgacgagttagtggagatattgcgggaattcaaagaaaaggcttcggcagccggtgtgaaacagtttattatccagacccatttccagaccccattggaggtgactccggaagctaaagaggctattcggaagatactttccgctggatggatcatcacaaaccaattggtgtacacagtggcagcttcgcgacgaggacatacaacacggctccgacaagtgcttaattcattgggagtgatgtgttactatactttttccgtgaagggctttaatgaaaattatgcggtgttcgcacccaacagccgttcaatgcaggaacagcaggaggaaaaaatatatggcagaatgacaccggaacaggcagaagaattatataagatattggaaacgaagacgggagcagaaaaagatatgaaagaaaaagaagaggttgccaaacagttaaggcggttcatgagaaaacatcacttacctttccttgctacagatcgcagtgtactgaatttaccagccatcggcaaaagtatgactttccaattagtgggacttacagaagaagggaaacgcatcctatgttttgaacatgacggaacgcgccgccacagtccgattattgaccggatgggacaaatttatattgtagagaacaaatcgttggccgcttatctgcgccaattggctaaaatgggagaagacccggaagattatgcttcgatatggaactacaccaaaggggaaaccgaaacccgtttcagtctctacgaatatccggatttccccttccatataactgacaaaatgagtaatctgagtattgaagattaatctttctcttcttttacacgtattactatattggcaataattgcagtcagacctccggtagtgattcccgatgaaaagatacttcgaatcgcttcgggggcttgttgcagtacgtccggcattaattctactcccaagccaagagaaaggctgaccgctaataccaacgtttctttacgaccgatttcctgagaagagacaatgcggatacctgcggcggctaccgtaccgaacataagcaaggttgcgccacccagtactggatcgggcattagtgaaaaaacagcccctacaatagggaacaagcccaaaagtacaagcattgcagcaatataataacccacatagcgactggctactccagtcagttgaataataccgttgttctgcgcaaaaatagagtttgggaaggagttaaaaactccggcaaggaaagagttgaatccgtctgccattactccacctgaaactcgtttcagataagaatcaccttcaatcggaagaccggatatcatagaattggcagtcacgtcgcccgtcgcttcaatagccgtaatcaagtaaaccagcccaatagctataaaagaagaaacattgaagtcaacgccatatttaaaaggttgaggaatattgaaactcatcagcattcctacattcagagagctcatatcaactttccctaagacaaaagccaaaccataaccaagacaaagcccaagaacaatggaactcatgcgcaggtatttatttccgcaacgattgaaaaacaatacacttaaaagcaccagtgcagcaatagatagattttcccaagttgcaaaggttccgttatccatagcagaatatccgcctccgcaagacacgatcccgacttttatcaggctcaatccgataagtagcacaacaataccggatactaacggagtgatgatatgacgcaagtacttaaaagtacggctgacaatcatctcgatgggcgcggcaaccatacaggaaccgaaaattagaggtaatccaccgacaagccctgtggcaatgataggccctataaaagagaaactggttccctgaatacagagcagccccgctcctatcgttccgaaacggcgacattgaatgaaagttgatactcctgaagcaaagagagacatagagaccagaaaactcgtcttctccacatccagtttcaaagcactcgcaatgataagtggcggtgtaatgatggcaacaaagatagccaacagatgttgcaaagcggcaaacagcgcatctttaaaaggaggacggtcttcaacaccgtagattaaatctgttttcatttaattcaatgtccattttagggctagtgtcgggattgcataaaagccatcacgattaccgaagttattacttaattccacttccgagcctatacttaagttgaaattcttatttactcctttaatacggttcaggtttacccaaaactgtggttcggtaaggaagatcgttttcccataatccgtttcctcacgccaccagtcggcaaacccggagaaagtcagcaagttatggcaaaaattaatgtaccaagtacctgtcaattggaaattgttaggtgatttatgcttctgaatgtacttatacatggcgctcacagtgaaaccttttgagaaagaagcattgttataagtataggtagcaccggccagataagcattattgtaagaaaatccttttgccaaaccaccgttatattcgagatgtgcggaaaaaggagctttccagaatttcaactcacgggcaatctcccaataagcggaagctaccccatcggaagtataatccatatcaacaaagaaataggtacttccccaagcatcgggatggaatttctctacagtagaagtcagcaaaggacgaccttttaaatctttatcatacagggaacgtccgaaatcataatgcaactgtatgttttgagcccgcaatcccgacacgggccaaagcaacatacaaaggaaaaaagcagcaataatctgtttcatgaataaatgtgttttttaatgaaagcgcaaaattagttaaacctgcacatatacacacattacttacacagattttttattccaaactattatttcccgtgtcccaccataggtatgtaccttcgtgatcttctccatccaaagctttcacaagggcagaatattgctccggatcttcggtttgcaaagtaccgggaaagtgaagtcggcgtaccatcgtctccgaatctatacatccgttcctgctatgattgaaacgtacgggaaacaagcggggatatcccgtacgtcgttgttcagcccaagcttcacagccttcgggaaacatggcaatccacttttgggtaataatcttctccagctttttctccttatcatccgacggattccattttggtgataccttacaacgagcttccacattattctccgtttcataagtgtctacaaaattcgaagctatccgttcgctcttcaagtaatcttctactccatagacaccccattgttcgaaagaagtcatcactccgttccgatagcagttttcttcatcttcgtctgtccaaccgcgtaaagcggcctcagcacgtaaaaaccagacttcagaagccgtcatcagaggtgcgtccgtagcctgtgtgaccgacaatcgggacagccctgcataatgattatgtgcaaaacaagttccctgacgaatgccacgatactctcccctaaacttttcatccgtacaaggaacgaaataggctttgagtcgaggatcatcgtatcccgtaagtatagactccattgaagcattcatatacgtttcattccacaccaaattaagttctcccaacggattaatatatcccgattttgtagaaaccgcaactttttccgatcctctctcaaagaaaccgtaatcattttcctttatcttctctatttccaaacgtgccttgtcgggagcgattgatgcaagacgcatagccaaacgcaagcgcaaagaattggcaaacttcacccaagaggaatacttgccatccagcagaatgtcaaaccgggcgaacccattggattccggtttttcttctatataaccgataagagcgacaacggcagaatccagttcattaaagaattcataatagacctctttctgcgtatcaggttgataatgcttttccgcattcgcaaaatgcctgtaaataataggaccatagtaatccgttacccgatgcattacttccactttcaatattttcgtaataccgaacagggctggatgagtatcacgggtagcattctccgactgatatatctgtggaaaaatatacgaatacacatgtgtccacatcgcactgttccaaccatcctgcatattataatcggaattattggaaccaccgttcagaggtttggcatcatgcatatatccactgaacatatccgcattcaaattctgtatcaactggaaaggccaattcttcccctttccgtaatcataattaaaataaatgccttgttggataatccccagacggattccataaccattatcgtcaatgttcagatcttcattcgtaatgccggacagatcggtattataatcgcggaagttacccgtgcatgctacgcaaaaaagccaccatcctatcaaatataaatatatgtatcgtttcttcattttcccttttcagcttttaaaactcacatttcagcgtaaaacccaggctacgggtagtaggcattccgaacacctcgataccttgattatcatttcctgtagaaagtaccagatccgggtcaaaaggtgcttccttatacaagaaacacagattacgggctacaaacgaaagttgcacattcttcaatactttagttttctgcatccattccttagggaaattgtaactcagcgacacttcacgcaaacgcagattagtggcatcatacatataatattccgtcactccggcacgtccgcctaccacattcttataaaatcctttcacattgtctatccgttccccttccagcacaacatatcctttatcacgagcatctgcagttatttccgacactccataaagatccatttccgcctgcgtttgcgaaaggactttaccgccataacgccagtcgagcaaaaagtaaaaactgaatcccttgtaagaaaacgtatgattccatcccattaaaaagaccggattggcatttcctactttcaccgtattaccatctccttccaccaacggcagccctttatggtctccttccgtcccataaacaatccttccctgatcatcgcgcacaaaagcttttccatatatatccccgatagaaccgcctttcaccaatttcatagcatagcttgaagaaaagcttgcaggtccgtaaacgaactccttcaagtcatcatgcaacttcacaatcttattcttattggaagaaaagttgagcgacgtcttccatgtgaagtcagaagttaacaccggagtagcattcagcgtaatttcccatcccttgttttgaatatttccagcgttcacataccgataagcaaactcatcaccggcgagagcaggaagtttgaaaaactgattatacgtatttgtgcgataataagtcaggttaattcccaaacggtgtcggaagaacttccattccgttccgaattccatagcatgagtcatttccggttccatttctttaaaaggcgcagcatcatttgcctgtacctcaccaccggcattgacgtgcgaagtggaatttgtgatgtacagagggatatcatttcccactttactgtaagccccgcgtaactttgcaaaagaaacccattcgggcaatttcagccatttatcaagcaatatggaaagaccgacggacggataagcaaatcctgatttctcatgtttggtataggataacgtggacgaccagtcattacgggctgtcaaatcaagaaatatcttttccttataacctatctgagccgtaccgaaaaatgattgcaactgccggtgtgcatctatcttctgatcaatactggcagagctgttcatcacgatattggcaatattaaacacattggcgtatttcaaagaagcattcttcgagtcgtaacgggttgagttcaccaccttatcattgatactgccgccaatagccgcatccagagtaaaatcaccccatgttttcttaaacatagccatcacgtcaccatacatctgcgtttcctgatagtccatctcaagataacgcccgttcactccgcataaagcagttgcggtagaagcatagaatttctgacgcaatttgtcagcccaataatccatattgccacgtgcttgtatcgtcagccaaccattcactttgaaagtggcggaaagagcaagaatgacacgtgtgcgtgtttccttgctttggatacgattcactatccaatatggattctgctcaaaatcttcggtaaacgtatgccaattctgcacattcaaattacgctcttcattataagtttcaaaatgctccttataataagacagatcttcgccacgcggaaaacggtaaagccctactaacggattcatatagaaacctcctgagacgggcttattctcaaccgtttgtttcatgacattgacattgccatccaacttcagacgtttgttgaacatggcagccgtttcacgcagattgatgttatgcttctttaatttattcccttcaataatgcctcgtccggtagtattggcataagagaaataagtttgcagattttcatttccgtgactgacggatacggaagtcatggaagtaagtccggtacggaaaaaatcattcagattatcatgcacctccaaactttccttttcaccccaactatctatcacatcactcaccccatagctattttgcatctggggtaaactgaaagccttttcaaaagtaagtccggtagagaagtggatacttcttttccctgtagaatttccttttttggtagtgatcaggattactccattggcagccaaacttccatacaaagccgctgccggggcgcctttcaagatactgatactttctacatcctccggattcagattggagataccatctcctccatctcggtttccggcatttgccgttccgccaatcgccgaataagcctgttccggagaagtgttggacatcggcacaccgtctattacataaagcggctgattatctccggataccgaacggactccccgaagagtgattttggcagaaccacccataccggaagaattcttgttgacctgcactcctgcagcttttccggcaagggctgttatcatatttatctcctttacccgattcagttcttccccttttattttctgagtcgaataagccaaagtagattcatccttttcaagccctagagcagtcacaattacattatcaagcatgacagtattttcccgaagggagatttcaagcattgccctacccgttactttgacttccactgtctcataaccgataaaggaaacttgcagaatagcgctatccggaacggacaaaaagaagctaccatctatatcactgacagttccgttcgctcctcctttctcacgaatggttgccccgataagcggctcgccgttagtatcgacaacacgtccccttaccgttgccgtcgcattatccgtaggggtttctataaacgtaacttgttccgaagcgtaaccattctcgcttaaaaagaagaatgaactcaataaacaacttacaacaacttgaactctcaatgatattataaaagactgtctattcattatgccacaaaaatacgtaaatattttatatattgcattttttcacattgattttgagcgaaataaacattatcactatttttgcatgaaattaaaatgatacataatgatggaaatcgagaaacatccactagaaccatttcttccggcaaaagccaaactgttaatgctgggaagttttccaccgcagaaaaagcgttggtccatggatttctattacccgaacctgaataatgatatgtggcgtattttcggtgtgttgttttttaatgacaaagactactttctaaatcctacacggaaagcgttttgccgtgaacggattatagactttctaaatgagaaaggaattgcactgttcgatacggcctcatccgttcgccgactacaagacaatgcgtccgataagtttctggaggttgtggaagccaccgatattgccgcaatgcttcgtcggcttcccgaatgtaaggccatcgttactaccggtcagaaagctactgacacactccggcaacaattggatgtagaagaaccgaaagtcggcgattattcggagtttgtttttgagaaacgcgcaataaggctgtatcgtatgccttcatcatcgcgagcatacccattggcattggataagaaagcggctgcctatcgaatcatgtatcaggatttacagttactaccctaaatgtgaaacagcaaatatcaaataataaattagaaatgagtatgatacctttatttttgcagtacccggcatgcagcacatgccaaaaagccaaaaagtggttaacagaaaataacattgagtatacaaaccggttgattgtagaagaaaatcctacagtagaagagctaaaagcatggattccccgtagcggcctgcctataaagaaattcttcaacactagcggactcgtttataaagagctgaaactgagtgagaagttgccaagcatgagcgaagaggaacaaatagaactgctggcaacaaacggtaagttagtgaaacgtcctctagtagtaacagacagtttggtattggtcggtttcaagcccgatgaatgggaaaaattaaaatagttcaaaacttatttacccgaatgtttggagattcagaagtttctactacctttgcagccgcaaacacgggagtagctcagttggtagagcaccggtctccaaaaccgggtgtcgggagttcgagcctctcctcccgtgcaataagaaaaccgcaaatagtcgtcaggccatttgcggttttcttattattgcctcacagataagttactactctcggctcagtttggaaactctctcttatactaattcttactcgtcttttccaatcctttagcagcctcaaccagtcggataaactctcttcgatatcctctttcatcattattcaccccctgtttagctagcttaatgactttgtcataatcggcagttcctttaaagtcagaatcacgaagcaactgtccgaacatggctactgccgaagcgaaacggaagtcggaagaaacactatctcctttgttatctacaaaaggaagttccattttcctgctgacatccttatccggagctttgtaacgcaatttcacagtaaggagttcatcagatccggtcggtttcagcgtcattttttctttcttttggtatttcaagtcgtctactttacctacatattcattcttcacacctgcgggaatcacttcataaaaagctgttaccgtatgtcctgctcccatatctccggcatctttcgcatcattattgaaatcttcgtctttcagcagacggctttcgtaaccaatcagacgatatgcctgaacttgagaaggattaaattccacttgcagtttgacatcttttgccacagtatgcaatgtagcaccaaattcgcctactaaaacacggttggcttcctgcaaattatctatataggcatgattcccatttcctttttcagccaatacttgaattttcttatctttgtagttacccattccatagcctagtacagtaaggtgtacgccacttttccgttctttttctatcaattgttccaatccttcggcggaagaaacaccgacgttgaaatcaccatcggaacaaagtatgatacggttattgccatcagagataaagttctttttagctatttgatacgccaaatgaatgcccgcgcctcctgcagtagatccgcctgcggtcagttcatctatcgcttcacggatcttctgtttatcaccgcccgaagtagcttccagcttcacaccggcactgcctgcataagtcacgattgccaccttatctttattccgcagattattcaccaatagtttgagcgatgactttaccaaatccaaccgattagccccccacatagaaccggaaatatcaatcaagaatacaagattggacgccggcaactgctccgtcggaatttctttagctttcaatccgatacgaacaagccgatgagctgtattccaagtacaagttccggcttccacagttatcttcacaggatcgttgcccgttggtttcggatagtcgtaagaaaagtaattcactaattcttccgtacggattgcatcggcaggaggcaattctcctctattgataaaacgacgcatattgctataagaagcagggtccacatcaatagagaaagtagaaagcggagtatcggctacacttttgaaaccattctcctgaatccggtcatactcttccgtattcattctcgtatccatatcatacatggcagtcggacacaccgctacatacgcaccggtcattgcctttgttttcattgtaccgtatcccactacgacacactcctccaacgccacatcatcagtcttcattttaacatccagtttggccgacttaaccactcttttttcttctttatacccgataaaccggaataacaatacgtcccctttttgggcctgaatggaataacgaccgttcacatctgtgattgccccacttttggaacggttattcactaccgaacaaccggtaatcgaagttccatccgctgcgtccatcacaataccggtcacggtaatagtttgcgcattcattgttcctaaacaaataactgccatcagcagtacgagcatgattgctctgaattggtttgttctcataacttcattattttaaaatgttactattcatcgcttttactatagagatgcaaatttcacacagattccataatttgcctgaactttttttacccgagcggaaaaaagtcacttaaaaattcctacttattcctttgtaactcttaatatgatatgtatatttgccaaacataaacatatcacaaatatgaaaaacgaagttgatggaaggcgggaaatagcctcacgaaacacggtctgggccactattatcgcccgcaaactaactcgttggggtatcactcccaatcaaatttccatgatgagcatattcttcgctatggtgggatgccttctgttgatcgacacagtcattgatcccggttttaacaagtatgtagcctacattctgtttatcgtttgcatgcagtcgcggttactctgcaacctgttcgatgggatggtagctatcgaaggagggaagaaaagcgccaacggggatctctacaatgatatgcccgaccgctttgctgatgctttgttcatcattcccgtcggatatgtagcaggcggattcggtattgaactaggatggatggctgctcttcttgctgtgatgacagcttatttccgctggataggagcctacaaaacgcaccagcatttctttaacggtccgatggccaaacaacaccgcatggcattgctcacgcttgcctttgtagtagccacctgcaccattcacgcaggatacgaccggatggtatgtctcatagccctgataattataaatgtcggccttgtcgcaacactgatacaccgtctgtacctcatgtcacacacaacaaacaatgaaataaaatgaaagaactactagataccatatttcctacgctaagtgatgaactgattatcgtcatttcgctcatcatcggactgctcattacggcaagccttattctttttctcgtaaagaagatctttccaaaaacaaatatcagcgaactctccgcccgcacacgttcatggtggatcatggcgggcatgtttatcggcgctgtatttatcagctataacatttcttatttcttccttgcctttctctctttcattgctttcagagaactgtattcggtgttgggattcagagaggcagatcgcggagcattattctgggggatactggccattcccattcaatattaccttgcttaccttgcctggtatggagcattcatcatcttcatcccggtagttatgtttctcgtattacccttacgactggttttaaaagaagacactcacggaattaccaagtcgatggctctgttgcagtggatcctaatgctttcggtattcggtatcagccacctcgcttatctcctgtcacttcccgaactgccgggattcaatgcgggaggacaaggcctgttattgttccttgtattccttacggaaatcaacgatataatgcaatttatctggggcaaacttctcggacggcataagatacttccgaaagtaagtccgaacaagacatgggaaggatttttaggtggtgtaatcagcactaccgtcattggttactttctcggtttcctgactcccctctccgctcctaacgttcttctggtaagcgctcttattgccattgccggattctcgggggacgtagtcatctccgccatcaaaagggataaaggaattaaggatatggggaacagtattcccggtcatggaggagtattcgaccggatagactctctgtcctacaccgctcccgtcttttttcatttagtttattacattgcatattaaaatggaaaagagattcatgcaagctgctatcatgcagattatatataaaggtatatgccaatggttcttgaaactgatcgtaggagttcagttcaccgattgccgattcctcaagaaagaaaagcagttcatcattcttgccaaccacaacagccatttggacactttaagtttattatcttctctgcccggaaaacttttatggaaagtcaaacctgtagcagcagaagattattttggtaaaaaccgctttcaggcttccataagtaactatttcatcaacacactgctaatcagaaggaaaggagaaaaagattcggaacatgacccgatcctcaaaatgcttgaagccatcgatgcaggatattcactgattctttttcccgaaggaaccagaggaaagccggaacagatgggaaaaattaaatccggcatagcccgtatcctgtctctgcgacctgaagtaaaatatattcccgtattcatgaccggcatgggacgttctctgcccaaaggcaaaatgatactgttgccatataaagcatctatctattacggtatgcccacattggtaaagagcacggatatacatgaaatattggaacagattgcagatgattttgaaataatgaaagaaaaatatcaagtcattattgacgacgaagaagaataggcattgttttttaaaagaaccatatccaaactatcggacgaggagctactcacacactacgctcagtccggagatacggaatatttcggtgaattatacaaccgctatatcccgttactgtatggactgtgcctgaaatatctgcaagacgaagaccgggcacaggaagcggtcatgcagttgtttgaagatttattgcctaagctgggaaattatgagatcaaagtgttcaagccctggctctaccgggtggcaaaaaatcattgcttgcaacttctgcggaaggagaataaagaaattccgttagattacaccattaatattatggaatccgatgaatttctgcatctattaagtgaagaggaaagttcggaagaccggttaaaagcattacatcactgtctcgaaaagttgcccgaagaacaacggacgagcattacacgtttctttttagaggaaatgtcgtatgcggatattgtcgagcagaccggatttactctgaataatgtaaaaagctatatccagaacggaaagcgaaacttaaaaatctgtatcaagaaacaaaccctatgagactatcggactacatacaaggactccgcaaaggaaaagaagcacatcggttggaaaaagagtcgatgaaagaccctttcctggctgatgcgatagatggatacaaccaagtggagggaaatcacgaacaacggattgagcaactgcggatacaaatctctgcccgttctacaaagaaaagaaatacctacgctatcatttggagtgttgccgcctgtctggtgatcggattcggaatcagcagttatttcctgtttctgaaagagacaccagagcctgtcattccgataattccacaaaaggaaatcgcactagttcccacaaagacaaagacggattccactcctatttccccagtttccatgaaacaagcggataagaaagatatcatcgccaaaagccggactaccatttccaagcctccaagtgctcccattacaacaatgcctatggaggaggaaacttcggatcaaatggttgcagcaacagacgaagaagtaataatgacaacaggagcttctgatcccgaatccgtcaaaaagatgagaatagctaaaatggcagttattcccaccaatgatataatcaaaggaaaagtgaccgaccaaaaaggggaaccgcttatcggcgccagcgtaatgtacaaaggaacgaatatcggaaccgttacagatgtgaatggagaattttcattactcaaaaaagcagagaacaagcagttgacagcacagtatatcggatatgacccggtagaagttccggtagataccagccggacaatgctcattgccatgaacgaagaccaaaaaggactcagcgaagtggtggtagtgggacacggagtcaataaaaaggcaaataaagataacactccgcaacccgttgacggaaaacgtaaatatctgaaatatctgaaaaagaatctggtccgcccaacggacgaaacgtgcgcacaagtgaaagggaaagtagtattgacctttctggtcaatagggacggacggcctttccacattaaagtaaagaagagtctctgcgaatcttccgacaaagaggcaatccgtctggttcaggaaggaccggactggacatacgggaacaagcaggcggaggtaaccgtcaaattcgattaacgcaaaccactaaatccaggtacccttgcgccataagaattcaagtggtccttgcctgtgtcgaacaagccaccaacggctgaagaccaactgaacggtaaagataagcaatgcaataagcaggcttgccgttgctccggcatatttgtacatagacaacccgaatccataatagatagtgactcccataatagattgggaaatataattcgtcagactcatgcgcccgtaaggaatcagcaggctttgccagctatatcctgtctctttcttaaaccaaagcagggtgaagagagaaacaagaatcaccatgaacgcaaaattagcataagacggaacagctatattataaggaatcagtgcggaggaatccgtaataaaatccggaacaaaaattctaaggcaatagagaggaatgaaggcaatgacagcacctatcaacattcttttccagaaacgtacggactcttcactctttatcaaatatttccggcgtcccaacaacatcccgaacatgaacagagcagccgtctgaaacaagcgtccattttccacctgccagatattgctatacaactgtccgtcaatgatattagactgtaatacatcaaagaaactgccgttggctgtcgctgcctcagcacgcatagcataaggaataaaatgaccggtcaccgccacataatccggatttatcagcgcatagatggcacgtccccactcgtatggctgtaaaagcagaatcaaagcaatccagaaaaccgtcttatccttcaacttacaaaccggaatcagtgcaaacccgactactgcatatagcaaaagaatatcaccgttatagaacaatgcgtgcaactgtgcaaacaggagaagcaggcacatccgccatgcaaatcgtcccctgaaatcgattccccgtttctccgcattgtgaaactgaatataaaagctaaacccgaacaacaatgagaaagtcgcataagcctttcccgcaaacaagaaaaatatagtatcccatgcatacttatcaattgtttgcaaccatgcgggtacattctccggcataaaaaacagattgtaatgctccagattatgtaataatacaatagctaacaaagcgaacccacgcagagcgtccactactccaagccgttcagtcgttttcagtgtttgagtcattagatacaattatttcagattaattcaacaaccgcaaaaataaaagaaatacctgaaaaacaaaagcttacgagtgttaaatattaaatcagttcataactggccatttgtatcggcatatccagattatggagtactttttccaacaaaataccctcgcggttatcatactcatatccgaaagtagcgcgaataccctgtagaataaactgcgtggcacggtccaacgccattggcaaactgtcaccctgcatcaaagaccccgtgataacacttgtaaaagtatcccctgtacccggataatgggcaggcagataaggacaagtcaccttccaataacggtttccctgacggttataagcataaacagaagttttatgaggttcaccatgtacgggaacactggttatgataaccacatcaggacctttatcagacaagagccgaagatattctttcaactcctcatctgtattgtccgctttataaggcctgtccaacagataaaacagttctgtcaaattcggggtaactacatccgcttttgtaatcaagtgacgcatctccttcaccatctccccatcaaaattagcgtacaaccgaccgttatctcccaacacgggatcagccacgattaaactatccggctgccggaagtccctgataaaatcggaaacgatctgaatctgcttcggagagcccagatatcccgtatagatagcatcgaactgcacttccagttttttccattcggcaataatcttcggcatttcgtccgtcagatcgagaaaagagaaaccgggatattgcgtgtgattggaaagcacagccgtaggcagtggacagacttgaaagcccatagatgaaagaatagggataacgaccgtgagagatacgcgtcccatccccgaaaggtcatgaatggcagctattttctttactttattggcatacatatcatttacatttaacaactacatcaatatcaccaatacgtcccttgctccatgtgctcccatcaccaaagcctgttcgatatcagcagtctttgaaggaccggaaataaacgtgccgaatttatattcctgcccgtccaattcacggtaagcgtcatacatcgtatctactattttattccggtcgagcaaaataaccaacttctctgaaatgaaataaacagctttatactttactgtttgcggaatccatacagccccgttctcagcaactccgatttctcctttcaccacagccacatccgtgccgtccaactctttcgggtcatccagattatcggaattgaacgtcgcgcacgaaatatccggcaacacggaagcaatgcgcatagcctccggataggtccggcgaatcaccgcattcacatcttctccctcacccaatacaacagccatacctcccaccgcacggctgatagcacaaaactgttctattttatcgggatatgacaaccgtttcatagccgcaatatccggcttatcataacgaacttgcgtatttttgcggatactggctaatatttcttctctactgctcatttagattcctcctttccctgcactttgttcttcttccacatctcattaaacgattctttggcaaattccggcaactcgcgtccctttccccaatcattgaaatcattgtatttcataaatcgtggcaggctgtttatcatcggagccgcccacaaagcagcattgaacaatgccggacgctccatcaggaacttcattccaccggacatgatcttctttcccgtattcgccttgcccagtccgtccaaatcctgacgccacttataaatctgttcggcaagatccactttcaccggacagacatcagagcaggacatacacagagagcaggcagaaagattatcataatatttctccggatcatgggccatacccagattgatcccgataggaccgggaataaaataagtataagagtatccaccgcttcgacgatatacgggacaagtattcatacacgcaccgcaacgaatacaattcagtgtcttgatatggtcggtcttggacagcaatgcactccggccattgtccacaataatgatgtgatattcacctccttcgcgagggcgacggtaatgggaagtgtaggttgtaaccggttgtccggtagccgaacgtgccagcaaacgggtaaatacccccaacgcctccaggtccggcacaatcttttccataccgaaagcagcaatattcaacttcggatatgaagttcccatatcggcatttccttcattggtacacaccacgatatcaccggtcgaagctacggcaaagttagcgccagtcatggcagcttcagcattcagaaaaagatgacgcaggttcttacgggcggcatgagtcagataagtaggatcaaagttacctttttccgttcccatctctttctcaaagagttcacccacctgttcccgtttgatgtggatggcaggcaacacgatatgactcggttcgagatgcatcaattgcagaatacgctcgcccaaatcggactccacgacatcgataccacgctccatcaggaaaggattcaacccacattcctctgcgagcatggatttacttttgacaaaatgatgcacattatgttcattcagtatctcgtacacaatggcacaatattcatcagcgtctttcgcccaatgcacgatagcaccgttggcggtagcattcttttcaaactccagcaggagctcttcgagatggctgttggaatatagtttcagttcacaggccttgttgcgcaactcttcccactcgggaacttccttactcatcttatccctcttggcacggaccatccaaagggtttcgttatgccatgctgccatcttgctgtcccgcaagaacttctcggcagcctttgaatgttttgtactcatgattgcgatgctagaatttctacaatatggataatctgaatgggcagatgttcccgtttgataacgccttgcatatgcattaggcaggaactgtccgctccgacaatatactcggctccggtagccatgtggtctttcaccttatcgcgtcccatacatacggaaacagcctgctcttctacggcaaacattccgccaaagccgcagcactcgtcaatgtggctgggttcgaatacctcgattccttctaccagattgagcaaatcacgcaatttattgtaataagggatatttaattcgctgggggcggagttgaacaattcacgcacaccgtgacaactgttgtgaatactgactttgtgcggaaagcgtgcaggcagtttcgtgggtttgatcacatcgtggatgaaatcgcaaaggtcataaatctttcccgcactttgacagacatgaccttctttctctaaaatacccggatgattctctttcacaaaagcgacacaactggcggagggaccgacaatgtagtcatattgttgaaacaagtcatcaaaacggagtgccagcttcattgattcatcttcaaaaccggcattcgccatcggttgtccgcaacaagtctgatctaacggataatcgacgtctactcccagactttttaatagcttatacgatgccactcccacattgggatatatagcattgatataacaaggaataaacaaacctactttcataatatatcatgtaataattaagcttcttccactgcattgtttatccaattgagcagtattattacaacaaggccggaggaaaaaatgttcgccaccgcacatatacttttatgatattgcagaatcccttttttacactatctttgccgcatgaagactctatatattgttataggaacaatttccctggcactcggcattctcggcatttttctgccgctattgcctaccacgcctttcctgctacttactgcagccctttatttcaaagggtcgtttcgtctctataactggctgctcaatcatcgttattttggtccttatatccgcaactaccgtgaaaacaaagcgattcctctccgcgccaagatagtttccctcgtactgatgtggggaaccatgctttattgtattttcttcctgattcccctgatatgggtaaaggttctcttgggactgattgccgcaggaatcacttatcatatcctttctttcaagacattgaaataatcagatagcccctgacgtgcatctgcaagtttatcttcccaatgtttcacagaattctgaccgatgatgtctgtcacgtatttcacggaaataaaaggaatctctttcgaacggcaaacgaatgcctgtgcataagcttccatatctacaacgtctccatttatatgggttaattccgtcaggaacccgtctccggtattacaaatcccgttttccgtccaatgcttacagaaacctttttcttcgagcagagccgatgaatcaatctcgcactccaatccgaactctttcatcttctgcatatcacgatccacaaacttacggcagacaaaaatatctcctacctgatgattgactgtcccagcacttcccatattcaacaccaaatccggctgtacctggcgaattgcttctgccagatgaaaagccgattttacttttccaatgcctgtgcgcacataatacggttcgacatcaggccattttatctctacaaattcgccttgaacggcgtaggtcactaatattttcaacatatattctttaattcattccattactcactatatatagacaaagatatgaaaatcacactagatacacaagtagataaaatattatctattttacatataatataataatgaataatagtaacctacataataagaaaagtcctatctttgtaccgtcgcaaccgacaagatgtttttaccgactcataaggaagatttaataaattctactgaacagattaataacttccccttatcttttagcaaaatcatccgcacgaattaatctgttgcacttgagcaaccatccagccgcacttgtgcaactcgccagctacacttgtcctactcggaagttactcaactgcaaacaagtagtaaccataaaaaacgatcactcgtgagcatactttataaatcaacccgttttgcagatacctttacgggtaacaaagaaacgaacgtacgcgtacaactcctgtcatgggatacattggacaccaaagccttcgttgagtacctggcggacaagaacaatctatcgaaaggggatgcctacaaaaatcttactatggtattggaaggtatagaagctgttctgaaaaacggaaacatcctcaatctggacgacttcggcagtttctcactgaacggcagtttctgcaaggacaaacaacccggcgaaaatcatcgggcggaatccatagaaataaagaatgttgtattcaaagctgaaaaacaactgaagaaacgtatagcaacggccggatttgaaaagtacaatcccgaaagacacaacaaacgcaaatactagaacaaaatggaatacaccagaacttactccatccggaaaggcgaatactttgcggatgcgttgaagcgtgccgggaaagaatttataccgacaaattgtatcatcaacaagctactgcccggactgggtgctacgcattgcgaactgatagctccacgaaaatcaatcattatcgagcctaatgtgcctgtcatcgaatcaaaagctaaaaaacataagaatgcattagccgtctacaaaggagtgactgtccggaaaattatagatttcctggaagataaccacgacaggcattacaaactgctaactactcccgaaggtttcgccaagataaaagaggcgatgcaaacggtgggcatagatatatacgaggaatgtttcattttattcgacgaatgtgagaaattagtgcaggacgtacactaccgtgactctatccgtgaaccgatgaacgattttttcctctttcaaaataaggcgctgatttccgcaactcccattattcccgaaaaagacaatcgtttcgacggcttcgcacgggtactaatccaaccggactatgcataccggcagaaattaaaactaattactacaaataatgtgctggagacactgcaggaagtaatcgaatccaaacgaggaacagtctgcattttctgcaacagcattgactcgatagacagtttctaccgtctgattccggaactgagcaacgcctgtaccttttgcagtgaagacggacaatataaactttggaaaggcaaccgccggaaaaagtcaatgatgattaccgaactggaacgttacaacttcttcacctcaaggttttactcggctgtagatatcatctctcccaaccctccgcacgtgattttcattagcgatttgtttggtgctacccaatcggttatcgatcctgctaccgaagcgattcagattatcggtcggtttcgtggcggagtaaatagcgtgacacatattgcttccatccgtccggatctggaatgtatgtcatccacagaaatcgacgactggattcatggcgcttccaccgtctacaacaattggaaattccaactggcacgtacctctaatattggcgaacggactctattgcaggaagcgatcggagaaaattcatacctcccctatctggacgacaaaggcaaaccggatccgttcctgattgccaacttttacgaaaaggaacaggtgaaacgactatacacttctactgacctgctttgcgatgcctatcggcagaccgattattttgttttctctcatgaagagcgtctaatgcctgtttccgacaatgaacgcatggcgatacaacaccggctggcaaagaaaaaaagggtggaacttatcgtccgcaaactggaagagatggagaagatgagcaggataactgacaaaaagttacaaaaacgctaccagcgtatgctaggcaacctgattacttcgactgccgacagatacatatacgattgtttctactgtttcggagcggattttatccgccaatccgattataacgagaataagttgcgcacggcattgaacgcaagcagcgaacacaccatcaagaaatcggcacaaatgcgtatatctatccaacgaactttccccataggctccgaactttccgttcaggaagcgaaaagtatgctgaagcaagtatataaaaaaatgggactgaacacgggaagaggtatcacgacaaaggagttggaacaatatgcggagatagaaaataaccgaaatcgtacagaaagaacaattaaaatactgaaattcaaataattgactataaagtgcaacttttctagcggaaaaaatctgattctcttatagttttttgtaaacttcgcttatttgggggctattttaggtactaattaattgattagcagcgatgtgacatttttgtttttccccgtataatacttaaaataaaaacaaaaatgtcacaccgaactaccacacattcaaagtctatatctttcacaccctaacgctgaaatacaactaatttgagctaaaaagaacattttatcccgaaaagtttttgtaatatcagagttaatcgtatttttgtgtacaattttggtgtagtaatgacagaagaagaaaaaaagttattgaatacctttgaaacgcggctacggcatttgctctatttgcatgatgagttaaagcgtgaaaatgtcgagttgaaaaagcttcttgatttcgaaaaactgaaaaatgagaagatacaggctcaatacgatgaattggaagtcaactatacgaacctaaaaacagctacggcaatcagccttaacggcagcgacgtaaaagagacgaagctgcgattgtcaaaattagtgcgtgaagtcgataaatgcatcgctttgttgaatgaataagaaagaaaggatgtatgagcgataatataataagaataaacctgcatatggcagatgcgtgttatccggtatttatcaatccagagaatgaggagatagtacgggcggccgccaagcaggttaataccatacttggtgagtaccgggaaaaatgggggcatctgaatttggaaccggaaaaaattatagttatggtagcctatcagttctcattagagaaactgcaattgttgcaacgtaatgataccgctccctatacggaaaaggtaaaagaactgactgaattgctggaggattatttcaagaaagaataaattttatccggttattcgctgataagagaaaacaaccacgcactgcacaatatccgagcaagaacttgcttagatatttggtggtgcgtttttatttatatacttaaattaaatgtagaatgatagtaataatagcaacagcaattgcttgcttcatcgtaggtggagtactctcgtacatactgttcaggtatgctttaaagtccaaatacgacaatgtcctgaaagaagcagagacggaagcggaagtaattaagaagaacaagctactggaagtgaaggagaaattcctgaacaagaaagcagatctagaaaaagaggtagcactcagaaatcaaaagattcagcaagcggaaaacaagctgaaacaacgcgaaatggtactcggacagcgccaggaagaaattcaacgcaagaagatggaagccgaagctgtcaaagagaatctggaagcgcaacttgtcattgtagacaagaaaaaagaagaacttgacaaactgcaacagcaggaaatcgagaagttggaagcaatctccggattgtccgccgaagaggcaaaagaacgcctggtggaatcattgaaagaggaagctaagacacaagcccagtcctatatcaacgacatcatggatgatgcgaaactgactgctaacaaggaagcgaaacgtattgtagtacagtctatccaacgggtagctacagaaacggctattgagaattccgttacagtattccatatcgagtcggatgaaatcaaaggacgtattatcggacgtgaaggtcgcaatatccgtgcattggaagctgctaccggcgttgaaatcgttgttgacgatactccggaagcgattgttctttctgctttcgacccagttcgccgtgaagtagcccgtctggctctccatcagttggtaaccgacggacgtatccaccctgcccgtatcgaagaggtagtggcgaaagtacgcaaacaagtggaagaagaaattatcgaaaccggtaaacgtacaacaatcgacttaggtattcacggtctgcatcctgaattaatccgtattataggtaagatgaaatatcgttcttcatacggtcagaaccttttgcaacacgcacgcgaaactgccaatctttgtgcagtgatggcttcggaactgggattgaacccgaagaaagctaaacgcgcaggtttgttgcacgatataggtaaagtgcccgacgaagagccggaattgccgcacgcattgctgggtatgaagcttgcggaaaagtataaggagaaaccggatatatgcaatgctatcggtgcccaccatgacgaaacggaaatgaccagtttactcgctcctatcgtacaggtttgtgacgccatctcaggtgcacgtccgggtgctcgccgtgaaatcgtagaggcgtatatcaaacgtctgaacgatcttgaacagttagctatgtcttatccgggtgtgacaaagacatatgctattcaggccggtcgtgaacttcgcgttatcgtaggtgcggataagattgacgacaaacagactgaaaacctgtctggtgaaatcgccaagaagattcaggatgaaatgacttatccgggacaagtgaagatcaccgttattcgtgagacacgtgcggttagcttcgctaaataaaaaaaacagagaataatttcaccacagattacacagattctcacagattattttcattaaaaaacaatagtttaatgattaatctgtgagaatctgtgtaatttgtggtgagtatcttattaaactatgaaagagtatcaattcgaggtctgtgccaattccgtagaaagttgcctggcagctcagacaggaggtgccaatcgggtagaactatgtgtaggtattccggaagactatgggcggaaccgtaaatattgacgaatacgaacgaaacgtaactaccgtccggagaataatgactacaatccacgaatgttcttcatcagttgctcgccaagaccgatagtatacccttgcgagacaaagactacccgattgaatgtgtcggcaataatgaatacggaataactctctgtaaataaatgtaatgcatttgtaacatccaccgtgttcggacctcttataaaaagtttttttaaaggataaagaagatttttatgttttacagcatataatccaaaaacatttcgtacctttgcagtgttaataaagaaaacaagatgtaaaaccgctcttcaaaacgtggagggcaaaaaagaggaaacaaattatgaaaaagaatgcaaatgaaaagattatgatgttacagtaccgtatcaaacgctatcaagcaatgggaaacggcgctatgtgccaaaccttgaacggtaaactccaaaaactgctgtcacagcaggtagccatgtaaataaacacactaattatattgaaaaaagcgaggaactttcgagtatcctcgctttttttatacatttgtactcaataaataataaaacacatagattatgaaaaaactattgatgtcggttgcagtacttttattagccgcaaccacctttgcgcaaacacccggttatgaattcacaaccattgtatcgcacaaagcgactcccgtcaaggaccaggcttccaccggaacctgctggtgctttgccaccgcttctttcatggaatccgaattacttcgtatgggaaagggggaatacgacctctcggaaatgtttattgtccgccaaaaatacatgaaccaaatggaagacaactaccttcgccggggcaaaggaaacattggagaaggaagtctggcacatactttcaaaaatgcctataaacaggtggggatcgtaccggaagaagcctattccggtctgatcaatggtaatacggatcataatcacggagcattatgccgctacttcaaagctttggtcgatgccaatatcgcttccaagaaacgtaccccacagtattattcacttattgataatctattcgatacgtatctgggcaaactaccagagaagttcacttataaaggaaaagaatatacaccgcagtctttcactgaaagtctgggactgaacatggataattatatcgagttgaccagttttacccacaaaccttattatgaaactttctcaccggaagtacccgataattgggaaaaccagccaatgtataacctccctctggatgaattgatagaagccatcgactatgcattaaacaaggggtataccgtatgttgggatggggacgtcagcgaacaaggtttctcttttaagaacggaattgccatcaatccgcaagtggaagatataaaagactactccactaccgaccgtgcccgttttgaagagatgcctaaatatcaacgtctggatgaagtttttaagtttgaacatccttatccggaaatcaaggtaacaccggaaatccgccaagaaggctacgagaaatttgtaacaacagatgaccatttaatgcacatcaccggtattgccaaagaccaaaacggcactaaatactatataactaaaaactcttggggagcggacggtaataaattcgggggatatcttaatatgtccgaaagctatgtacgcgctaaaacaatctgcgtcatggtacacaaagactccctgccgaaagaattgagaaagaaactcggaatcaactaaaagatataagtcctataattgagatagggatattctgaaaataaaaaaagcaactacttcattgcgaattagttgcttttttagggatattcagtaaatgtccttgaaataatctgtgataatttgcgttaatctacgctttaaccactttttcctcttatttctttcttaatgtgacatcactgatttctacaacgccacctttattctgagcaagaatagctacatagcagtctttcaagatagcagcgtcatcatccgtatcagatacttccaaatctgcattcgctttcttactgctgatagcgttcacaacttgtcccatatcgtaataaactaccactttcgtccatttgtctgcatccttaattttgaagttgtactgtgctcccgaagcattcggttgagaatcagcatcataatcacgacgcataaagaaggtggtattgtacttgccattatcattcttttcttcattcgtctgcttgatatatacacttaccggagtaccggcttcttttgctttcgcatagaaagtaaggacatagatacctttctgcaacccgtctgtaacacgctgtcccaagaaagccttgtaccaggaaatgttctttgcagctccggagttatctatcttcatggcattaggatatttggcatcacccgtctgttcccaagcaatggtagttgcaccgtcagcttcattattcatgatgaaccattcaccggctgtcgccttattcggattggtcaccttgttcgttacttctgttgcgaatttctcgtttttaatcagattctgagcgcttacgcttactcctgcaatagccaaaaggccggcaaatactacttttttcatcttactgtgatttaattgtttaatacctttataattctaagtccttattttacttcacttgttgaatgacaaacttataattcccagtcgctttcttttcttctgtcttcagtgtgatgcgataaatctccttgccccaaacattagaaaggcgaggatcatccaatttaatagtttccagttctgctttaaactgagacggataatccaactctactttctgccctttcacttcaacacgcactttgccgggagaaggaaaactaacctttccccaagtcaggaaatttagctgattgggagccagtgcctcattcagtgtatagttgtccgtaatcatcagcttacggtcgtccaatgcatacgaacgaatccaactctttacttttgcttctgccggataagctgtggcaatatctgcagagaaagtacgcttcttttcattgcaaacagtattggtcgctttatattgctgaccgaatttctgcggaactccatttatcatcggtaagttatgataattgctttgcatggtccagatagtataacggtcttttccgaacgtctgcttggtataggtaccgactccggcatcaataaatacaggaatcgtgtttacatacaaagagaacgttcctacatcattatggttatggctttcgttattgaatccgcctttggcagcgagcagcataccattcttatttttcatgtagcagaattcagtttcgggataccaggtaacatccggcatatcgtgtttcggagtcgcttttgccaggtcattacaacaaagcagggattgaagggaacgaaaagcgtcattgcccatagtagcgtacggctttctgccattcagcaagtaagctgcaaaatgcatcatttcatcactgctgaccgctttaccgaaacggtaaatcaacagaggatcacccccaccctgtgccgaagcatcggcgaagttcactacccagccattgcctacgtaggaacgggacatatattcccccatccggcgaatcatcggttcatcaaacaaggatatcttgcctcctgtaccatcggaaagaatttggagataatcatagagttttccggcagcatgtccccaataagaggttccttcttcacaagcgccatcggactttacgaaattaatgaatttatccacagacttcatagaacgataaacggctttggccagcttgtccttattattttccatcaagaggaaacattgcaaagcattggaattacaccaaggattccagttattgataatttctcccggttgccagttgaaagccatccaccacatttcatcatcattcatataaggatcgagaatacgttctttgattgctttacgcatttgtagggatactacaggattgatcttatcgaatggcttacggaaaaaatagtgtacccacgccatcaaggctccatacccccctgagcccaaatcaataatctgttcacggaaatcgggaagcgaacgtttactgctctgacggggcaagtgtgcggataaaacccatgaattcatttcgcagctcatataagctccattgagaagttggtcgataaagcgtccctttccctccgccagttcggcaagcatcagggtattaagtgctctacgattatcgtcgtaaggaacctccatcacttttcggttgccgctacgctcgtattccaaataagcggtggcaggaatcagttgccatttgtagctgagaagtttttcaccggcttcgataagacgttgtttgttgggacccatcagcgaatcccaagcggcacgatccgtataagcaggataaggcacccacgcttgtttcatcactaacacatttttcaatgtagattcgtctgccgctttttgcagcatattgcgttcggtgtaagcattggctttgaaagtgaaacttcctaaagcggctactaaaagaacacaaagcaaatgtttcattcgattcatggtatttttgttcatttaagtaaggcaaagatagtatatatcttatgaaataaggtgagtaaatcatacgaacctaatgacaaaaaagtacatacctccaaaatcgtactcatcattgccttattttaagttcaatcccaatcactaaattcaaaactcaactgttcccaaacgccgtgttgttcatcggcttcctccttcggattagagacggatagtccgataaggcgaatcgggtgctgttcatattctacacttttaagcaattcttttgcaagcggaagtatacggtccaaggttgttaactcttgcggctgggtaagacttcgggttatctgactaaaatcatgaaacttgattttcagcgttagggtgtttcctttgaaatctttatggttgagtcgttcgacgagctccaccgccacatgatatagttcgataatcaccgatgaacgggtagagatatcccgctccaatgtacgttcgcatccgatagatttacgaatacggacagcctccaccggacgttcgtcaatcccccgtgcacattcgtaataaagagcccctacctttccaaaatgcgctgtcagcatttccaaagagcatttccgtagttggagcccgtttcgaatgccgagtagatgcattttcttggcggtcacagggcctactccccaaaatgattcgatagggagacgagcgataaaatcaagcgcttgttccggatgaatggtacataatccgtccggtttgcgatagtctgaagctattttagccaggaatttattataagaaactccggcagacgcaacgagattgagctgttcacgaatcttttgctttatttctttggctatgtccactgccaatgaaatgcctttcttattctccgtcacatccagaaaagcctcatctaaagaaagaggttcaataatatccgtatactcatggaagatttcatgtatctgccgggaaactgctttatagacatccatccgcccatgcacaaagatcaactgcgggcaaagacgtttcgccttttgggaggacatcgccgaacggacaccataacgccgggcttcatagctggcagcagccacaactcccctctcctctgcatgacctaccgccaaaggcttgccacgaagttcaggattatcacgctgttctactgaggcgtaaaaagcatccatgtcgatatgtagaatctttctatgagtcattggaagacattagcagagcgaagttactacaaaaagattagtgctgcatggaaaaataacaaaagaaagaatagaacgcataaaaaggttattacccaatactgttcaacacaaaattatagcaatgcggcaaccttccgaatgttttcgagacgtttggcgaaagcctggttacgcttagcattaagcatatcaaaatcagcctgcaaacctgtaagaatatgcgcaggaatacccaatgcagcttcaaacaaaagagcatattgagggtttacagcacgtttacagttaataatatcatttacaacagtatatgacgcccccattctatcagcaagtttcttttgtgatataccacgaaactcgatttcatctttgatcagttctccaggatgagtcggctcataagggtcgatgttgtttgcaatcattttaggatctattccttttacttcaatcataacgcaattatttattcatatttcgttcctcgtttatgttacaaaaatagtatttgtttttccattatcaacaaaaaagttgatttgcttctcatttaaaagcaaaatatttagaaaacttatattggaaatgactcctttatagtaataattgacagatggaaaggtttattttagctaggaacttattataagatactccagcagacacaacaagattgaggtgttcacgaatcttttactttatttctttggctatgtccactgccaatgaaatgcctttcttattctccgtcacatctaagaaagcttcatccaaagaaaaaagttcgatgatatccgatacttatgaacggataccgtaacatcgggcttcatagctagcagcggccacaactcccttttcctatgcgtgacctaccaccaaaggtgccacaaagttccggattatcacactgttctactgagatgtaaaaagcatccatgttaatatataatctttctattaatcattggaagacattaacagaactaatattactacaaattcccgaatgtaaagagagctagtagtagacattcattgataatattaatattcttaacgaaatatacaaaataaaaaaccaagagtttggttactacatgaaaaaaatagaatgtacagaaagaaaattattcaatattgatattacagtaaatacacttaaaaagttaaaacgaaaaaatgttttatgaaaaacactttatcaaaccctccgattctttcagtaacttgattacaaaaaaggtaactatatacgataacacactaaactccgtagtaacaaaattttctcattttcagttagatatcaacaatatttaaaagaaacacctgtctgccatagactttatatgaagaactctgaaaagatagcttgcgggttctttttcagagtttttttcgtaactcttattatgaaaatggacaaagtttataggggaaatgaaagatgcgtggctatgatagttgatttgaagtttcgatgattgaaagatatgcttttataccctgtaacttattcttaatagattcattcgtttgaagtctttttgataatattaccactttcttcttataacctaaaggtgcaagaagtctattgttttggcatataacacctgtcactattggattttttgtttgataatgtatctttttatgacttattttgaatccagactttttaatagatagaaagaaattggggtattaaatctttgaaatctgatttagacgacaaagtgatatcatcaacaaacattgaaaatttaatatgatgttcctttgccaactgattaatttccaagccaaagggtttaaacactaaattagctattagtgttgatgttggaataccttgcggaacttgatgtttacgagtagtcagtttggtcaatattcttgctatggtaggcgcacaaccttctcgaagaaacatttgaaaaacctgtttgtgagagattgtagaaaagaatgatttcaaatcagttgtaaatatgtatttattccctttatgaaaacgagcgttacatacattgtttttccctttaacgccaccataaacgtattgaggtatttcaacttgcttaaccataaaattaaatagacgtgcttgaacctcttttagttttcctttagataagttgatttgtcttgtgacaattttgccattactattcttctttggtttacctgtgaatttattgatttttactttttcaaaagagcaatagtaatcttcaagatgtgttagcaaataatttagttgctccttgttaacacttaatatgtatagtaaatgcttttcgttcgttatcatcagtaaaaaagagattagagagctgattataacaattcaagtaaagatttacaccattctatcaaaactttattgcacttgataattgaatcaatgcttttgcaaactcgacaatggctttaatccattttgtccatttcctaatccttctctcctttgttacaatcattggagaacaatggagggaagttctttttgccttcatccctctctttaaaagcttcttctttttctttgtcataacataattttttagttcgggcaatattgccacgtgctaaaatcaatatgacctaactaaaatatgcttagacattgctttctattgtactctctattttcacgtgctataaaaaatacactataatataggatatgtataagtaagaacaatatgcaaacacgaaatagaccaaacagcctgtttatgattaccattcttcaaacctatgccttctccaatttaccaattactggtgcgattactcgctttagtttttaacataatcttagttatcaaagccttcttcagtctatcaaagaactaatacaatgcaaaaatacgaaaagtatttagtatcttctaaaaagacaaattgtattttattaaaaaaatgcgttctaaaacaatcttttgtttttaaagaaaacttgaactacatctttcaatttgaggtggcgaatcgagcgtaaagcaaatatataagaatggtatccattttacagtgtatttctaagcaatttaattataagtctcatacaaaacataatattttttcaatctatttttaattttcctctttttcaaagaaaaaacgccatcattttcttgataatcccaaaaaagtgtgtatatttgaaaatattttaaataaaataaatacaaataattaaaaaatgagctaatggataaataataaaaaactacttatgaattgaatgcatttaaacataactattgtatcacaaataaacaaatgccttatgaaaaattatcattctattctattatcattattgttatttactggttgttatgacgagaaagacatggaagactttaccaataaaagaacacttcctatttttgagtctattgtttctaggcgtgctgttcctgtttatgaatttgattgggaaaatgcagattggatgcctactcctcctcaacaagctaaaattccttcaccttggattggtcaaggaagtattgcttctacatttggtatagagattgttaatgaccgtaagaaaattgatggatgggaattgttatataatagtttcaatattgaagaatcgtcacttgtaaacccgtattttatcctttataataagtatagaggcattatgcgtatttttttctatacaacaacctcatttgtagcttcttcatcttatattcaagatggaatttctattatctcagacagagaaatatccttacttaactttttaggtgaagattttattgatacaacaaacaataaaatgcaatattgtcaaatgcaaccaactccccctgatggttcatttccactggcttctaatagatggtatatgttgcaatatgaattagcatatgatgcacatataagtgatatcccatatagtagcattcaacttaattggactcttaattattataatgtgcaaaacattagtttaggaggaacatctgtaggagaattaaatggtgttataggttcttcttcaaaaagcaatattttttcagcattaatgggagttggaaaaaccgctgcaacaggcgctttagcaggaataggtctgaatacaatttcaaaaaacacattaaattcaactactggcgaaaacaaattaggtcttccaaaggatatatttaaaaatttgtcatctggcataagcaatgctttgtcaggggctactggaaacttagcaaaaatgggtgctaatttattatcagctattgttggtggtagtagtacaagtggtcccattcctgtttgttttacattcaacactcagatagagctccaaggacgtggtaccgaaggaggtgcattcccttcaactccagtatctttttggtgtccaggaacaaatataccaccgaatgctataggttatataccattatacaacaagtcactaggtgtgttgaatttcgaaggacaaccagctgtcccatatacctatcaagagtttcctagtacaatggaggatattgatgggcgaattctttatcttctggaaggctattgtaaatttccagaagaggttgatttttctaattatcttagaataaatcctgaagtctcgaaaatagctacagttacaatcaaaaaacaagaacttgttgctagttataaggacgaatatggtaaaaagaatgtttggctacaaccttctagctttacttgggatataggagatgttcctgcttactcaaaccgtcatgactttcctgaagatttaaaattaggagtccgttttacagtggaaataaaaccattggatggaggtgcaacttctactataataaaaacattccagctctcttttccaaagaacttataaaaattaagccttatgaaatacatatttttttttattttatcaatcttcatctcatgtctagtacctagttgtaatgaccaagatgaaattttaatggaaggatcattgactattacatttaagaatccaccacaggaactcataatcaatatttattcaatgcaaagtatgaatactcctatctggagtactccatccgaagggaaaaaagagtttaagctccctctaaatataggaaattatgtgataaaaccgacatcgcctaccagttcctttttcgaattggcttttcagataagacaaggaaaagagagtatgatatcatacgatgaaagaaatcaaggaaaagtaagcaccccccattgaatattgtaataaatatgtatgagagtacatcaaaatgatgaagacactaaaaaagtcccctaaggctttctcttagaaacaatgacggtataaatctaatcaaatttatatttataccgtttcttgtattttagatttaataattcaaatcttcatgatttgatcacctttcaagataacctacttctacaaaactggacataaaagaaaaaaaataaaagtaaacaaaagctttaaccaacaaaacttttgtttacttttaaagtggacctggagggtgtctctcgaacctttttataaaatttcacaggatatcaaatatcatgtaatcagttatttatctctttctttcattaatctaaatatctcttaatatcattgtatatctcatttttcgggtgtatttttgggtgtcattttcaaacacacccaattatgaatattaaaagaaatatcattttcgcaccggaaagccgcaaaaaagacggtattccagtcacaaagaatgtgccaatccgtatgcgtgttatctttgccagtcagcgtatcgaatttactacgggatatagaatcgatgtagaaaaatgggacacagacaagcaacgggttagaaacggttgtaccaacaagctaaagcaaagtgcatccgaaatcaacgccgaactattacggcaatacaccgaaatacagaatgtgttcaaagaattcgaggtgcaagatgtaatacccacccctgcacaaattaaggaagcgttcaacctaaagacaaaaggggaaaagaaagaaaaccatgaggaaaagcaaaaggttgaattagacttcatgaaagttttcaatgaatttgtagcagaatgtagcaaacaaaatgactggtcttcctcaaccctcaaaaagtttgcaacagtcaaaaaacacatttatacatttgaccctaatactacgtttgacagttggacggaaaaacatttcaatgactatatagaattcttgcgtacagaaaaaaacatgcgcaacacttccattgccaaacaaatcaaattcgtaaaatggttcttacgttggagtaatcgaaaagggtatcaccaaaacatggcttatgataaattcacgcctaaaatgaagagtgcacccaaaaaagtgatatttctcacccaaaatgaaataaataaactaagaacctgcccaataccaccaacaaagaaataccttgaaagagtaagggatgtattgctattttgctgtttcaccggattacgtcactccgatgtgtataatttgaaacgtagtgatgttaaaaacggtcatatcgaagttattaccataaagacggcagacagtcttattattgaattaaatgaccacagcaaggcaatactcgaaaagtacaaaggtgtgccgttccctaatgacagggcattgccagttgtaagcaatcaaaggatgaacgaatttttaaaagaactgggacaactggcagaaatagatgaaccaatacgagaaacatattatagaggaaatgaacgaatagacgaagttacacctaaatacgcattattaagtactcacaccggaagacgaacatttatctgtaatgctttggcacttggcattccagtacaagtagtaatgaaatggacgggacacagcgattacaaagcgatgaagccctatattgatatagcggatgaaatcaaaatcaacgctatgactaaatttaatctgatataactatggacgaaagaataacatcaatgataccccactacgggaaactcaacaagatatataccgaaataatgtccggcggcagtttctcttttgagaagcagcaattcatttccggcttttacggagagtacggggacacgcagacatttgaaaccgcactcatcagcctcatgcttgaaatggacgccgcacacttctccatattgctgaacagcctgaaacgtgagattgaaagcaacatctcgacttacaacgcctgcagggagtttttcgaccgtctcgataccgaatacgtctgccgacggcatgaaagccgttttgactgggacatcgacagacagatgaaagtcacaaacggatattaccgggaactcatggaagccaacggctctttggaagcggtaggcttcagggagcatgaccgtcaggaagaggaactgctggaaagaaggtacgaacggtgcaagcgggaatacgacaaggaaaaagccaaactggatgaactgtacaaacagaaggagcaggcaaggcgggaagccctgcaatgcctgaaaaaccgttgcggggacatttgcagactgggcggctcactattggcaatccttgaaaaatacctgaccgaccaaaagaaaaaggagggagaggaaaaggaagccgccaccacaccgacaagccaacccgcctacttccccatgaaacttttgtcagccgtttacgaaagatgcaacggtgagcagttcgaagccgtttcagaactggacttctacgccagcatgaacctgcaaccatgcgaaggcagactgaaaataagaccgagggagaaagcccgtgtatgctatctcattttccttatgggtgaaacgctgcccaagccggacagagaaaaatggaaaggggacatcatgaacctgctgggaatagacgatgcatactacaagtcaaaatacaaagagcccgtttccgatttccccagtgacagcaatcaggtatttgcaaaggaaatgcggtcaatattccgatagtcggtgatatgtcccgacactccacgacacgaccacttttaccactcaaaataatttccgccaccctttattatcttctgatatttagtgagatagcgtgaaaccacaatcacgctatccacatccttaccacccgtacccggaactaactttgcactgttcgaacgaggtaaaaagcccatgcgcagggcttgcagtacaaacgttaattcattctgatatggaaattagagaccttttatcaaagcccgtatggcagatgacgggcgaagagttcatattcctgaaccgccatgccttgcaaggaagcgaaacgaagccagcccagccagcagccgacaaggacaagaaatacgtgtacgggataggcggcatagcccggctgttcgggtgcagcatacccacagcaaaccgcatcaagaaaagcgggaggatagacagagccattacgcagataggacgaaaaatcatcgtcgatgcggacatggcgcttgaactggcaggacacaaaagcgggggacgcagatagggaggtgcgatatggacaacaaggaaagaaacatcacgcccgaagaggcggtaatcctatggcaagcctcacggctcgacctttcggaagactacgagaaggcacccgaaattctgaaagtgcgaggctccgtcatcggtacgctggggaatttcagcgcgtcaatcggaaaagccaagagcaagaagacgttcaacgtctccgcaatcgtggcggctgcgctgaaaaacgggacggtactaagctacacggctgaactgcccgaaaacaagcggaaaatactctatgtggacaccgagcaaagcacctaccactgcgcaaaggtggcaaaacggatattgcgcatggcgggactgcccgcagacagaaaccatgaagaccttgaattcctcgtcctaaggaagtacacgcccgaagagcgcatagcaatcgtgagggaggcaatctaccgcaccgagaatatcgggctggtagtcattgacggaatacgggacatggtgcatgacatcaacaaccccggtgagtccacaacggtaatctcctatctgatgacatggacgggggaaagggacatccacatccatactgtcctgcaccagaacaagggggacgagaatgcaaggggtcacataggaaccgagctaagcaacaaggcggaaacggtgctgcaagtggagaaggacgagaataaccccgacataagcaaggtcaaagccgcacacatcagggcggtggacttcgagccgttcgcattccgtatcaatggggaggcactgcccgaactactggacggctaccggttcaaggagaaggagccgggcaaagggaggaggggaaaattcgaccccaacaaggacatcagcgagcagcagcaccgcatcgcactggaagccgcattcaccctgaaagacgaatacggctacaaggaacttgcgggagtattgagggatgcctacgcctctgtgggcgtcatacttggcggaaacagggtgacagacctcattaccctattgaagaacaaacggatgatagtgcaggagaacggcaggaaatacaccttcaagcccgatttccactattagcggtatggcatgggaaccactttactttagtcacgtaccatatatatacggaaataaagtaaagtggatatagcccgtaacatatagagaggtacgggcgaaaacaaaaaaagatgttcacaccgcctgacaagaaaaacagcacgggcatgacagcccggaaccgctttactttagtcagggtgcatatatatagcgaaataaagtaaagcggatgcagcccgcagcatgcagaaggtacgggcgaaaacaaaaaacaatatccacttaaacagaaacccacatgaatacgaatgaagcgaagcggatacgcatagaggaatatctgcacagtcttggctacagcccggtaagacggcagggcaatagcctatggtacaagtcacctttcagggacgagtgcgaaccgtccttcaaggtgaacaccgagcgcaacctatggtacgattttggcgcgagcaagggcggcaacatcatcgcactggcgcaggagctctacgcatccgacagcctgccctacctcttggaaaagatagcggagcaggcaccaaacgtgcgcccggtctccttctcttttggcgggcaacctttctccaaaccgagcttccgacagttggaggcggtgccgctttcttcccccgccctattctcctatctgcggcagagggggataaatacggaactggcaaaaagagaatgttgcgaggtgcgctatcaaactgacggcaagccttactttgccgtcggttttcccaaccgttcgggaggctacgagatacgcaacaagttcttcaagggctgcatagcaccgaaggacatcacccacatacggcaggaacagacgaaggagacctgctacctcttcgagggcttcatggactacctctccttcctcaccctgcggctggaaaggtgtcccggacgccccgaacttgacgggcaggactacattgtgctgaactcgactgccagcctctccaaagcaatccacccactgggcgattacgaacacatccattgtttccttgacaacgacaaggcgggaatggaagccgttcaggaactgcgggaggaatacgggatgcgcatacgggacgcatcgcacatatacggaggctacaacgacctgaacgacttcctttgtggtaaacggtcaggacaagcggaacggtggcaggagaagccggaaccggagaaaaggcaacggcaggcaaggcaaccggagaggaaaggcaaaggcatcgggatgtaaccgcacatgccaacggaaggctttaaaaaagccatagctcattagggctttttcttcacgcaatgcacgcatcgctaaaaaagccccaatgagcaaaagggacgccgccccttttgaaaccccgtgagccatgcggcatggaagcaaggcaggggaagtattaaccgaaaaatgtattacagttatgggatatgcagttttgcatttggaaaaggcaaaaggtgcggacggcgcaatgtccacgcacatagagcgcaccgtacacccgaagaatgcggacagaacgcgaacgcacctgaaccgggaactggtacagttccccgaaggggtaaggaaccgtacgcaggcgatagcgcaccggatagagacggcaggcatcaaacgcaagataggtaccaaccaggtaagggcaatccgggtgctgctcaccggaagcaacgaggacatgaagcgtatggaagaggacgggaggcttgacggctggtgcagcgacaacctgaaatggctccgggaaacatacggcgagcggaacctcgtgtcggcagtcctgcacatggacgagaagacgccgcacatacacgccaccattgtaccgatagtgaccggggagcgcaggaaagccagacaagacgaacagaacgggaagaagaagtacagaaagaagaacacgcaggatgtgcggctgtgcgccgatgacgtcatggcaaggcacaagctgaaacactatcaggacacctacgcacaagccatgagcaagtacggcttgcagagaggcgtggacggttcgctggcaaagcacataccgacctcgcaatattacaaggaactggtggaacggcaggacagcctgcaggagaacatcgaaaacctgctggggctggaagaggaagcgcagaagaagctgaaaaaggtcaagggggaaatcaacgtgcagaagatgaagggtgcggcggtgaacgcaaccacagccatagcggacggggtgagttctcttttgggcggcagcaaggtcaagaggctggaagcggagaacgaaaatttgaggcaggacattgtggctctgcaaaagcaggtacaagccgaacagagggagcagacaaaaatggagaaccgccacaacagcgagataaacaagatagaccggagctaccagcaaaaaatcagggaatacgacaacagactggaacagatagacacctatttccctatcgtgaaggaactgttgcccataaccgaacaatgccgggaagtggggtttaccgaggaactgacaaggcgggttgtcagcctgcaacccgtggagttcaagggaaggctctattcgaaggaacacaaggagaagttcagaacggagcactcgacggcaaccgtggagaggaacccgcaggagaaagggaaattccggctgtgcattgacggcatgcccatactcgaatggttcaaaatgaagtttcaggaactcaaagaaaagctgggtgtaagccacaccccaaaagaagagaacaaaccgaaaagagggttgagattgtaaaacgtaataaaaaataggggctttggtttcatttatttagctgttttttgtatttttgtattggattgagtatgctctttccaagacatattagaatttttagaagcgttatgcttatcttgtagatgaaaacgtaggaaattttcaaagagtacaaggatagcatagtggttctcacgctatagcgtgggctgctatatccatatctgtactcaaggtattttcctacgaccttcatctaagacgtggcatgcagacccacgcttctttttgtataactctgcttagtggggtctcaggcggctatatatgaaaccaacaacatgatttcacaagatgaattttctttatttgaccctcaaaaaatgagagcttcagtcttacctgacaagcccggtaactatatcatagtattacgtagtacgtcctcattgcccataaaagtacaaatttccaccactcctatactaacctcttttgattacaaaaaagagaaatacaatgtcgtgtatgtaggcaaaagcagtaaaagtctgcgtattcgtgactacaaacaacatttcactggcactgccggaaattccacaattcgcaaatcattaggatgtttattgggattcaaactgattccaagagacataaactctccccaaaacggaaaaactacatttggtgaatttgacgagcgtacactgaccgaatggatgaaagacaacctgctacttttttattatgcaaataatgattatgcaaatgttgaaaaagaattgattcgcatatataatcccccgcttaacttgcaaggaaatttcaataaaactaatcttgatttccgcaaggagctttctgcgcttcgttcatgcacttcggcgaaacaagccccaataccaaataaccaattaaaactaaatacctatccacaacaattgcaatgcagcaattgtggtataaatctaacaattgatgaagggttaaaaaataagaagtacattaaatgcctttcttgtggttgtattattcaaaatcccatctacatacaaaataaaaaaaataaagaacgccgacaatggatagcggtattgatttttcttgttgtggttataattttcaatatttcaagtagagaatacagcacttcttcaaagggtaacaatagaatcgaaaactacgggagcaacaaaggaccatctcaaacaaaagctatggcaggagtaagggtctatcttaaacggcattatcttaaagaccctgatagttatgaaggaataagttgggaagcctttggtatatataataaagacaataatacttattttgctcttcataaatatagggctaaaaacagttatggcggttacgtggtggaagagaaactttttgtattggattctgacgggaatgttataaaagttgtagatgacatgaatgaagtcattaatggttattgatataaacaatgaacaaacaatgaagttatgaaggagcaaaatactgaaagactttctgaatatgagaaagcccaaatagagtttgcaaaaggtaaagcggagtttctacaaggatgtggcggttgcctgatgatcccaatcatcattatcattctactttgtatagtaattttaataggtctaatcgcttctccttttatggattaatcaaaaaatttaattctaacttaaataatatggcattatgaaaaaaattattacttctattttcattttgatgttttatcttggttgttcaccaccacagaaggatgtactgtttgcaaacgcttccgatgaacaaatcatagaatggggtaaacaatacgtagtccattccattgaggatagtttaaaagaaggagaaagttacaaaataatggaatggattttggcagaaaaaaagacaagtattcccgttgaggtatggcaaatggataatacatataaaaaagattcaatatcaggatgcgtcaagctattagatacacgaggtattttcgatgaactcgcatttataggaaatggtgatagcgcatttgtagccttcgctgttgcatatacaatagatgaaaagaatgggaatagttcattcttagaaaaagtttttaccctcgataaaagtggtaaagtgttggattgtagcgattacctcagcccttctcaaaagagaaaacaaatagaagaaaattttaacagagctttggaacagatgggtcctattctgattcagacggtaaaggaaggtgcagctatggctggtaaagatacaagcaatgtaacaagtataacgattaatggaaagacatattccgaataatttataatattacgtattatgaagacaaatgaacgtattttaagaatcaacagtgtgttgcgagattattttgcgaaacatcctcaaagcggaatgatccttgcaaaagagtttatgcctctttttataaagaatggcattttcaataaagataatagagaggggttacccattcgaaaagttctgcgagatttggatactgaaaattcattggacaaaattccctatgttcatactgaaaggaaacctaaaacaatcaattggtattttcgtcctttgcttttatcgcttgtaatatttatgggtatgctttcgagttgttcttttaagtcaaataccgatttcccaaaagtgacccatgtagctttccaaaaagaaaaacatgggaaatggggtatggttggagttgatggaaacatcttgtttgaaaataaatttgacaaaagaccgtcttatgcagtaaatggagtgtttagaattcgggattatgatacaaatcaatatctttactattccgcaactccaactccccaattaataggaactcccaaaggttataagcaaggaggcatatgtagcgaaggaataattcctgttgtttctgcggatgaacgtattcactatctaacagaaacgggagaaactgcattttatttgcttccgtatcagggaaaggaattcttatgtgtatctccattctttacggagcaacgtgcttggtttcggttagaaaatcgtaaatgcggatatatagatccacaaggcaatgttgtgatagaacctatttatgataacgctttccctttccatgaaggaaaagctattgtatataacaaagaagctgacaaatggttagttatcgaccccaatggaaaagaattatttgaagccagttccaatggataccaacaatattcatacaccttttttgaaaacggatattgtttaatagaaaacttcttactcaatgaaaaaggcgaaaaagcacagagattcccctctaatatttatagtatttcacctttcattgacaatgttgctttatttcaagacagtaaaactggattatggggacagcttaacatacaaggagaaagtatcggagagcctaaatattcgcgagctttaggtattgtaggtgattggatatatgttgctgatacaattgctaatttaaaagatgactgggataatcaatatatgaatgtatatgcaataaattctaaaggtgaaattaaaaataaaatagaaaacgtttcatgtttttacccattatcccaatatatcataatggcagaaaatgagaaatattactttgctgacaaaaaagggaatccaatagacaacaactcttattacaaaatttcagttcccccatttacaaatgcccccagttactcatccttttggtcttctttaatagcacctcactccttgtctgattatgatgcttggggagttgcaaccaattatatagatgaaaagaaaacattggcatcaatattcgataaattaacatccgacggcattgacagcttaaaaattggtcaaaccattccaaaaattatggatttatacaatataaaacaaatgccaacaagtggaatgattgacttgcataatagagattggggcataaatcaggtttttgcaacgtattccgttggcattcttcatgaatgtgagtgtgtaattgtgattaaagtaaagattgatgcgagtgcttctccgataggtgataatccaaagaaattgtttgatgctataccacaatatcttacagaaactttgggattaaaaagggaagatgaaaccctttatcgatctgaagatgcttgttatgatattgtttattatgaaggagaggattcattctttttaatgtctaaagcgataacagagaaatagttaagaaacattcatataaatcgaacacttaaaaatattcccgtacagaacatcaaattctgtacgggaatacttttatacataaaaaataattatctaagtattgtggacctggggagaatcgaactcccgtccaaacgaggaaaccatatgctttctacatgcttatctttgcctaaaattttcgaacataagcaagaccaaagccaccaacttatgccttatcctctaaaatttcgtaagagttacgaggaaaaactcaaactattcccgattttactgtgccactttatcaaacgcttcggaacaagagcttttgagtgacatctcgtttctaccactttggcggaaataaagctaatctactatacttcgattaagcagcgagagcataattttcgttgccagataaaattttgataactgatatttaagtggaaattaccgacccactgcatgcttacataccattccaactcgctgtcaattccagtcaagccctaatgatgtttcaaagataggaaatcgccttgataagaacaaacaaaatgataaaaattaaaatagaatatcacaaatcatcacaatagttaatttatttaagaaaggcagatagcttttgatataaagaatgataatcagactatcatttttatttcagggtgcattttggggtgtaaacaatataaacacctgattatcaatattgtttatggagctggagggaatcgaaccctcgtccaaacgaggaaatcataagctttctacatgcttatctttgcctagattttcgaacaggaacagaaccaaagccatcaattcctgccttatcctctaaagtttcatcaaaagtgcgaggccactttcaactatccccgatgtaactgcaccactgaaccggaacgcttcggagcaacagcttccgagtgatgtctcgtcctggcaccttgtgcctggattaagctaatctactatgattcgattaagcagcaagagcgtaattagtttcgccagataaaattttgataactgagatttaagtggaaattaccgacccactgcatgcttacctaccatttctgcccgctgtcaaatccagtcaagcccatgactttgcaacaagctgaaaattctgctttattggatgcaaagatagaaaatattttggtatcgttcatcattcttttgcaattattatcactttactcctaccttcccctaccacaaccagatataaaagacaagaaacattttctaaataacgaaaagacattggtgaatattatatcaaagcattatctttaccgggcaaatttattcttaacacgagaaaataccatgaagaaacttttactcattagcctgtttctaggaagttgtgctaccctccctgcacaaaaaacatccaagattcctactgtttataagcctgtccgtacagaaatgtactaaaaagatatctcctccagccatcatcactcctaatcaaaagacgtatgtcacttgtaaagtgacgaataccggcaaacgggcaggcaatcaaggaactgtcaatcatattattgataatgaattatctactttctgggaagggaataaaggagatagcagaagtaaaattacctcaactcagaaaataagaatcaatcagagatgcagagagtatgtcaaagcgcagaatacaggcaaagcggattattcaaagaatagaagttcgcccccgtccgattccgcatagtctctcaacaacgattgaatcattccggcagcttctttcaaaccttctttgccattataaccgttgacaatagcaagaatatgggtagtattgatatccattttcgtacgctcatggtcactggtcggtgttcctatccctccgaaagaatcacgatacacaggcaatccttcgatattcagcacaccgcgtccgattccctcaaagggctctcccgccttgccgatacccagttcaaggcacgtgccctgtatcttatccgcatcgaaccctccgatagaatgccccgtacggagagaaacgagatttatgagatctaccaacgtatcaatctgatataaaggaatcccacgcatcaaacgacggcgcaaagcctctgccgacgggcgataacgtccggggtccttaccacaacgcttatatgcctcacgagtggctgcaatcacaggctgccgtttgatgtcttccatctgcgttgtggaagtcaactgttcggtgaaggcattaatttcacgccagagcccttcactataagttgtgtttctgacttttgcatatacagctgctccggcaaataccggacaagcttctttaatctcttgagaaatggaaatagtatacatattcaatcgataatagtttttggcagtacaaaaatagatatttcgcctcaatatataacaccgatcctgtggttattatctatattccacccaaaaactcctctctagaatcgtattgtttcttttttttagtaactttgcaaagctgtgaagaatagagattctatatcgcagctttttacatgttaaaaagagaaagcgtttatgcttttatcctaaatatcaaaagatcgccaattttttaacagaaaggataaaacaatacgacgttctcgctttgttttgtaggctcgtggcgtcttgtcacattcctataattcaggcgtggaggggagtgtgtttactttctgtagggcgtttggcgatgccttgatattggtggcacaatgaagttctccacgctttttatgtccttttccataaggcctcttttttaagtaatccatctgaggagaaccggatatacgattaatcttaaatgaatataagatgaaaaaggatgtgcatatagggaagcttattaaactaaagttatcggaaagtaacttatccatagctgattttgcagaagcaattcacaaaacccgcaccacagtttatgacatattcaaccggaagagtatcgacatcgacctactagtcaccatatctgaagtgctgcaattcgatttcatctcttatgcttatagcaaccggtctgaaacatcctctcccggcacatccaatagctatctcatcgttaaagtggtgaaggaatgcgaattagaaaaagaagaacctattttattccgatgcaaattaaaaacgtagcaatttattgacgctatctgtcagttctttcgacagattttcaaatctccatatcatttactcgtctatatttgcattcattattaatcttatataaaataaacatattatgattggagttattattgtactgcttatcgttgcctatgttgcttataagtttttggggaacaacgacaatgattacgtgaaacaacgtattaaaggaagaaatgagaatcagaaaaaagtaatccgttatttctgtaatgatgacggctgtttctctaaaagaatgaaagatgaagaatatgatgcgatggtacgcaatgtattgaacagcatggacttcaaacaaaaagcgctaaacaagatcggtttggatgaaagcgaagtaaacgagatcgagccggtccatttcgaaggatgggtgtttggaaagaaagcatatgcacgcttaggcaaagacaatatttaccgcagctcagcctatcaggtttcctggttattcttcagtgccaatcaggtatatttataccagtacacattcaatatggatgaagacggcaaaaaagaagcgacagaagaatatttctacaaagacatcactaacttctctacttcatcagacacagaagaaacgccacaatacgacccgaaacaaaagaaaaatatacttatcaacgtggacagcaaccgctttgcactgactgttccgggtgacaagttctactgctctatggaacagaacgattatacagaaagggctattcaaggcatgaaggctaaacttagagagaagaaagcctgagatgttttaatagataagtgagtgacagaaaagtgcctgctctctaaagagcaaaaagaagcgagagaatactgcctctttcgtccgttggaacgcccgaaacttaaatggagcaaagtattgggcattctgatcggagttgaaattctggtaagttctctatcatatgcgctatctttatggaggggtacttttcttatttattatattccgggcaacttattatgtttcatttccaccggaaaacaaatactcataggcatagttaagttatatcaacgctatgcacccgaagaaacaagaagaaaatgcctttataaaccgacctgctctgaatacgccatcctcgcattgaaaaagtatggtcttgtaaaaggactatacaaaatctacatccgtttattcaagacatgtcggggaatagaatacggcattgattatccataaactaatacctaaattcatatatgggattctttaataaacaacgaacagacggccggacatacgacggtcagggggaagaacgaaaaggatttatcgatcgtatttcattcaatggagaagcagaagacattgtatggaagttcccgtacgataatctttccattggcacacaattgattgtcaatcacagtcaggaagcaatattcttgcgtggtggtgcggtatgtgatatttttggcgaaggtacacatacgctatcaaccaataatattccggttctccaaaaattaattaatctaccctttggaggcagaactccttttacagcagaagtctatttcgtcagcaaaaccgtacgtcgtaatctcaaattcggaacaatcaacgctgttcctgtacgcgacccgctttacagtatccccattcccgtacgagctttcggtgaatacggtatccgagtcgtggacgcttcaatgttattaggcgaattggtcggtacacttcatacattcgacacggaaagtatcatagagcaatttaagtctgtcgttttgcagcaattaaacgccagtttcggacagttcgtcaaacaggaaagaatctccgtagtagacttgccggcttactctccgcaaatggcacaatacttacaaaactgtctgaagagtgaatttgcgaggtatggcatcagtctggaaaactttaatctggccagtatcaattatgatgaaggccatccgaatgtccaaaaagtactcgaagcacaagccaatgccgctgcagaaatatttgaagcgcaaggacgtgcgcaacgacgcaacatcgaacaatatactttccaggaagaacgtcagtttgatgtcatggagaccgctgccggtaatgaaggaggaagcgggcaaatgatgggcgccggtatggggctaggtatgggagtaggtatcggaggggcattcggaactcagatgggtaacattgccggagtgatgaccagccaacagccgtcttctgccgcaactccgcctccaccacctatgcctgtaacgtatcatgttctggtcaataacgtacaacaaggaccttacgatctccccacattacaacaaatggcacagaacggaacgcttacacgtgatacttacgtatggaaaaacggaatgccgcaatggactaaagcaggcgaaagtaccgaactgcaatcattattcagcgcagttccccctcctccacccattttataatcacccttaataaaatcaggatatggcaaattccagaatatcttttgtatccaatattcttattcccatcttgacgggtatcataacgttagtattattccttttattccgcccggaaaatgccggagctttgttctacaccaatatgatatatacgttactactggaaggctttttattcggctttttgagtctgctacaaaaagagagcaagaatatttcaggagcattttacagcattatcagcgtcggtgcaatctactatatcatattcggtagtggttggatgatagcttactcattgcttctgaccgctatactctcatacaaagtatatatcgcggttcatagtatcatattcttgttatttataatcgtaggctcaatagtcactcggaccgataatagctatcacgaaaagacggaagagcagacgcaacagatgagaagtatccggttctacaccgaaaagatgaaccaattagcttccaagtatttgcaacaagggattgataaagatacagacctttcacaatgggacggatacaaggttctcggaacactcattacaaagataaatcacctcactccttccatcttccgtaatgatatggcagtcaaacaactaagcaatatgctggaaaattgcgaaaagattgttgctgagctggaagaagtacctgattcggatttgaatatgattgaccgtaaaatgaaacgattcgcttcaaatgcaatagatgaaataacgctgttgcgcaatctgtcgcgaggataaatcacagaataacattatagataaaacaataatcatggaaataatatcactttcatgccccaattgcggagctcccgtatctacccggcagaataactgcgagtactgtcaaagcccggttatcatcacctcttttacgaacattgcagatatgcctctgccgcaaatcagcaagtacgcagactcatacaagaaaacattggcagagaatccggacagccaggacctgaatctgtctatcggcatctgctacctgaggctgaagatgtacgaaaaggcatctgcctcattcgaaaaagcgatggaagataactttgataatcccgaaccattctttctggcagcagtttcattgttacgaggaaaaaaaccgtttgtcactctccgcccggtaatcgacaaaatagaagaatatctgaatgccgcagttatgattgaaccgcgagcagttttctattatttcatgtcgtatatcaaacaggattattataaccggaaatttttcaagacatcacccaccagcgaggaattgtatgccacagctatccaatatggattgacagagaccgatatccagtctttccattctatgatcggtatgccacgcccctaaccgccggaagaggtcaacatgattccggacaaaatacgtccggaacgaatccctaaacgacgggcggagaagaactcgtcacaatgggtataagtgcagataccggacagttctatctgactgtcgggaacgccaaacgataataactgtatccggttagcctcccacaaatccaaatgatgttttccggtttgcccgttccacgtcgaaatacggagcatatcaaaatcttgttctttgaatgcttcgtatacttcttcacccacttcaaaagactccaatgagatgctcggacctatgcaggctataacatccttaccttccgttccgaaaatacagtgcattttctctaaagtaccgcgaaggatatgtgccactgttccccgccatccggcatgcaccgccgcaatggcttgatgagtgcggtcatacatcaagacaggcacacagtccgccgtagaaatacagatgcaatatccgggttcggaagttatcagcgcatcgattccatacaacgatttttctttctgttccggagataatccggtaaaagtgtcctcaatatgcaaaatctccgtaccatgtgtttgcacagggactaccagctcaacaagagactgtggcaatgcttccaaaagtagctttctgttaaggcacacctgttccggttcgtccccactgtaatgcgaacagttgaaagacgcataagccccttcactgtaccctccccgccgggtagttacaaaatgagaaatgttggaatatgagcttagcgactcatatcccaacattcttttatcttctgtgagtgaaatcatttttcttcccaatcttcttcttcgtactcatagtcgatgtcctcgtcatcatccgcatcttcctcatattcataaacgatgtcttcatcctcgcccatgtctttgagttcctgttgcaagcgggtcacgtctttcggacggtggacaatcgcctctatcttgttactctccttattcagttcttcccaaaggatgtctttcaacaccgagattcccaaaccggaaacagaagagatgaatacgtgcggtatgccttcgggcaatgtaggctcgatttcgtccatcagttcctgatcgagcatatcgctcttggtaattgccaacacccgttgtttgtccagcatttcaggattgaatgtacgcagttcgttcagcaagatatcatattctttacggatatcatcactgtccgccggaaccataaacaacaacaaggagttgcgttcgatatgacgcaggaaacggagtcccaaacctttaccttgactggctccctcgataattccaggaatgtccgccattacaaaagatttcccatcatgataggaaacgatacccagattcggttcgagtgtcgtaaacggataatcggcaatcttcggtttggcagccgaaatggaagaaagcaaggtagactttcccgcattcgggaatcctaccagaccgacgtcggcaagtagtttcagctccatgataacagtcatttcctgcatcggttctcccggctgcgcaaaacgcggagcctggcgggttgccgtcttgaaatgccagttaccttgaccgccgcgaccacctttaagcagaatcacttcctgcccgtcttcagtcacatcacaaatgtactctccggtttcggcattgtaaacaaccgttccgcaaggtacttcaattaccttatcctcgccgtctttgccgaaactacgtcctttacttcccgactctccatgacctgccatcgcatgacggtcaaacttcaagtgtagcaaagtccagtaattacggttgccgcgcaagatgatatggcctcctcttccgccatcgcccccatcgggacctccgttaggacaatatttctcgcgcctcatgtgcgtagagcctcttccgcccttacccgaacgacagtatatctttacgtaatcaacaaaattcgattcagccacgttggttaatgattaattggttagtgatttatatttaaagaagactacagtccgtccaccgcttcacagatatccgcaaagataccttccatagtgcccagaccgttgatgtgttggtatttcttttcgttcttgtaccagtcaatcaacggagcagtctgcgagtgatatacgtgcagacgtttcttgatcgtctcttcattgtcgtcagcacggccggagtccttaccgcgtttgataagacgtaccatcagttcatcctctggaacatccaaatcgagcattacagaaacatcctgtcctctttccgccaacattttctttaatgcttccgcctgtgcaattgttcttgggaaaccatcgaaaattacacctttgctatctttaaagctatcaaatacgcttgccagaatatcaatcatcaattcgtcgggaatcaattggccttgatcgatataacctttagccgttttacctagttctgtgccgttcttgatttcagcacgcaatacatctccggttgagatgtgattgattccatacttttctacaatacgttcgctctgcgtccctttaccggaacccggagcaccgaaaattacaatgttcaacatcttttttacctaaaaaattaatttgtatttgaatttagtctactactgtataaatgtcgggatagttacgtccgaagccgtcatagtccagaccgtatcccacgataaagtcattcggtatctccatcgctacatactcgatgttgaggtctaccttcaacttctccggcttcaccagcagagaagcgatgtgaatttcctgcggattgcgtgtacctaatgtatccagcagacgttgcatggtgagccccgtatccacaatatcttctacaatgacaaccgtacgtccggcaatgtcttcattcaagccgattacctctttgataactcctgtggaagttactccctgataagaagccagcttcacgaatgagatctcacaaggaatcgtaatatgcttcaataggtcggcggtaaacataaaagaaccgttcaacacactaaggaaaagcggattcttacctgccaaatcgcgattgatttcgttcgctacacgaatcacttctttctgaatatcctgttccttaatagaaacggtaaactgtttgtcttttatctgaatggtatccataaccggttattttaaaaaagttgtcgcaaaaatacaatttttattctacttagtgaaatctatatgaacgtttttataaagagagactctcataaaggaagtcgtttttattatggtaattatataaatagtagataaaaagctacattatcaaacagcttaacttagaagcattagctaaaataagtgaggagatatgttcttacaaacgtacctcctcattactactttacttattcgttatataataaattcccttatcaatcttctatatcttcataaataattgtcagattagcaattccagctaactccgcaactgcttcattacagtttatagacaatacattatcaaccatttttacgactaaatcataagttctatattctattccattctccttttgtataggcatagtaatagaattaggtatttttttagatgtcattccaatctgattcaataagaaagcacaagcaacatcttcttttgtcagaataagatttatcaaatgtatagcaagagcgggatcaattgtattagtgactgttgctatagatccttcgttataagtatactgtatatctatatcacttcccatcgtaagtttttccaaatttccatctgtattatatgtaaatgtcatattcattccatcataatcttcataatcattttcctcattcacaacagatgacaaatagtccctttcagtatatgcccaattattataattatcaaacattgcatctgtagattttattattttcccatcatctatagtatatgttaggactgcctctgatatcggacttacagtagtaataacacttgcttcatactgaaaagcccaatcccattccatatcatctacaataacatggttcacccgacctttatcatcataattaatctgtaataatagctgcatattttttccagcatctacaagaagttctttaacccttttagccttttgtaccgtcaatacaacattatccaatacccaagaacttgttccacgaatcaaacttacagtataatctccttcgggacagtcagccggcaaagtgaatgtcagtccatcagtagaaatcgtaacctcagaaatttcaatattacttgtgttctcagctttcaatacaattttatccccgctctcgtatccactaccaccaagtgtcacttcttttcccggattaacaaccatttctggcaaagaaggacttataatcggactatctgcatccgtcaaagtaatagaaccaagtgtccattcattgccgctttgtgtcaatatcacattataaactcctgctactaacgacatagggacagtaaatgtaactcctgcattagaaaaagcagcatctattgctgttttctctttagaagagttctctaaatacaagctaataccagaagccgtaaatcctgtacctctaataataacctcaccaccaacttctgctgtagcagggatactcacaccgctaactggaagttgtggagttggatcaccatcatcatcagatgaacatgctgtaaatgtaccgatcactgtacataccatcaacatcaataaccagatttttttcataaccagtaaattttaaattagtaattagttgtacaaatatttgtaaagtatatcaaaatattctcatacagatttttatattaatccaacaaatttagataccttccaaagtattcaatatacgctctgtatcatctgatgaaggacgtaacatatcattgtttataatctttccttccttatccaaaagcaagaaacggggaattccctcaatattgtatgctctttggaaagagcttccacgaccgataagcaactgaacaccggacaaatctccactttttacttttgcctcccactttgccttatcatgatctatcgaaagactcaaaaaagtaatattcttcccctcaaactttgactccagcttttttaggaaaggtaattccctctgacatggaccacaccaagtagcccacaagtctatataaagatactttcctttaaaatcagctagagaataagactttccatttatatcaaccgcctgaaaatccggagaaggcttaccgggagaagacaaattccatttctcatatttatcctgataatctgccaaaagcacagtatccttcacataagtatgataaatattttccaaatctgtaatattcttaatgccaaacctttctacatattccgcagccagactgttcagcaacacttctttgactctttcattcttgaaattatctgcaatgtatcgcatttgagcaacggttttcggataatagtcggtaacttcccgattaggagtatcaagtatatgagacagttccacaacaaagtcacggtactcatccatatccagccaatcctcatcttccaccatatacttccggagagtatcgtaataagcctcatccgggcgataagtactatcttgcgtcatcataatatgtcccatcggatacatgactactcctgttccataagaataatgaatacgcgccgcctccattttgttaaaattaccaatgccatccagtccgcgaacattcagcaatttatatgcttcctgttctttctgctctactttctgcatatactcattcagaggaagagcatacgtttcatccggcaacgacgtgagtgtaacagtattcagataatcaattactggtgccttttcaccttcaaacttaaacgttccgacataatcattgccatcaaaagtaatgtgtacacgatctcctttttccaaatatattttccgttcgttctggccatagaacaaattagcatataaagcatttacaccggaaattgtatccgctccatatccctgctcattcagaggaactgaatttatcgttctatgatacaccaatacaacttcggtagctgtaggattcttaacatcaaatgtaaccacaatgttatccggtttaccggaagaggtacaagcacttatcaaaccggccaacaacactacaaataaacaatttctcatatatttcctttttagtaaaaatttaattattcctttcacgataggtagcgtctacgattcgagcaaacccagtatacttttccggtgtaacagaactgaaatcaccttcagactccaatccttcataaacccgtaatattccctttccagcaccatctacacttcctacaaccaaatcatatgaacgagaggcattggcactttcccgataaagattaaatttgaggcaagtaatagtttccccattcaatgcaaattgccgttctgcttccaaaggtgaaacagataagtcgacccggtaaaccgtattgtccacagcataatacatataatttttcaaagagctaaaagcatacaaagtgccctcttcccctattcccgtacaaccggacaagtcaccataataggattttcccaacacataagtgcaatctgcatataaaagtaaatcccccaactgaatgccataaagataagacctgccatccttagtcagaatagtataagttgtccccattttggcattacccggatcatatttcgtattctccatataaacataatcatacccttcagaataatcataagacacactatgcaccactccattatcacctttaaaactggtagctatttcttccattttatccatcgttaccaaaggttcaagactacctaaatcttcataagccatcatcggacaatacgccataaaacatttattagtcgtatcatacagtaaatacacagctacatacattgatgctgccacattcgcccccacgtagggagctacatcaaaagtcttattcaccacactctgatacagaccatctatccccatccccctttcacagtaataggcttctttaccactgacaatcattttacccaaaccagcagcagtaatagaataaggacgcaaagatgcaccgtttacagctgcttcataagcgaaattatattcttccttccactcgaaattattctttcccaaacgagtagctccatcatctgtcaacaagtaaaaaggagactgggcatccgtcattgtcgatgaaagagattgaatctttcgcggacctttccattgagagatttcactataatttttcagaagatcaaagtatgtatctcctgtaaccttagaaaccatatccaaacgtgcacgtccttcttcatctgaacaaagcaccatccaaccttcagaagtagtatcgctgacagtcaaagtataatttttttgccaatatatgcccgtatccttctccgtcaccgtaaaatacagggtgtatacatcagcgttcaaagttacttcatagtccaaattgcgagtattgccaatcacagtttccacttcattctctatatcctgattgattaccttccactcaaattcatacctgtcgtcaggaagagcagaagtaccaaaatccggtgtcaattgtaaccggttatgcgtcaagacagaaatattatcatccactccggaaatttcaagttctgtcagattacggtaatcataatttcctttatcttccgtacaagccaccaatagaaagcctgctaccagaatcctccataaattattatacaaattcttcatcatatcagttctttttaaacgtcaaagggtctccatttccatcaaaggcattttcatcaaactcttcacctgcattcttcttttcctcttgttccttcacatactgagtcatttccgaactaatatatacctgcatggcaaaggtcattaccgacacgtcattaaaatcagccggtgcaacatccagcacatcacatatcaattcaaacttctgttgcgaaaatgctcctaacagattttcttcccatgctacaggagcagaggtaaacatatctgaaaatataatacggtagcgcaaggtagatactgtatctcctccagcttgtatctcttccgttacaggaagtgcaaaatagtcgttcgcacgaagctccatataaatagtctttttcattgttttcaaagattccgtgcgttttagagtaactatataatttatacctgaagctccggccggtatctctaccttatccgacaacacataatccgttccctctacagcattttcggaactaacacggatatctaccgggcgggactcatctacaggacgtcccaacaactggattttcacaggaatttccatatcatctccattctcgtagacaaaagtaacatctatgctatcctgcaaagcactcgcagaagaacggttattaaaataaataccgctaatattctgaaaagtaccgggctcgcgttcgtcacaggccgacagaccaatcagcaggctaagaaaaaccacgatatatctatttttcattttcatcatacatcttattttgttcatttaaaagcatttactttcaattttctgtttccgaatcaggaagagggactacgaatatctgatcacttgcttccggatttttactagatacggacgagaataaaacaggtctatacaatctcttatagagataaaagagttgcccttcaccgtatagctcacgtatatattcatacacaagcaaatcttgggtcaatgatgaaacagtagttaccccacgattccgtcgcaacgtattgacataactggaacctgccgtcaaagaagcagactggctctcggctgcaataagatacatctcacctatacgtaacattggaatcattgtattttctatttttccggtatcctccatatccgcatatttatagaaatacctgttagaacctgaagccacccaattcactcgataacggtagtcgtcctggttgcctccggtagctgtgcctccgaaaatgagattattcatcagatcattatccattctgaatacatagttaggaacacgagtcgggtcaaaataatttttaaacaattggttacggcttgcatgagagagagcaaagatcacttcagaagagaaaatacggtccggatcatccggtgaaccagtaaccagttttttatctacaaacggaaaaataccgctatctaccgcttttatgatttccgtagaatagttgaatgctttctttcttgcacttccaccttcctcatcattgctacttgcatacagacaaacacgtgctaataatcctgtcaccgcataataattcatccgtaaagcacgatagcgcaaaaagttagaattctgatttacatctccactcatcatcgtaccctccgtctttaccggatcattcactaataagattcgagcttcctctaggtcggttattacctttcgaatcacttctgaagcaggaagctgttcttccggcaaattggtctgcgctgtataataggggatactcagcttatctttattgcgtgaatacaccgggccaaacagtcgaagcatgtcaaaatgtagcatagcccgcagggcaagtgcttctccgcgtataatattataattatcaccggtaaaaagagatgtcctgctctccatattctcaagaatctcattacaattcaagatcatcgcatacgcttcattccacgtctcactcagtcttccacgccaatattccgtttcatattgatagtcggcaagatctttgtaatttccccacacggaattgtccgtccctattgtataagcacctcccattatttcaatcatttccacagtcaaagcgcatccgtatagcttgtcattattcaattccacatatacgccattcaataatttttggaatccctcctccgtagagaacagttcgtcatccgatatcttatcataaggcttcacatccaaccagtcactacagccacatagcagaaagcaactgagcaacatacttgtatatattttattcttcataactcattcgtttttataagttttctcttccattgtttaaaaggtggcaccgatagacaaagagatcgttcgtgcaaaaggataatcaattccacgttccgccttaacggtagaccaacggaatatatcattcatatttgcctgtaaagataaagctgccaaacctagcttcttgacaaatccttgattgaactcatagcccagactgacagactcgcaagtcagtgtgttttcatccatcacaaaacgagaagatttctcagtagtctgcaccatagatatacctttgaactgcgcttcacggttggactccgaccaacgattgtatagcgcacgcttatcttgattgttgtacacttcttctgtacctatattctctaccttgtcgaaaagagaagtgttgaataactgcccgcctatttgataacggaaaaaacagctgagtgaaaagcctttataatagaatgtagtcccgaacaatccttctatatcaggttccgtatctcctaccactacttcgtcattcacatcataggaaaaagaatatgtaccatccttctttataaagagctctttaccggtagccgaatctattccggcagaccgcacagcccagatagctgtaggacttcccccgtcataataacgggtagtacccgccaatgaagcctgtccgctcttattcaaagcactaaaagagtcaccgatattggcatatttcgaacgagagtgagttgcattcacgctcaaattccaattgattccctgttccggcagataaataggagaaaacttcaatgtagcttcccaaccttttgttttttgcataccggcattcattgtcaggcttgtcactcccatagaacccggagtcgtgatgacagccagcaacggatcagtattcttccaataataatccaaagtcacattgatccggttattccacatcgtaatatcagtaccgatattataattgattgtttcctgccatcccaagtctttgtttcccaatgcattcagaatcacacctgttccgaatacattcgtcatccagccattgaacttgtaagtcgagaatgcctgataagcggcaaaattctggtttcccgggtttccgacagaagctctcagcttgagaagttgaaagaaatctttatctctgaggaacttctcattatgaatattccaaccaagcccgacagaccatgtattccgaaaacggttatccgtgccgaacatagacgcgccatcgctacgataattaaaatcaagcaagtagcgattatcataagcataaccgccattgatataaaaacttgccgcacgtttctccgtccgactgtaatccggactttccccgtttggatagctattggcaaaagatggagaatcaaactgatcatccgtaaaaccattggctgagaatccataattttctcttttggtactgctaaaattgaatccggccacagcattaaccatgtgtttatcggcaaataaacgaccaaatgtagcggccagatccccttcatatactaatcctttggtttgtgtgtgcgtatataaccctttctccgtatcacttacatcatcaaactgtgaatgtaacggagacaaacggacatccgatgtatcatccgatttcgtcaggccgaatttggctcttaaacgaaaatcatgtgtagcaaaccactcgatgataaaattattggtaaatccaaattcctgccctttattataattgttcagatgagcgttccataacggattagaaacagaagaatcatttatgccatcctccggatagtacaggtatttttctatctcacctgccgaattatatttccggtaataaggattcgcctgtgcatattccgagaaggaaacagttgggtcgaccgtctccaaataatcaattgtcagcttattgctgaactgaaattttcccgtacgatatatcaaatcgatatttcctccaatcgtttggcgttcggattctttcattaccccattcacatgacctatgcttaatcctattccataacgtatcttttcttcaccaccttctgcatagatattgtgtttgtgcgtaaacccgttacgtaccggttctttcagccaataagtatctactcctctttctatttccttcagccgctcgttccgcaagctatttaaacgcaactgattggaaggactgttggtgttgtcctcatatactcctgccaatgtttcaaactgtaacttttcacgggcattcatcaggttatagtcagacaagtcggctatatctactccaaaatctcctttatacgaaagctgaagacgtcccttctccggtgttttagtttcaattaccactactccattggaagctttcgaaccataaatagccgtagaggcagcatctttcaatatcgtaacagaagctacacggttcatattcaggttcattacagtttccagcgtagtctcgaatccatctaaaataaacaacggctggttgggatctgtaccatattcttccttcaaccctactacactgctttttccccgtatctcgatatccggcatttgattaggattggaaccgaactgattattttccatgatcttaaaagaaggatcgagtgtccgcaaactttgcaagacattctgcgaacctaccgatttcaactcttcccccttaaatgttgtggaagaacctgtaaaactttcttttttacgttgatagattcccgtaaccaccacatctttaatctcctgcaactgttgttgcattacgatatttgcaaaagatgaagcattctttccgttaaaatgtctcgtaatcttttcataaccgacaaaagagaaagttaggtcgcagccttctaccggtaactttatactgaattctccattcagatccgtggtcgtgccggacattcccggtcctgttcctcctactattaccgaaactccgatcatcggagatcggtcacttccatcaataatccgtcctttaagttccatttccttctcttcttcccgcagttcctgttttccggaagcaggtcgcggaacaataatgatagtacgattctcaaccttaaaagtgaaatttgtaccggacagaatttcttgaagtgcctgtaccaaagaaatattatgataattagctgttatcctcttcggacattccgacaattgttttgaattataaaaaaattcataccccgtgacagcactcatcttcttcaatgcttccgccactgtcgcttttttcagctccacacttaccgtttgagcatacacagtacgacaacagactgaaaacacaagaaatataagccctatcttccaatcaatgtgaataaaacttttcttccttttcatactcttatctcattctttttatattattgtatctctcatctcaaccagagcaccccattctcaacctcacagacaaccccattggtttcctccatcaggcgagtaatatagtcaacgccacgttcataactgattttcccggaaaaggaatagtttctcaatcgctcggcaacctttatttcaaccccatatacccttgaaaggcgttttgccaagtccggaagagtttcatcctcaaagtaaatccagccatccttccatgccgcaaaagccgaagcgtctacttgtgccaccttcatatctccagacacacaatcgaagctcacttgttgatcaggagataagatgacaggttctttcccctcctctacctgataactgatttttcccgttacaagcgtagtgaaatgtttactattttccggataggcatttatattaaagctggttcccaatacctgtacagactcctgattaccagtttctacataaaacggacatttctcattacgactgacttcaaaaaacgcctctcccgtcagtctcaccctacgttctttcttaccttcaaacgaagcaggatactccaatgtagaagaagcattcagccatactttcgtaccgtccgacagagtcatctgaaagtgacgtccggcaggaacttctagtttcaagatacgctcacttgccaacgccagctttttaccggcagcagtttgtagagccacatcatctgctgtattcagctcaatacgtgctgcactgtcaagggacataacaacctcattccccatctttaatataacttgatcatcagatatagtgacccccatatcctgtaactgcgcaatggcagtagaaacctgttccgacggaataagtgtccgaaaaatcaaaacgcccgtaatcaatgccgcagcaatactaccggctgtcaatatacgaaacctgcgttttatacgaagttttctctgaatccgaccttgcaagtctttaaacccctgatcggctataaaaggatcttcctgagaatcgggcaactgcttccacaattgttccagcagttcatcgtcttgttcacctatctcccggtgcgggatatcgtgttttgtatccatatataatgaaatttactcattatatataatactgcacctgatgaatttacgtatccggttcgatattttttttgagaaaaggttattttttcttgatttccttccgtaacttcttctttactttatataaaatagtctcaactgtacggatagatattgatagttcatcagcaataactgcatttttcttttcttcccaataactcatttgaagtactttgcggctctgttccggcagacgttctatggcaggaatcaacaattcgtttctttgtgaagaaacaggcacttcctcccaatccatcatttgttcctccatagctttttcttcacgggccctccgtatttcttccgctttaatcaatcttaatgaattattatgaaccgctcttaacagataattccgtaatgatttcgtgtcatccaacgatttacgatttagccaaatagccatgaaagcatcttgcaccacttcataagccgcatcggtatcttgtaaaatatttgttgcataagtacgcagcaaaccactatatgcttgatacacagcctcaaaagccgttgaatctccttttttcaacgcttttacaatccggctgttatctgataaatcatatagttttgccataagctatttgctcttaattaaagaaatcaagagcaaagttaataaaaaatcatttcggcatatatattatgttagttttttctatcctataaaagaaatagtataataaaatgaggcaatcactttctttttgcacattgtctacatataataccttattctactccgtgcatcatcttctgtaatttcttcgacagcaggaacagaatcagtgaggcgacgcccgacattaccacaaataccataaagaaatcgtacatcgtcgcaatctggaagcccagaatggtctttacttttccatcttcgggataaaggccgctcaacataccggcaaatttgttggcggtggcagtggaaagataccatatacccatcatcagggaagcaaaacgcaacggactcagtttgttcaccatagaaagcccgataggcgacagggcaatttcaccaatagtgtggataaagtaaagtcccgtcagccaaatcatacttactttcactcccggaaccgcatctttcactccgaaacagatgaaaagatatcccaaagagagtagcaggaggccgatagcctgcttagtaggggaagaaggttccattttccgtttgttcaggaaactccatactcccggcatgatgtaagccagtacaacgacgaaaagcggattaaaggattgaaaccaggaagcaggcatttcccaacctaaaatatcgcggttggtctgttcggaggcaaaaagggtcagagaagctcccgcctgttcataggcagcccagaagaaaatcacaaaaaaagcgacgatataaatgacaaaaatacggctacgctctatctttgtcaacgaaccatccaacagaataagtaccggaaagacgatgcaagccgtgaaaataccgacactaatccagtcgcctgtgaatatgtaaccaaagaatgccaatagaacagcagccaagacagttattattatgagattgcgtatttttgtccgtgcgtccatcttcgggtgagagatgtgatcggctttatcttctttcttctcacgttttgcatcaggaatgataccgatagcttcgccggatggagagaaaagatatttattcttttgggtctcaaaaagtacgacggtaaatagcgtcatgattccggctgccagaaatccccatttaaaatcatgtggatcaccggtatctcccaagtaaccgcaaatcaacggagcagcaaaagaaccgacattcactcccatatagaaaatggtatatgccgcatccaaccgtttgtcgcccggctcgtaaagctgtccaaccagcgatgataccgtcggcttaaagcaaccgttacccagaatcaaaaagccgagtccgccatacatcagccaatgtgctagttcggtattattcaatgtggaagcactcataaacatcaggaactgcccgacggccatcatcaccgcaccccagaacactgaacggcgaatgccccaatatttatcggctatatatccgccaatcaacggagtcagataaaccaatccggtatagctgccgtaaatagacgcggccgcttctttatcaaacaataaagcttgagtcagaaagagaatgaaaatcgcacgcataccgtagtagctgaagcgttctgccgtgcttgttgcaaaaatcaggtaaaggcctttaggatgccctttcaatgcgctcatgagtttattttttagtagtttatggagcgcaaaggtacaaaaaactaaataaaatgccttaaaaaagttactctctattgaatgtaaacttactaacgataggttataaagttcttttctactattcctaaactataaacgaagcttgcgtttataaaaacgaaggctttgattatataaacgaaagtttcatttatataatcagaggcttcgtttatagttttattactgataaaagaaagtttattacctatacaaaagaactttatatcccgtagaaaaaacttatcgacctatattctgccggtcgtctacctacaataaatgtgttttcttcctataacaaaccggaaaagtcagaagaatcatgtacatttgtgggtaaaaaactaaaaaaggacatcacaatgaaaatatttccaagcagcagtatcaagaaattggatgcttataccattgagcacgaaccgattgcatcaattgacctgatggaacgtgcggcaacagtactgacaaaagccattacagacagatggagcacggatacccccgtcaccgtttttgccggaccgggaaacaatggcggagacgcgttagccatagcccgcatgatggctgaaaaaggatataagacagaagtatacctctttaatactaaaggaaatctttcacccgactgccagacgaacaaggaattggtggagatgatggaagaagttacattccacgaaatcagtacgcagttcgtaccgccgactctgacatcggaacatttggtgatcgacgggctattcgggtcgggactgaacaagccgttaagcggaggtttcgctgccgtagtaaaatacatcaatgcttctcccgccacagtcgttgccatcgatattccttcggggctgatgggagaagagaacacattcaacgtgaaaagcaatatcatccgtgcagacgttactttcagcctgcaactaccgaaacttgccttcctctttgccgaaaatacagagtttgtcggtgaatgggaattgttggatatccagttgagcgaagaaggaatcgaagaaacggagacaaactacgaaatgctagagatagaagaaatccgttcacttatcaagccacgcaaacagtttgcacacaaagggaacttcggtcacgcactgctgatagcagggtcaaaaggaatggcgggagcctccgtacttgccgcccgcgcctgcctccgttccggtgtaggattactgaccgtacatgccccgatatgcaattatgatattttgcaaatgtccgcaccggaggctatggtagagacggacgccagcgaaaactatttcgccgtgccgaccgacaccgatgattaccaagcagtcggcataggtccgggactgggacggaacgaggaaacagaagctgccctgatagagcaactggaacattgccagactcccgtagtattggacgccgatgcactgaatatccttgccaatcatcgccatacactcacacatctgccgaaaggctctatcctcactccccacccgaaggagctggaacgcctgaccggcaaatgtcaggattcttacgagcgattgacgaaggcttgtgagcttgcccataccgcccatgttcacatcgttctaaaaggtgcctactccgccatcattactcccgaaggcaaatgtttcttcaatccgaccggaaatccgggaatggcaaccggaggtagcggcgatgtgctgacaggagtgattctggcgctgctcgcacagggctactccagtgacgaagctgccaaaataggtacgtacattcacggattggcaggagacatcgcacagaagaaacaaggtatgaccgggctgattgcaagtgatattatcacctgcctgcccgcagcttggcggcttgtaagcgaataaaagttaagaacttagtgtttatttcaataacttcattaactttgttttcaaaacagttaaaaaagaaccgaatatgaaaaaactgattatagcggcggggctgctgataacgacttccgcctacgcacagaccgaagtattgacaggagtcactcgtggaaaagactacggagtggtatatagtcttcctaaaactcaaatagagcttgaaataaaagcgaataaagtgaagtatactccgggtgaattcagtaagtacgccgaccgctatttacggttgaacaacgtctctaccgatcccgaagtgtattgggaactggcaagcgtaaaagtgaaatccgtaggagtgcccaatggcgacgctacttactttgtgaaattgaaagataaaacggtagctcctcttatggaactgactgaggatggtatcgtaaagtccatcaacgtgccttacagccaaaacagttctgcaaagaagaatactccgaccgctcctgccgggcaggtgagcgccaatccccgcgacttcttgaccgaagagattctgatggcaaactccaccgctaagatggcggaactggtagccaaagaaatctataatatccgtgaaagcaaaaacgcattattacgcggacaggccgacaatatgccgtcggacggcgcacagctcaaaatcatgatagacaatctgaacttgcaggaagaagccatgacaaaaatgttctccggcatacgggaaaaagaagaaaagacattcaccgtacgccttacaccggataaagagttcagtaatgaagtggctttccgcttttccaagaaactgggcgtggttgccaacaacgatttggcaggaactccgttctatatcagcttgaaagacttgaaaacggtaaaaataccgcaagaagacggaaagaagaaaaaagacttggaaggaatcgcttacaatgtacccggacaggcattggttacactgaccgacggaaagaagaaactttatgaaggtgaacttcctgtcactcagtttggtataatagagtatctggctccggttctattcaataagaactcgactatcaaagtgtactttgacccgaataccggaggattgcttaaagtggatagagaagaaggaaaatagaaggaacacgttatccatataattttcttctctttactcaatcgacttcattaactttataaatccgtctttctgcatctgagaaagatagatagtgatacgcgactcgtagcccgcttcatgatggaagtggtctgcgagtttctctataatctcacgtaccgtacgtttcccatctatcagttcccatacagccgtaccgtgctcctccaaatatatccgatgctctttcgacatccctttcggtacaagaaagcgttgcatccacgaatacttaaaacggggaaaggagagcacaatagtctccccttcccgttctgctgttatatgttcactgcgacagggaataacctctaacaggtttgttttctctttggcagccatcgtttttatttctgaatatttgcttcttccaaaccgtaacctttctttctgttctctgctttcaacatcaaagcaatgatcaaagccaatatgccaaagagagcaaaaatactcatcggcaatgtatagtcataggtttgcgcgccatctactaccggacctttacaataagaattcagtacccatccgatcaacaaaggcacacccatcaatccccaattctgtacccagaagatcaaggcataagccgtacccaattgtttttccggaatgatcttcggaacagaaggccacatggccgaaggtaccaatgagaaagcaaatcccaagataatcatgataatcgtagcaaaccaccatacattcaggataggcagagcgaacatggtatgcacgaatatcaacatgacagatccgataaccatcaatgtagcccccttaccgatacggtcatacaaggaaccgaacagcggtgtcaacacaatagcgccgatcggcagcagcccgggaatagttcccgccaatttcgggtccacgctatacttctgaaccatcaaatcggcggcatacttgatgaacgggaacacagccgaatagaacagcacgcacagaagggcaatcaaccagaatcccttgttggtaataatatacacaatatctttcatacggaacggctcttccggttccaatccttccgcatccaacgacgcatccagtttcttatcgtagaaagtataaatgaagaaggcggttgtacctacacacaacattatgagacaaaacaaaataggagcaggaatattggtatggaacgcaccgccttcgtccgtatatccgaagaagtccgccaaaggaacagtcatcaccatggccaaagtcgtcccgatacgtgccgtagccatttcaagtcccatagccaacgccatttctttacccttaaaccatttgacgataatcttggaaacagtgattcctgcaatctcgacacctacaccgaagatggcatatcccagtgcggcaagagtcacttgagtcttgaagccgaaaagcatggcgccttcggggaaggtagtagaaatggcgtagtatttcaatccacagccgaataccatcaacagacacgcccccattccggtaaaacggacccccatcttatccagaatgataccgccgaagatcaacatcaacaagaatacgttaaaccagccgtatgcacttgtgaagaaaccgtaatcaaggctatcccataataattctttttcaagcatgggttttagcggagacattacgtcagtgaggaaatagccgcatagcatagtaaaagcgaccaatgcaagaacactccagcgtaacactgcggagtcattcaatttcttttttaattgttctgtcattgttatatttaaaaagtgattaataatctaaaacaattaagcgcggattacactgaccacccggaacattgagaatccgtgtaatccgcgtaatccgcgcctaacaatatgttaatgtgacaatatgctaatatgccaatgtactgcgaaacgccgaacggaaactggcataacggcaaattattaattattctgctgcaggagcaggagtttcagtagctggcgccggagtctcggtagctggcgcatcagcagcaggagcttctgtttgcggtgcagctgtacctgcgggcaagttatacgggttagtctgttgttccttctgtgcctgttccaacactgcgtctgtagcaacagccgaactaggaaccacataagcggtagcaatgctcattacaaccataaagatagccaaaccccatgttgttttttcaagaaaatctgtagtcttgcgcacgcccataatagcgttagatgaagaaaaaccggaagcaagtccgcctccttttgagttctgaatcagcacgatgaagcacatcaacagggctgcaatcaccattaagataacgaataataagtacatttttagttattttgaattagcgttaataatcaatttctccaaaaatctgatttggtctgcaaagtaagcatttttttttggatatttcaagcttaattttttaattatttcaagagcttttgaatatcgttgctgtttaacatagattttagccaaagtttctgtaaaacagctatcatcctcctcttcttccccactcaccgtattcgattcatcactcattgcatccgattcctcccgcaaaggttttatatgcaacggagcgtcgctttcactcttttctatgaaatcgtcgatcagttcaaatccctttagcttaggcgcttcttccgtcgattcatccgttccgggagtctcctcaagcagataggaagtatagtccatcgaatagtcgaagccggtttgggtggtcacttcctccggtgccgtagccagaaaagcgtcaatcaaagccaatgtacggtctaccgaaggctcatctttcagaacctcagtcaaaggaactccttttttccgcgactgaagttcgaaacggctgccttcaatcagttgaaacaacttccgtctgtcggctatatagagaacggcctttcgcagttccccgccaaaactgatatcatggagaatatacagatttttgagatacaacagacgaagcgactgaaaatacggatacctcgcaagcagattgcgcaactcgtacaaagtatccctattcagcgtctccggatgctgaatccattgttgaaagttaacagaagtcatttatattaccagtttgctacggttgcattgaatatttggtcggtgatctcttttgacatttcagctatcagcccgtcctgcacggcagtcagcaattggctggagtcgtaggtacggaaagcggagaactgctgttcaaagtcttcggcatgatttgtgttgttgacaaaacggacgttcaccgtgatggtcagcttcgtttccgaagaataaccatcggcggacaccgcctggttatactgattatatcccgtgatctcaccgtcaatctgcaagtccgcgttctgattcggcttcagcaattgcagacgggtctggcggataaatatatctttcaggtcttcattgaacttcgtcgccaacggggcatacacatactccgactttatcgggaaatcggcaatggaaatcgtcttcaccttatcatagttgatagatgagccgttaaacttataggaaacagtgcacgcgatgaccgccaatggcaaaaccgccagcagcagagggcgtgttatctttttaatccaaatcatattcttttatttttctataaagtgtacgctcggaaatgttcaaatccttagccgcactcttccgttttccatgatgtctctcaagtgctttgcatatcatttctttttctacttcatccagcgacagggactcttccacatattcttccgtgtcctgaatatcgtcatcatctttgcagacagccggttgctgcaccggatgaataatggcaggaaccgaaggttgcgccgtcactaccggagtggcaaccaccgcactgaccgggcttacctgtccggcacgttcagccatcagattgtgcaccatctttttcagttccgccacttcctgccgcatatcgaacagaacggaataaagaatctcccgctcgctttcaaaacccttgctctcacgtgtacccagcaatgcgggaagacgttgtgtattctgcgcgggaagataagtctgcaagatggcagcgttaatctccctgttagtttcaataatcgaaatctgctcggtgatattcttcaactggcgcacatttcccggccacggataggccagcaattctttctttgcgtcttccgtcaactgaatggccggcattctgtatttctctgcaaagtcggcggcaaacttacggaacaacagaagtacatcgtctccgcgttcacgaagaggcggtatctggataggcacggtattcaaccgatagtacaggtcttcacggaaacgtccctccgcaatggcttgcgtaagattgacattggtagccgccacaatacgcacatctgtcttttgtacacgtgacgaaccgactttgataaactcaccgctctccagcacacggagcagccgcgcctgagtaggcatgggcaactcccctacttcatcaaggaagattgtccctccgtcggcttctccgaaataacctttccgctcgccgatcgcaccggtaaacgcgcctttctcatgtccgaacagttcggaatcaattgtgccttccggaatcgctccacagttgacagcgatatactgtccgtgctttctccggctatattgatgaataatctgcgggaaactttcttttccgacaccactttctccggtaatcaacacagacaaatcggtaggagccacttgaatagcaatatcaatggcgcgtgataaagcttcggtattaccaataataccgaaacgttgtttcacttgttgtaactccgctcttgtcattactcttttactcttcgtctactgtatccagcttcagtttatcactatcatcccgtttctcgtaatactgtttccgcaacggattcgcacgggccgctttttcccgttgacgattgcggaatacatcaatggcaacatagactgcctgacggaaagagtcttcactcgccagcccctgccctgcaatgtcgtatgccgttccgtgtgccggagaagtgcgaaccaccggcaatccagccgtatagttcactccgtcgtccattgccagtgccttgaacggagccaatccctgatcatggtacatcgccagaataccgtcaaagtgagtataattgcccgaacccataaaaccgtcggccgcataaggaccgtagcacaggattcctttttcttccatttccttcatggcaggaatgatcacttcctgttcttccattcccagcaaaccaccatcaccggcatgaggattgagcgacagtactgcaatgcgcggagcaccgataccgaaatcctgtttcaggcaacgatgaaatatcatcagcttttcttgaatcaattctttggtaatcgttgtcgcaatctcccggacagggatatgcgttgtcaccaaagccacacggaaatcattcttcatcagaatcatcaatgacttattgccattgcccagccgttcctcgatatactcggtatgtccgggaaatgaaaactcttccgactgaatggtatgtttattgatcggtgccgttacaataacgtcaatcagcccctcacgatattcttcgatggcacgctccaatgcgcccaatgcagctttaccggcttcaggatccggtttggagaattccacttttacctcatcatcggtacagttcactacactcagccggttgtatcccgcttcggaagcactgttgattatactgaaattagcctgaacatccaatgctttccggtgataggcagccactttcggcgatccgtaaataatcggagtgcacaactccagcatagtaggatccgagaaagtctttaagatcacttcataacctaccccgtttatatctccttgggtaatgccgattcttattttgttatcttccatgtttttatttattagtttgttccgcttccttagtttcctctcccaatggaatctggttctgctgaacttcgttcggaagtttcagcgtatacagagaggcttccatctggcgaaccaggttgcgtttcattttatcaggtgaatagacaaatatttctgctgtaatgattcgttggttattctcgtcaagacgggtatgcgacacatacggaccacccataaagtcacctttcatgcgccacaacccgcgcgcttccatcgtgtagctgttctgcacattgatggggcggacatccgtcagcaagctgtcggttgccatataaacgccttccttgaatccgggaatgttggctttcatcacagagtcacgtttatggacaaaatattctttggtaaacgtatccttatctgtataaggataagagtacatcacgaagttacggtcggcagtaccggtattggtagaagcccagaagaagtcttcccctgtctttgaattagtcagctcggcaggcagccagatatcgcaaccgaacaagctgtccaccttatttgaaataaagttgctgtgcttcttttcgagcgaagtgatctggcggttcatttccgcacgggtgaagaaattgattatcgtctgtctgttctccttcacaaacttctcgaactcttcttcgttcggagcctggatagtcaatatcatctgcggattggcatacacatctttcgcatatttgaaagaggcctttgtatatatatcctgtatatctacaataataatgttgcgtatcaacttcagcgtagagtcataatctttaggtgaagtgtacatgatacggaaagaaggttccgattgcggcaatccgggcatatcggaatcgagtgcatcatgcaaagctcttcctgccgcacgatcccaaacaccgtggtctactactaccaaaagctcgtatgcacgtccactagaagtgtggtttcctttcagaccacaagaagcaaagacaaaggctaccaaagcaatgctcaaataaaaaaagtactttttcatgatgttcggttttatatattaactcttattattctcctcctgtttcgctgttgacaacataccgcaagctgcaaagatatcttcaccccgcgaagcacggatcgtagtgaaaagcccgtgcgatgtcaagtaatcgcggaaacgggtcatcgtatccatatccgctccctcaaggtctacacccggtatggcatgaaaacgaatcagattgattctgcaatccaatccgcgaaggagcttcagcaactctttggcatatatctgcgaatcattgagtcctttaaaaacaatatattcaaatgaaagtcgacgctgtttgctaaaatcatagttttttaacagttccaccatttcggtaatagagaacgctttttccgccggcattaactcggaacgctgggccgccaccggagaatgcaggctgatagccaaatggcaatcgctttcttcgataaaccgccgcagtcctttccgcagtcctactgtagaaagagtgatacgcttcggactccatgcgtaaccgtaagaggcggtcagcacttccaatgccttaagtacttcatcgaggttatcaagcggctcgcccatccccatcatcactacgttggtcaatttgtcacgctccggcaatgaatggatctgattgattatctgattggcagtcagattggcggtaaagccttgtttgccggtcatacagaacttacagttcatcttgcaaccgacctgtgaagagacacataacgtcgcccggtcgtcatccggaatataaactgattcaacaaaatggttatcgcccactctgtacagatacttcaccgtgccgtccacagaacgcatttcatccacaggagggaatactcctacctcatagttctgtttaagcaactcacggtgtttcaatgacaaattagtcatctcatcaatcgaggtcaccttcttttcgtaaagccaggacgcaatctgcttggcggcaaaaccgggcattcccagtctttttgccaatgcttgaagctctacgagggtcattcctaaaaggggatatttagacattcttctttctgttgatggtttatatctgcaaatgtaaggaaataaagtcgatttcgtatagtgataatgtaaaagttaacaaaattcgcttattcaccacagagtgcacagaggacacagagaaaaaaatcaggcataaattatacgtattcttctgatacgtataatttatgcctgattatataataacttcgagttctctatgttctcttcacatctctatattcttttcaccttcagtgtcctctgtggtgaaataagttagaagaacaggaagcgtgtatcctttacatttgctttcagatacaagtcgttcatcagacggctggcgaagcgagcgtgcatattagccaacgtagcttcttccgttttcgcgtcaaatgtctcgttcagtttgtccttgccgtaaacttgcaatacaaatactccggcattacctttgataggtgtgctcaacttgttcatttcagcaacagaagcataggcgcctaccaacggttcactgctgcgcaatgcggaaacataagcaggagcggcgaaggtaaccatcttcaaagaatcgcttacagcgttagtcatagacttgtattggtcgaatgaagtggcatttgccgatttcatatccgccataatcttttcagccttcttgtcttttacgatttcagctctcaactgatcctgtacagacttcaaagagcggtatccttccggtttgatgctcaccaagcctacaaccatcatgtgatcgctttcgccacattcgtacaggccggaaacttcacccggttcagctttatcaaatgcccatctcaaagcttctttagtacctctcacgccaccgataccgtgttcagagctgttcaaatctgctctgtcaagcaatctgtatccggcttcttcagcgttagccaccatcttctcaacactgggattggctgcgataaactggctgaaatcattgtaagcacgattgtaagtttctttactgaactctacttcacgcttgacaacagctactttatatttgtcttttacagctttcttgttggttacttgcagaattacgtttgcttgtcccatcggtaagttcaccaattcgttcacacctgtattgttgatggcagagatgaatttcaggttatcaccgtcgatctgcgcaccttcgtactgagcggcagtcaaccaattagaatcaccggtctgaccgtattttttagccagctccacgaagttggcgccacctttaatcgcattgtagatactgtctgccaatgtctttgttttcaacgcgtcttccacgtatacctgaatctggcggaattcgacagagtcggcaacggcagccttagcaacaatcttgaaagagttgattgtgttatcggcaccattgtagtaaggaccgtataccgcacctacggaagcagagtccaaacgtgccactacatccgacgggaaagcagtcttgttatagaacaagtctacgtacggagcatccgaacctaccgagcggataaaagaagtgtaatcgtctgttgtagtagccaactgagcagttgcctcgtccacttctttctggatagcagctctgtcctcagggcttgcagtcacctgtacatcgatgtacttgatgtcacgagtttcctgatattgcttgaattgttctttcttcttgttatacagttctttcagttccgattctttcacaacgattgtagaatctactactgaagagtaaggaatgcctgccagcaacacattgtattgattcactcttgcgtcgaaagcgtcctgagcctctaccgggttagaaagaagagctttagcgaccaaagcctggtatttttcagctaaacgactttgaatcaaagttttctgaataaacgaccagtatttatacatattattgtattgttcggcatactgtgccggcatctgtgattcgttcatcttagcatattcaacaaggaacttgttcaacatatccttatcgaagttgcctgtttgcggattttggaaaggagtctgtctcagcagaggatgtacaccagctttcagaatatcctgaatttcagcagtggagacagtgagccccaaagcttttgcttccttttcgatcagtttattgtttacgtatgaacgccatacttcatcacgcacctggttggtttgttcgtcgttcaaggcgttcactccacgcatgagtttcaccacttcggtatattcttccaccaaattctgatactcctgagcggaaagagcgtctccgttcacctcacctacgtcatgcgcctgatgcggctgcatcactttccatgcgtcacccgcaatgaaagcaaacagcgccaagccgataacaatcaccaatagaggtcctttcgacctaatgttttgtaacgttgccattttgattaatacgatttatgtttattattatttctttcttttgtcgttttagcgcacgaagatacaaaaaatgctaatatgcttctatttattagctaaaaatttcttgattatcgtcattattccaagacttttaaacgaacaagttcgattttcgtcgccgtcaccttgattatcttgaattgataacgtccgatctgaatcacttcatgtaatttcgggaagctctgatattggctcaggatcaaccctcctaccgtcagataatcatccgattcgggcaggtcgagtccgaacgtctcattcaccttctctatttccagacgggcggccagcacatactcatgttcgtctatctgcttgcagatataggaggtattatcgtgctcgtcctctatatcaccgaaaatctcttccaccaggtcttccaaggacacaatgccggacgtgccgccaaattcgtctaccactacggcaatcgtcttcttctgctgcataaacagcttcatcagcttatgagccgacattgtttcaggcacaatcggcacttgcttcacattgtcgtgccagtctttcggggcacgaaacatttccgaagaatggatataaccgactacattgtcgatattcccgtcgtatacgattatcttggagataccggactctatgaaacggtttttcagttcgtccaacgaggttgtcagatcgacagctaccacctccgtacgcggaacaatgcagtcgcgtatttttatattcgagaaatcaagcgcattctgaaatatttttacttccgtatccaactcttcttcattctcggcattgtcgatactactctgtacaaagtaatccagatcgacttttccgaatgcgatatcagacgcttccttattcaccttcatgccaaaaatgcgaaggaacaaacaagacagtccggaggacaatttggagacgggatacaaaataatgtaacagacaataagcggaacggcaaaaacgttcagtaccagattgggattgatcttgaacaatgttttcggcaaaaactctccggttaccaggatgattaaggtagagataacggtctgcgccagtaccataaggaagtgattttctatgaatcccgacaataaattgtctccgataatctgtgccatcagaataccgtagataaccaaggctatattgttgcccaccagcatagtggagataaactcattcggattcttgaaaaagacagacaggatgcgggaagtgactccccctttgcgttccatttcaaagcgcagtttgtctaccgagacaaaagctatctccattcccgaaaagaaggcggagaaaaccatagtgataattagagagatataaatattcatagcttatttcacagaatcttttttcacggaatccggcaaggctttcagttccggctgcgtggtgcccgcttcatcatccacataaaaaataccctctatattgtgaatggtgtaaactgtcatttgctgattggagtcgaagccatgcccggtgatagtacggtccggctgctgaatacgtataaacttgtcagaatacaccttctgggtagcttcgttccaatataacaattccgtattgaaacgttcgcctttccggttctgtatatctacgttccctatcagcttccaaagcctttctttgtcatagtagtaggcagtatccgctttgatactggcttctatatgaaagatagagtcaaactgttccagatatactcctttttcaaatgcccaataagaaggtttctttcggtcgaacacctgccactcttccgtattcactctataacgtgtcactccggaatcggatataagggtagtgacccctagcgtactcatcatcggaagagaatcccgttcagtgatagcttcacctatcgctttcgacttgccgctacaggaaggaaataaaagaagcataacaattgtccccaggacaattgttatgctcatgcttttatgcaataaacgttttcttcgttttcgcaacatacatttatctaatcgttgtagtctctccgatccaaccgccgatagtgatgcggtcaccggctttataacctaacatgaaaaggtctttagcctgcggagtatgagcagaatatctgccaatcaacttgttcgcttcttcagccacactaggatctaccgcctttgcacgttgcagtttgtcaatcactgcaaaataagtacacttgttcagagcggattcatcgctccagttaggactcatcgcataaaggttggctatcagaatataaggagcaccgtaattttcgttgaagctgatggccttctggcaataagatctagcctgagacagtttcttggcggaagccaataccgctgctgccgcatacgccttttctgctttcttcaaattgtcagtctccaagttcactgcttcgtcaaagaacttcacagcactgtcgatatcacctttcttgaatgcctgatatgcacatcctgtggcagcttcggcagtaggttccattttataagcatagaatgatgcttgcaaatatgcttcactttcagtacatttcatcattttcataatatcaatgactttcttcaagtatgccagatccgtttgattagcttccaccttcggtccgtaaataccttgcaatgattcacaatcggcagttccgctattaacgaacaaagcgaccaagttatctttgatacccatataggctttcttctttgattccttagtctcggcagcaatagctgcatctgcatactcggaagcagccagataatcctgaatgaattgttccttatgagtaggatccgcttttaacttatccaatgacatctgcaagaaatagaacaaagtagcggcagccgactcacctttcacagcgttgacagactggcccaaccactgataagcctgattaacgtccaacttcggagcaaaagcgatataatctacagccttgatacccaatgcttcttcaggagaagagacctttactcccttagccaagaagtcaggcgtatatttgatacgcaaatcgtgcgtattcatcagttcattaaaatatttctgataatccggattgtttctgtctttgatttgccccatcaaacctttcagaattttatatccgtccgtaaaagtatagaaacgaagcgtcgggcaattttccaacacagctttccatggagtatacgcatctttaaagttacctgcacgcacagcttcatgcgagatactactgtttgaattacagttcgcatcctgtgctaccacagtagtcgcccctgctgaaaggaacaacatagccacaagcgttttaatcttcattgtatttaaattttagttgttattataaagtcgtctattctctctcactttgttgcaactaattattctacccggcgcttgaagaaccaacgttcgttgaacgtcaatccaatgctcacacggaagatgttttcattcaccatattcgtttccaatcctttgacgcggacaaactgcccacttatactgagaatggaacgcgaacgaggaacaggcaaaccgaaaccggcagtcacgccatattcgcgagaagccttttcaccgttgatcttataatacggagtcgtataataagctcccaaacgatatttaatatgggcaagataagagcgtcctatcaaattaggaatgtactccgcacccattgatattttatgacggtcacagtaagtatatgtttcatgcatatcattgtccacatcatcacccttatagtttacatcagcccatttctgaagactataatcaacacctaccgtcaaatgcctattataattgtaagtaactcccacaccaaaagaattaggcaatcccaatgttgcatccaactcattgctaaccgttgtactagcctgcgtggttaccgttacatcgttattcaaattatgcttcggcgaataaaccgcaccgattgtcaccgaatgttttttgccaaagtcctgcgtatactgtgcgccaaaatccaacttataatcagaaacagacacagcattctgtctcacaaatgaataagaagaagatgtattcggataaagcattgtcaatgaacgagtgatatctccccaaaaataagaaacattgactcccaaagacaaattctttaaaaccttcactcctactcccgcatacaactggtgcaacccgccatctccagcaagagtctttgtatagtccggcgtcgcgtcattggcgccaggtgttgtttccgcagtaccgctatgactttccgacacattatatccgacacttgagaaaggcaatagccccacactcattgctattctaggatgcaagcggaattgcattgccagatagtcaaaactagagttcttagcgttcagcttcacaccgccgttattgacattcatattttgcagactgacacctccttcgaaaatgaaagtcagagagtcaatggctgtatacgaagcaggattcaatggattgatctgcgctccatcacggagtccaaaagcaattcctcccatcgccttgctatttccgaaactttgatcggacaaatcgccatagccatatcgtgtataaggagagtttgtattattttgagcaattgccattccggtaaccatcgtgagcaaaagcgcacatagtgtgtgtttaaatcctaccattattatagtttaaaattctatttaatcctttcaacactaaaaatctatctgcaaagatgatactttttacgctgctatcaaaagaaaattcatctccacccgttaaaaaaaccaaaagttcaggatatttatgcttcatagactcaatataacctgaaatttcgtattccatcccttttaagactccggcacgtatagccgtttcagtatcccgtcccatcgggagtttgcgcccgttggtatccaccagaggcaaacgtccggtgaactgctggagcgctttgaaacgcatttgcataccaggagaaatattaccgccatgatactgacctttcgagtcaatgaactcataagtaatacaagtccccgcgtcaatgactaatatatttctatgcgggaactgttcattcgcacctaccacagcagccatacggtcgtatcccaatgtttcaggagtctcgtacaagttgaccaccggcagaggtgtctcatgattcaaccagagtaaaggaaactgcaaagcagccagatccgccaacacccgttcgttcaaatcaatgacagtagccacaatcccctgattcaccggatatttggcgcaaagtgttttcaagcaatccaatgactgattggattctgtgagcacttccaccatctccccgtcattgaagagagcgactttcgccatcgtatttcctatgtcgataattaaattcaatgcgttttttatctttagcgggcgcaaaggtatagtaaaaaaagaaaagatgaagcatacgaaaagaattatcttatcaaaaacgttgcaaaccattgaaatataagtgatttcaccatacttgtatacttgaaagctttatagattttcatacatttgacaagttccgattagctataatgaaaacaaaattagctataaagagatgaccactgtgcagcacagggtatcttgagggtaaaagcctatgattttctttatgtaataacgtacacggacgcaggcgcgagagaacacgctttttttctaataaatataataatatagagaaaacaataagtagtatacatcgattcttcgtatattcgccgccgaataaaaagaatttccccaaaagaaacgtccgatgaaacgatttaatgactttttccgctgtatgtcgccgcttgtgctattcatgttgttcttttccaccactgatgtgtccgcaatgaaaagcaacggtccggccgcagacggtcatgactccatccgtatcagcctgctgacctgtgctcccggcgaggaaatttattctctgttcggacatacagccatccgttacgaaaatccttcacaagggattgacgtagttttcaactacggtctgttcagcttcaacacccccaacttcatacttcgcttctctctcggagagacagattatcaactaggcgcaaccgattatgcccattttgcagcagaatacgcattcttcggacgtagcgtatggcaacagactctgaacctgaccgaaagagaaaaggccgaattaatccgtctgctacaagagaattatcgtcccgagaaccgagtgtatcgttataattttttttacgacaattgcgccacccgcccccgcgacaagatagaagaaagtattgccggaaaagtgatttatccctcaaaaccgcaggacggctcacggtctttccgcgacatcgtgcatcaatattgcaaaggtcatccgtgggcacgcttcggcattgacttatgtatcggaagcgaagcagaccgtcctatcacacagcgacagatgatgtttgccccattttatctgatggatgcttttgccggagcgcaaattgagaatgactccattcagcgaccgcttgcggaagccgcccgactgattgtagacgccactcccgggacggatgaaagcggctggatattcactccgttacaatgcgccctgcttttatttatattgacagtcggcactaccatctacggtatccgtcgaaaaaccggactatggggagtagacctcttccttttcagcgcggcaggtatcgtaggttgtgttcttgcctttctggctttcttttccgaacacccggccgtcagttccaatttcttattgctcgtgtttcatcccggacaacttcttttccttccctacatcatttattgtgaccgaaaaggaaagaaatgttggtatctgaccttgaatttgatcgttttaacactttttatagtgctttttccgctaattccacaaagatttgacttagctgttgtacctttggcactcagtttgctggtacgttcagtgagcaacttaattgtgacatctaaaaagaaataatgaaaggattactgacttcccttatcaccgtacttaccttcaccgggctacaagcccagtcgttgcctgccgcacccaagctcgtggtgggactgacgattgaccaactgcgtacggactacctggaagcattctcatcactttacggggagaaaggtttcaaacgcctttggaaagagggaagagtgttctataatgccgaatatactttcagcggtgtagaccgctcgtctgccatagccgccatttacagcggaacgactccctccatgaacggaatcatctccaagcgatggatggacgcggctaccctacgtcctgtcaacagcacagacgacacggctttcatggggtactataccgaccaaacgtgttctccttccaaattattgacttccaccattgccgatgagctcaaaatagcgactcaaggcaaggggcttgtatatgccatcgcccccaaatgtgacgcggcgattcttgccgccggacatgccgggaacggcgctttctggctcaatcccaacacgggaaaatggagcggaacaacttattacggagaatttccttggtgggcaagtcagtacaacgaccgccaagccgtcgatttccgtattgcgaatatcgtatgggaaccggtatttcctcgcgggatgtacacattcttgccagactggcgggatatggttttcaaatataaatttgatgacgaccgcaacaacaagtaccgccgtttcatcaccagccctttcgtgaacgatgaagtgaatgcgcttgccgaagaagcattgaacaagagttcaatcggcatggacgacattactgacttattggcactgacttattatgccggcaactacgcacataaatccgtacaggaatgtgcaatggaaatgcaggatacctacgtgcgcattgaccgtagcattgccaacctgctcgaactgctcgacaggaaagtgggcttgcagaacgtgctcatcttcatcacttccaccggatatacagacagcgaatcgtctgattcgggattatacaaaattcccggaggagagttctacctcaaccgttgcgccgctttgctgaatatgtatctgatggctacgtacggagaaggaaagtatgtggaaacttatcacaaccaacagatttatctgaatcataagttgctggaacaaaagcaactcaatctgacggaagtacaagagaagtccgccgaattcctgatgcaattcagtggagtgaatgaggcatattccgccaacaggcttctgttgggttcgtggactccggaaatccacaaaatacgtaacggatatcatcgtaaacgctcgggggatctggtaatcgatgttcttcccggatggtcaatcgttgacgagaacagccacgagaacaaggtggtacgccattcgttcatcccctcaccgctgattttcatcggtcactcggtgaaaccggctatcatacagactcctgtaaccattgaacatattgcgcctacactggctcatttcatgcgtatccgggctcccaatgcctgcagctccgcccctattaccgacttgcggtaaaagtttactcttaaaaacagggtgcaaaacataaataaatcagcattttaatgtaactttgcagggattatccaccatggattccacagattcactcagattgaaaagaaaaatctgtgtcctgtataaaagatccgtgagaatctgtgaaatccgtggtgcaaaaaagataaataataaactaaataatagaacatgggatttaatgaatttttaagctcgattttcggaaacaaatccacacgagacatgaaagaaatcaagccctgggtggagaagattaaagctgcctacccagaggttgagaaactggataacgacgcactccgcgcaaaaacggaagaactcaaaaaatatatccgcgaatcagcaaccgccgaacgtgcgaaagtagaagagctgaaagcgagtatcgaaagccttgaattggaagaccgcgaagaagtatttgcgcaaatagacaagatagaaaaagaaattctggagaaatatgaaaaagcattggacgaagtattgcccgttgctttctccatcgttaaggcaactgccaaacgttttgccgaaaatgaagaaattgtagtgactgccacggaattcgaccgccagctcgctgcaacaaaggattttgtacgcatcgagggagacaaagccatttatcagaatcactggatagccggtggtaacgacacggtgtggaacatggttcactacgacgtacagttgtttggtggtgtcgttctccataaaggcaagattgcggaaatggcaaccggtgaaggtaagacattggtagctaccctcccggtattcctgaacgcattgaccggaaacggtgttcatgtggtaaccgtgaacgactatctggcaaaacgtgactccgaatggatggggcctctctatatgttccacggtctgagtgtggattgtatcgaccgccatcaaccgaactccgacgcacgtcgtcaggcatatctggccgatatcactttcggaacgaacaacgaattcggtttcgattacctgcgtgacaatatggctatcagtccgaaagaccttgtacaacgtcaacacaactacgcgattgtcgatgaggttgactccgtattgattgacgacgcacgtactccgttgattatttccggccctgtgccgaaaggcgatgaccaattattcgaacaactccgtccgttggttgaacgtctggtagaagcgcagaagatattggctaccaaatatttgtctgaggccaagaagctgatcgcaaccggtgacaagaaagatatggaagagggattcctcgctttgtaccggagtcataaggcattgcctaaaaataaagcgttaattaagttcttgagtgagcaaggcatcaaggccggtatgctcaagacagaggaaatttatatggagcagaacaacaagcgtatgcatgaggtgactgatccgttgtatttcgtcatcgacgagaagctgaacagcgtagatttgacagacaaaggtgtagacctgattaccggcaactcagaagacccgaccttgttcgtactccccgatatcgccggacaactctcggaactggagaatgtgccggacctgactaacgaggaaaaacttcagaagaaggacgaactactgactaactacgccattaaatcggaacgcgtacatacgatcaaccaattattgaaggcgtacaccatgttcgagaaagatgacgagtatgtggttatcgacggacaagtgaagattgtagacgaacagaccggacgtatcatggaaggccgccgctattctgacggactgcatcaggctatcgaagcaaaggaacgcgtgaaagtggaagctgctacgcagactttcgccacgattactttgcagaactacttccgtatgtatcacaagctgtccggtatgaccggtactgccgagacggaagcaggcgaactttgggacatttataaattggatgttgtggtaatcccgaccaaccgtccgattgcccgcaaagacatgaacgaccgcgtttacaagactaagcgtgaaaaatataaagccgtgatcgaggaaatcgaacaattggttcaggaaggacgtccggtgttggtaggtaccacttcggtagaaatctccgaaatgctgagtaaaatgctgaccatgcgtaagattgaacataatgtattgaatgcgaagttgcaccagaaagaagccgaaatcgtagcgaaagccggtttgagttgcgcggtaacgattgcaaccaacatggcaggtcgtggtacggatatcaaactaagtccggaggtaaaggctgcgggcggtttggcgattatcggtacagaacgtcatgagtcccgccgtgtagaccgccagttgcgtggtcgtgcaggacgtcagggtgacccgggttcttctgtattcttcgtatcactggaagatgacttgatgcgtctgttctcttccgaccgtatcgcaagcgtaatggatagactcggtttccaggaaggcgaaatgattgagcataaaatgatttccaactctatcgaacgcgcccagaagaaggtagaagaaaacaacttcggtatccgtaagcgtttgttggaatacgacgacgttatgaacaagcaacgtacggttgtctacacgaaacgccgccatgcgctgatgggtgaacgtatcggtatggatatcgtaaatatgatttgggatcgttgcgcgaatgccatcgaaaataatgactacgagggttgtcagatggaactgctccaaacgttggctatggaaactccgttcacagaggaagagttccgcaacgagaagaaagagaaattagccgacaagactttcaacattgcgatggagaatttcaaacgcaagaccgaacgtctggctcaaatcgctaatccggttatcaaacaagtatatgagaatcaaggacatatgtatgaaaacattctgattcctattacggacggcaaacgtatgtacaacatctcttgtaacctgaaagcggcttacgaatcggaatcgaaagaggtggtgaaatcattcgagaaatcaatcctgctccacgtgatcgatgaagcatggaaagagaatttgcgtgaactggacgaactgaaacattcggtacagaacgccagctacgaacaaaaagacccgttattgatttacaagctggaatccgtaacgctatttgacgcaatggtgaacaaaatcaacaaccagactgtgtctatcctgatgcgtggacaaattcctgtacaggaagctccggacgaaccgtccgcacgccgagtagaagtacgtcaggctgctccagaacaacgtcaggacatgagcaagtatcgtgagaacaaacaggatttgaacgatccgaaccaacaggctgccgccaaccaggatacccgcgaacagcagaaacgcgaaccgattcgcgccgagaaaacggtagggcgcaacgatccttgtccatgcggaagcggtaagaagtacaagaactgtcacggaagaaatctttgatcaatgaggtaaggagcagacgacagaatttgtacccggcgctccctatcttccgattataaaagaaagccttaaacggttaaaaactgtttgaggctttcttttgttctttcaaaatagtacttttgttcaaactactaaatgtattaaattgtattgactatggcaaaatcttattcattggcattcgtttctctgtttctattgctattcggcagctgtcaaagtatagaacagatttccattgattatctgcaacctgccgatttgagttttcctcctcaacttcgtaaagtggccatcgtaaataatacaagtaatgcaccggacgataagctgactccccaaactaaaaaatcgaaagacaatagagttgaaataagccgtgccatagcttatgccaatggcgatcctaaggttgcgacagaagcgatggcggaagaaatagcgcatcagaactactttgacgaagtggtgatttgcgactctgccttgcgggcaaacgataaaatctcccgtgaaagtacgctttctcaagaggaagtccgccagctagcttccgatctgggagtagatctgattattgctttggaaaatctgcaattcaaaataacgaaaacagtacgttacttggaggaattcggatgttatcaaggtgcaatagatgcgaaagtctatccaacggtatccgtatacctgcccgaacggagtaaaccgatggctactatccgtctcaatgacagcattttctgggaggatttcggaatttcacctacagaagccgccgcacaaatcatccccacaaaagatatgctgaaagaggctgctgagttcgcaggaaccgtacccgtaaaatatattgtccctatctggaagaacgggaaacgttatctgtataccggtggctccgtccccatgcgcgatgcggctatttatgtacgcgaaaattcgtgggacgaagcatacggactttggaatcaagcctaccaatcgactaaaaacgaaaagaaaaagatgcgtgcagctcttaatatagctgtttattatgagatgaaagatagtctggcaaaagcggaaaaatgggctactaccgctcaacaacacgcccggaaaacagaattgaaaaagaataccggcaacaataaaatcaataccgacgaagcaccgaattacttctacatcagcctctatttaaccgaattgaaggagagaaacgcccaattatccaagcttaagctacaaatgagccgatttaatgatgatttttaaagaaatcgtgtatcaaatcttattttttttatacctttgagctaacaaaaagaaggaatccatgaaattgagcgaacaatcactatctattatcaaatcggctatccaaaaggcagtcgctaaatacacctgtaactgtgaacaaacagcagtaaccgatatccacctccaaccggaccagacttcggggcaacttaatgtttacaacgatgatgatgaagaattagccaacgtcatgatagaagaatgggctacatacgacggtgatgattttttggaaaatgtagaaccttctttgcgcagtatcctgtgcagaatgaaagaggcgggggacttcgagaagattaccatcttgaagccttactcattcgttctggtagatgaagaaaaagaaaccgtagccgagctattattaatagacgacgatacgatactggtaaacgatgaacttctgaaaggattggataaggaattggacgatttcttaaaagagctgttagaaaaataaactccttcactaattacaattctttctatcaagctgattcgttccagcgcttagattggaacgaaatattcaatactaagggatattcagtaaatgttcctctttttaaaaaatcaagagaaaagctttgctttacgtgagcttttctcttgattttttcgttcaactctcccagtcttctatcttttttgtagaatattgtttacatattcttgttttttccttcccacccatgcattatgtacatgtcttttttaggggaagttaaaacctctcctgtttttcctgttattttagtcagattatgctgcctttctttttttcttttcgaccttttctatcatacataccgcattggctgtatgtattccaaagaaaatccaaagtacttccgttttcctgtttctagcttttatcctggccagtgagtaatgttgtttctgcgttccaaaacttccttccaggcgggtagctctttcacggctgagttccgaccgtaagattctccgaagcggctcatctttggcagctctgcccttacgcttaaaggaagtgcttatatgatattttgtacaaaatttccggttggcattattggcatagattgaatccgccgcaagcgccttaaccctaaccccggtcagttgttgttgcagatgaatacagtctttcaaacgtactccttcgttaaaagccttaaaggagatatgttctataaaggagattccgtctatctgtatattgttgactttggctccgaattcaacggatttggtttccttgcctctgataatggggcgaaggtaatgccggtcgatactcacgatacggttggacacttttttgcctgcaaataaattcttcccttgctcaaggactgtctgtatgaccgagaaacgtctttggtaatcagaggatagtgcaagcctgttcctgtaggatgaatgaagctgctccagctggtcaagtaacttttccaataactgaagtaaccttcgtgtaatcatacgagcctgtgatttcctgcgtttacgcagtttgctataagcaagataggcacggcgtacatcaagatacttgttacggggacgttgtatgtgcaatgtacggcaatgtttgcacagatgacgatgaagccatacaataccttcccataagagtttggcatcagtaggaaaacgcagatgactttcataacaggtggcatcggtcatacagacatgaaggttctcaagataaggtttccaatgctcggcaagaatgagctggagggactcaacgtcaaggcgattcgctagttcctgacgaattgcactaacgattttaggattggttagtggatgaagcggatcaatctgaacaccacaaaacaactggtaatgaatattaccgtttaaatgctcaatcagttgtgcatcggaaaagttggtataggacttcaagaccatcaaggctattttaccttcgggagaaaaataacttttacgacccaaagcagaggacttcaaatgcatttgtcgggccagttccgagaaagggaatagagaatggagtcgacctaattcactcgttgcaaaactttgacgatattttttaagcatatcgaactcggtaaaacctaaacaaggttcgatttctgagattttttgtatctttaccatgtgtttttattttagattacccccgttttggccgtcaaaccgttttttggggggaatgcttaaagatacaaaaaaggcaactaattcgcaatgaagtagttgccttaaattttattattttaggaatatccctaaatataccaaaagtatcagaaagttataccttcttcaaagcctcaatactttctttcaaagatttgataatactttccgcatctgcctgtttcttacgttccaattcaagaacagccgccggagcattattaacgaatttctcgttgctaagttttttcagcactccttgcaagaacccttctttgtgtttgagttccgcttccatacgggcgatctccgctttcacatcaatcatattccccaatggaacggcgaattcagttgttccaatcatgaaggaagctgcaccttccggcttgctctccactactgtaagagaagaaagattacacatcttaatgataaccggattcatcttctctaccggatgactgcctacaacctgcaattcaagttgttctttcatggcaatattcttctgcaaacgaatactgcgaacattactgataatttccttagcaacctcaaactcttgcaggaatttctcattcacttcattcggctcgaacatttgggttaccatcaagctagcccccggtttacgttcacgcagttgctgccacagttcttctgtaataaacggcatgaaaggatgaagcatttcaagcagacgttcgaaagagctaagaaccatatcataaataaaaccatttacaggttgcccgtaagccggtttcactatttccagcaaccaagaagagaattcatcccagaacagcttataaaccaacatcaacgcttcactcaaacgatatttagagaaaagatcagctacttcaactgccgccgcatccaatctttgatcaaaccattgaacagccaaatgcgcatcagcgggaatgggaacggaccccataccgtttgtccatcctttaatcagacggaaagcattccatatcttgttgcagaagttacgtccctgttcgcaaagggcgtcgtcgaaaagaatgtcgtttccggcaggagctgaaagcatcatacccatacgtacaccgtcagcaccatatttgtcaatcagttcgagcggatcaggagagttaccgagcgacttggacatcttacgacccagcttatcacgaacgatacctgtgaagtatacgttcttaaacggcatctgtccctcgtattcgtagcctgccataatcatacgagctacccagaagaagataatgtccggtcctgtcacaaggtcgcttgtcggatagtagtatttgatttcttcgttgcccgggttgttgattccgtcgaacaaagagataggccacaaccaagaagagaaccaagtgtccaggcaatcttcatcctgacgaaggtcttccattgtcagagcggcattacccgtcttttcttttgcttttgccagagcttcctcgggagtagcggctactacataaccaccttccggcaggaagtatgcaggaatacgatgtccccaccacaactgacggctgatacaccagtctttgatgttttccatccagtgacggtaggtattcttgtatttggcagggtagaatttcagatcgtcgttcattaccggaggcaatgccatatctgcgaaatgctgcatcttgaggaaccattgcatagacaatttcggttcgatcacaacgttggtacgttccgaatatcctaccttatttgtataggcttctattttttcgagcaatccggcagcttcgaggtccttctcgatctgcttacgaacatcgaaacggtccatgccgatatacataccggcagcttcgctcaatgtaccgttgtcattgaaaatatcgatactaggcaagttgtatttttcacccagcatatagtcgtttacatcatgggccggagttactttcagacaacctgtaccgaattcgatgtctacataatcatcctcaatcacaggaatgacacggtttaccagcggaacgatcactttctttcctttcagccattcgttcttcgggtcgttcggattgatacacatagccgtatcacccataattgtttcaggacgggttgttgcaacaaccgcgtagcgaccttccggatcaccttctactttatagcgaaggtaatacagttttccgtgttcttccttatagattacttcttcgtcagaaagggcagtcaaggctttcgggtcccagtttaccatgcggacgccccggtagatcaatcctttatcgaacagatcgacaaataccttgattacactttcgctacgtttctcatccatagtgaaagcagtacgatcccagtcgcaggatgcgccgagtttacggagttgtttcaggataataccaccgtgctcgtctgtccattcccaggcatgtttcaagaattcgtcacgagatagatcggttttcttgataccttgagaagcgagtttgtttacaactttagcttcggtagcaatagaagcgtggtcagttcccggcacccagcaagcattcttgccttccatacgggcacgacgaactaaaatatcctggatggtattattaagcatgtgtcccatgtgtaacacaccggtgacgttcgggggcgggatgacgatggtgtaaggttcacggccatcgggttttgaactgaataatttgtggtccagccaatactggtaccactttccctccacgtcagcgggattgtacttacttgctaattccatattgttttatgtatatgataatgtatattctaaaaataacgggtgcaaaattaataatttaaattcaaatcttaccaccctcggggtgtttctgtgcacggaaagagaatttatatccctcataaagagcgaatccgtagaacaaggcagtcatcgacattacatttttcaacagaatagagaatatctctccatagtctacacctgccaggacttgaaaatagcccatttcataatcttgggagatatacccgataatagacaagaaatcacctaagatgcaactaaccagagataatgccgcaccgataattccgaaaatgggacgtattcccttgccctgccgcatcgcaaaacctaccatgaatccgatagcaatgggcataaatcctatctgacgacctgtagaaacggagatcagcccccatgccaccgcaccaacgatgcatgcgacaactgcacacaatactcctttgggcaggttctcttcggcaagcatttcctcttctgtcatggataccggaaagtcttccggctcgggaggcgctaatctttccagttccttatcttgctcaaaactgtcacattcttcttcaaaagcgggaagttctccggtacgtttacaaacgagtccttttccgttcacgaaatcacgtgacacgcaattcctgcaatacttttctatttcttctgatgtggccatcttatccggtttatgttgaataactttctctgattacgcaggtacacaaagtcactgttaacagattttttgcaaatatagaggtattttttcgcgcgacgtttattaaatgcatatttttgttgactgattttatacaaatgatgaaaaataagccaaatgtaagatatttagccttaggagcattattaatcctggtgtggctaacgcaatggattcctgctctggcaacgatctattctcaaacaatctatccccttatctcctacgtcctgtcgtttttctccggtttatttccttttgccataggggatttatttattttccttagcatcacaggcgtgattgtttatcccgtttatgcccgtctccgcaagaagttgccttggaagaaaatcttattgcgcgacggagaatacttattatggatttatgtatggttctatctggcatggggactgaactactcgcagaaaaatttctatcaacgaacagaaatcccgtataccgcctatactcccgagattttccaagaattcgtagatgattatattactcaactgaaccgctcgtatactcctgtcaatagtatcaatcaagatttgatacgagaggaaactgtgcgaatctatcatcagttaagtgatagtctgggcgtacatcgccctccgcacgagcatccgagggtaaaaacaatgttattcactcccttcatttcgatggtaggggtaacgggtagcatggggcctttcttctgtgagtttacactcaacggagatttgcttcccgttaattatccggccacttatgctcacgaactagcccatttattaggtatcaccagtgaagcggaagctaatttctatgcttatcaggtttgcacccgttcagaagcgatgggaatccgtttttccggatatttctctatattgggacatgtattgggaaatgcgcaaagattactcccggaagaagaatacacccgactgtttaaacgcatccgaccggaaattatcgaattagctaagaataaccaggcgtattgggctgccaagtatagccctgtggtcggtgctgtgcaggattggatatatgacctttatctgaaagggaataagatagaaagcggacgacaaaactattcggaagtagtgggactgctgatttcctatcaggagtggaaaaagaaataaaaatcaaaaacaaaaaatagatatatttatgtcacataccagacaagaacagatggaagccttcggacgcttcctggacattctcgacgaactgcgtgttaaatgtccctgggaccgtaaacagaccaatgaaagtctgcgtcccaacaccatagaagagacttacgaactttgcgacgccctgatgagggatgacaagaaagaaatctgcaaggaattgggcgacgtattattgcacgttgctttctatgccaagataggctcggaaacaggagattttgacatcaaagatgtttgcgacaaactgtgtgataaactgattttccgtcacccgcatgtattcggagaggtaaaagcagagacagcaggacaagtttccgaaaattgggaacagttgaagctaaaggagaaagacggcaataagagtgtattaagcggtgtacccgctgccctcccctcgctcatcaaggcttatcgtattcaagacaaagcccgcaatgtaggtttcgactgggaagagcgtgaacaggtatgggataaagtgaaggaagaaatcggagagtttcaggatgaagtggctaatatggataaggacaaggcagaagctgaattcggcgacgttatgtttagccttatcaatgcagcgcgtctctacaagatcaatcctgataacgctttggaacttaccaaccaaaagtttatccgtcgcttcaattatttggaggaacatactatcaaggaaggaaaaagcctgaaggatatgtctcttgaagagatggatgctatttggaatgaagcaaagaaaaaaagactgtaagacccatgagttacattgatttaaatgcaatcatcgaaagatgatttggagttcataacacatgccaaacaggatattccactattgattgcagaaatagaatacttaaaatcaatgctgtctaaataaaaaaatagaggctctattccgtgcgagtagagcctctattttactcaaacagagcgtctaactcgtatgaatagacgctctgtttttctttatttcttcttcgaatcatttcctttatccttgccacgattcattccttttatcatctcccggtggaagcgcatttccgcacgctgcacgagaaatatcttcttactggaaagaatctttttgaacttacccagataagtcttatcaagctggtcggcagcaatacgattgttggctatcttatcgttgatttctgcatattgagcttccgttgtcttatcatccttacctttgcgcatcaaatcccacgattcatcattcagtttcttcttcttatcctgaagttcaaaatagacgggaaagaacttggctgcctcttctttactcaatccagcctgttcgataatgaatgccttttgttttgccctgaactcctcccgggataaatgctggtcacatccgtcagcagcccaaagaacaggcatgaagccacacaacaaaacaacccatgcgattagttttctcattttctgtattcaatcagttttaataaatcattctacacttgcatcactcaaataaacatataacgaataatcatccagcatagcgcggtccagtgccacatccagcatttcgtccgatacaacttcagtatccacctccgtcaccgccacttcatcgaccgcagcaggtttgtgatctgacgacgccacccgtataatcaaggcagcccccacaaacatagctgccatatagagcaatggtttcagtcttgtccatgtactgacaggttcttccttgaaaaccactttctctttttcaggaagtttattcatcacttctgaagtcaggttctcaaagtaaccatcaggaactttgaaggaatcttccttaccaagtttcttcaataggatatcttcttctttcattcgtttttctcctctctttgatttagacatagtccgagtccaaaggtttaatcaatgtcttctaaaaacttctctattttcttcactgcatgatgataagacgctttcaaagcaccgactgaggtaccgaagatttcagacatttcttcatatttcatttcttgatagtatttcagattgaacaccatgcgctgtttctccggtaaagtcattaatgccttttgcaaacacaactgcgcctcatcacccgaaaagtacgggtcgctttccagtttctgcacaaccgctgcttccagatcatcaatggccaaggtagtgacagcacgttgtctattcaagaaagtaaggcattcattcaacgcaatacgatagagccaggtagacaatttcgcctcagcacggaaataatcaatattcgtccatgccttgataaaagtattttgcaggagatcgttcgcatcctcatgcgacagcaccagccgacggatctgccaatacaattgttcgctatactgcgccacaatcatttcaaatccttgtcgctgcgtactctcctcctggaggagcttcagaacttcgcgctcgttataaggggtcataatctcttgtatctctatgtttatttatggtttcaaatccagatcggtcattgcctttagtaaagacggatcatacttataaatgtcatcacaatacatcaaattattatcggcagacagataaacagtctgataatctataaacaaaggcacatatttctccaaactataatgtttcaattcacgataagccgcactgataggaagcttctttccttcctcgcttatcggcttgaggtccattgcaattcggatgcggtcttccagtaattcatccggttcttctaataagaagaaagcaaaatcgagtgctttctgaagacgtacacaaccatggctcaccgcccggttctttcgcgtgaaagcccaacgggaaggagtatcgtgcaaataaacggaataaggatttgggaaacggaagatgatacgccccaacgaatttcccgtcttattatcctgtttcacagtataaggtactcccttgcccgcatacttcgcccatttgatactatgaggatcgacttgtgtaccattcttatcatacaccttcatgcggttacgggtaaagtaagtcgtatccctgcgataagtaggaataatctctttccggataatactttgaggaacattccaatacggattcagctccatataatagattctgctggacaacaaaggtgttttattcctcacacttcccacacaaatgcgcatttccagaatagagtctgtttcctcgttgacggcttgcagcatgaatgccgccacatttgccaccacatatttcttccctttatccagagcatactgccaacgcgcccgttccagattcagcaataaacgatcccagtaataatccgtagtatccgtctttccccaaccattcacgcgcaccaattcttcctgcattttcttataaagacgggaagagggttgcgcccaatgaaaggcggcagtgggattggcacgcaaagaatcaagagccgacaatgcaaattccatatcacaacgcttcagagaaatacggtctatcgaatcattccatctgcgctccggaggtagaaagccaaactttaaccggcacacatacgaaagataggcagctgtcaactgatattctaaatccgccaacagggaattcatcgtttttccatcttgcaattgtaatgtacgtatctgctgcaacccattacgaatactatctacaggataaagtctcggattaatcccatgccgcaatatattctctaaccagtacaacattgagtccgctgcctgcacagtcggtttatcggagaccaatgaatcattcaaccataagaaatcgccttcctcctgataatgagagactaacgcagaatcccaaactgtagtctgtttatttttttccaaacaggcatgaatgagctgccgaatactatccgcactgatctgataggcaggattaaacagttctttgaaacctgccaaagagtccggtatcggagacaaaggcttctcctttctacaagcagccaaacaaattatacatattactcccaaaaataaccggctacttttcatatacagttcctccgtcaatatcaatacataaattctctttcgctaaaattgtctgcggaaaaatggcggacgcttcattaagtaaaacagcttcatcttcatatcgggctgagaaatgcccgataaccaattgttttacctttgcatccaaagcgatttgtgcagcttgtgcagctgtcgtgtgataagtttcttttgcccgtgcctgttccgcttgtgcaaaagtagcttcatggaacagcaaatccacattgttgatttgtttcactatagacggacgaaaaattgtatcggaacaataagcgtatttacgtgccggggtcgaaggacgggtcaaacgctgattgggaataacttctccttcgggagtaacaaaatccgctccgttcttaatacggttcagttcgtaaaccggaactttataaaaatccaccatttctctgatgatatgattcggacgttgcttctcctcaaacaggaatccgcaacagggaattcgatgtttaagagggatcgtagttacagtcaccgaacggtcatcataaatctgtgtcggttctttcgtctcaaattcgtgaaaaaacactttataggtcagtgtcttacaaaaaaaagctagcatcggcgcgaataattcttccagccccttaggagaatgaatatgtaaatcggccgtcctccccaataatccgaatgtagagattagccccaagagtccaaagcaatgatcaccgtgcagatgagagataaagatatgattcaaacgggaaaatttaagccgggaacgacgtaattgcatctgagccccttccccacaatcaatcataaataatttttcacgcaaattgacgacttgtgaagtcgcaaaatgtcgtgtagtgggcaaagcggaaccgcaccctaatatatgtaactcaaacttttccatctccggcaaagatagaaaaaaaacatgttaatttcgcaagcagtgaaacaaaagtcttattacctgccatatagtatcaaaaaagaatatatatttgcatatcgacaaccggtttcaagaacatgatatgaaagctggtcacagcatcagaaaaagaagtatttaatatgacgaatccctttatatacagaaaattatcagtattgttcctactgtttattactttcgggaatgtttattccaagaataaagaaatggaacaattgttttccagattggattccgtattgacaaacagtgaaaagtacgttttagagaaagaagataaaatagaagaactgcgtaagaaacagtctatgcctctaaaaccggaagaaaaactatggcttaacaaaatgctgtatgatgaatattttgtctataatgcggactcggctatggtttatgtaaacaataatatagagatagccaacgcattaggccgaaaggacaaagaacaggagtggatactgcataaagttttccttcttgcagcccaggggctactgaatgaggctgagaaagaattattgaatgtagatataacttcattaagtaaagaaaatatgtatcagtattatgatacaaaaatctatctatactcccatttggtacaattcatcggtaatcgcctggaactgacaaattcttattacaatcttgagaaggaattcaagcacgaagctaagaaatatataactcccgatcatccttcatattatagtttttgtgcatcactacatagagaatatccccgttctgcagagggagacagtataaaattaaaattaaaaaatatagtagacaagtcatcattgtccacgcgggtggatgccatcaattcttatatgcttgctatcatgttttacaatgaaggcgatgaagataattacgtaaaataccttatttattctgccataaccgatattaaaatctgcaaccgcgatatagcttcattggaggaactttccaatatcctctatttgcgtgaagacatagacagaggctacacttacatcagttattgctttaaagccgcattgctgtatcccaacagggtgcgcgtaataaacatatcgaccgttatggataaactacagcaggcctatcgcgaaaggaacaaaatacaggaaagcaaattgcgtaaatcactctacaccacaagtatattatccattgtattactcatctccatcctactcatttatttccaattcagaaaactgtcccgttcacgtaaaaaactgaacgaaagtaaccgactgcttaattcacacgtcaaagaactttctgaagcccaacgaatgctgggtgaagtgaacggagaacttagcgaagtaaatgaaaagctaaaagtgatcaataaccaattactagagtccaattatgtaaaagaagaatacataggatatgtattctcaatatgctccaattatataaccaaacttgaagaatacaggaagaatatcagcagaaaacttaaagccggtcaaatagacgatatcaaatcattaacttccaacattacgatggtacaaagtgagttgaaggagttctatcatagtttcgacgctattttcctacacgtataccccgattttgtaaaagacttcaattccctcctgcgtcccgaagaaaagataatgcttaaagaaggtgaactcctgaacacggagttgaggatatatgcgcttgtcagactcggaataaatgacagtatgaagattgcagaatttcttcattgctctccgcagacggtttacaataatcgtttaaaaaccagaaacaaggcaataattcctaaggaagaattcaccgagacggtacgttcattgggtaaaatgcaaaaatagagagagcaaacaaaccattttacttcataaactatttacctctaccaaacattatataattaataatcaatacattaactttttatttatttactcttactatttacttgtatatacaccgtaccttatactatactacctttgtcctccaagaaattaatcgagtatatactttttaaatttaatctatgaggcaagagaaactactaggtccaaagcaaactatgaaacatacgtttgtaatctcagacgctttcttttcacaaagtgctaatttgttattttacttatcatgaaaaatgtaatattattatctttgctaatccttttgtccattcccctttcggcacaacaggaaaaagtctccttagtcaacgacagaacaggttccaagttgcttgtgaacggtaagtcttttatggtgaatggtatgaactgggattacttcccagtcggcaccaattattcatattccttatggacaaagcctgacgatataatcaaggctgctctcgatacggatatgtctttattaaagaacatgggtgtaaacgctatcagacaacacataggcgttccccccagatgggtaaaatatatctatgaacaatatggtattcacacaatgatatatagctccttcggacgctatggagtagctttggacggggcatggatagctaacaccgactattccgaccctagagtaaaaaaagtgcttctcgacgaggcgagagaattggtaaaggaatacaataatactcctggaatactcctctatcttcttggaaatgagaacaattatggtttattttggcaaggagcagaaacggaagatattccggtagaagatcgtaaatccactattcaagcggttcacttatataaactgttcaatgaagcgactgtcgagatgaagaaaatgaatgcttcagctcctatagccatttgcaacggtgaccttctattccttgatattatagccaaagaatgtaaggatgttgacattctaggaatcaactgctatcgcggtgactcgttcggcgacttgttcagcagagtaaaagcggagtatggaaaaccggtattgtttacagagttcggatccgatgcattcaatgccataactcaaagtgaagcacaaaaagagcaagcagacattctgttgaagaattggactgaaatatatctgaatgcagcaggactaggcaacaacaataactcactcggaggtttcactttccaatttgccgacggttggtggaaattcgggcaaaatactaacctgaacatacatgacaccaatgcatcatgggccaacggtggatatgtatttgactatgtgaacggtgaaaacaatatgaacgaagaatggttcggtatatgcgcaaaaggaactcctgacagcaggggaatatacgaactttacccgcgtgccgcatactatgtgctgaaagatgtccacaagattaatccttattctcccggaagtaccacctcttcaataataagcaaactttccgatatcaatgtaatgtcagccgttttatcctccagaagtgataaagctgccttgcaaggcgaaaagactcagctaatacgcctgagcgaactgagaggcgacataactacctacaatacaggtgcaaagaatactaccactccaagttccaggccgaagaatccgacaagtttccccagctttaaaggctttgaccatactgaatcgttctacgtaggcgtagcctcaaaaccggcaaagaatgtacaggcggaagtcactgtaaatgttcttggaaatgtggcggagaacccgatagacgaaatcttttatgagaacagaggacgctccagatatataacggacgaaagcggagaagtagtagatctgggtccgttggaacgcttaagactttatagtgcgagttttgactgggatggcaaactgtttaatctgaaaacattttaccgcaaaggacactatcattggggatacgaaggagacttctttggattgtatcccgaagcgagctacggcgataatatggatatttatggtggcgaagctcctttcggaagtgaaattgaaggtaagaaatacttcaaagggctgaaaattgctttcggtcccgaactatggtggggtgcaaacccggctctgcttgtcaaataccaacggaatataggtaaatataacgtagcaggtattttccattatgatatagaccagcgtgaaggaacgactacttcttatgccataccccgccccaagaatacacgggcctctcttatggtggaaagaaatttcggacgtttcaatattacagcgggcggattatggtcaggaacaacgcttgtaggacgggaatttcaagctaccacagaatacaataaagaagctatcgtatattccgacgtgataaaaacatccgatacattcggagggaagatgaaagtggtatatagcggaggaaagtttaatgcctatgcgcagggggcgataatgggattggtagccagtggcggagccgattacacacagactttaacaggatggaggctaaaagatagcggtagcggaaatcaatcgaacgtccttgccggttttacttatcagataggcaacttccagattgcccctaatttcctgtggcagaaaccgcttgtaggtccaatgcctaatggaatcgatgctcccggaagattacgaaatattattgatgatccttttgctgttagggataacagggagacaacagcgggagaattgttgctgacttatgacccgacacccgcaacttggatgtatgactgggagaatgacaataacgaagatgcaccgtttgccgcttcacttggtttcatttaccgccatcatcccacctcacaggatgcagccataggtatacttgccaacggtcgttctacctttgctttcggaggagctgcaccggctcatgatttatgggaaacaaacctgaaaatagcgtctagaatatcaagagatttcggtatcatatcaagtgtctactgtggtactgcccaagccaacggagatgatacccgtttagttaagcgggtaggtgcagacgccaaaatgatttataagaaactgcgactgaacgcaatggtgaagtttaatgactgggggccgtacgactatcacagggattttaaccttactttccctttccaatgtatgttagacttttcgaccagtctcgccaagcctaaatggttgggtccggtatccactcgcgtaggaatcagaggtactttcagaacattagatcaatattctcctcgttacgttgccggatatataccggacggttccggtggttttgaaccaagcacagatattataggcgcaggtcgtggcaacgaatgggaaataagaacctacatttcattcagcattttctaatctacgaactaattaataagatagttttatgaatcacaaaatcaatatatcatgtaagctctctgttgtcgctgttctcttttcgttgacaggatgtacgagagatataaatacggatgtgctggcaacttacccacacttgtctgatgtctttatcgatgaatttgcatccgacctgcaataccaggcatggggaaaagtaactaatttcggggtggatactgaaaccacctacgatggcacgtcatctatgcgaatagaagttcccaatccgagtgatcctatggggagttgggcaggaggtactttctattccgctacaggcagaaacctgtccggatatgacgcactgactttttatgccaagtcttccgtagctaccgctattgaagttggaataggaaattatgatactaccgaatatctggttcaagttaatgatgtccaactgaatacaaactggagcaagattatcatccctattcctaattccgcaaagcttttatcggaaaaaggattattctactactccgccggtgcagtaaatgacgaaggctacaccatctggttcgatgaggtcaagttcgaaaaacttggtacattggctcatgccaaaatagaagatatagaggttcccggttttcccggaaaactgacgataggaactctgaccgagactatcaatcttccgaacggcattaaccgtaaaatgcgggtctctcccaattattttacattcgagtcatctgacgtcaatgtggcttcggtaacaaatgatggtaacataaccgtgcacaaaacaggagaagccgttatctcgttaaaggaggctgaaggcgaaataaaggtacattgctacgatttcgctccaacacccacgaaagacgaatcggaagtgttgtctctgttcagtgattcttatactaataagatttctgcaaactggaatcctagatgggaatggtcaacagctgaatatacggaaatagataccggtgataatcatatagcacggtatagcggtttgaactttgtaggtattgtattcaacaaaactgcggattgttcgtcaaagactcacctccacctggatgtattatgcatggacgaagtaagtgaaagcactattataacagtctctatatactatggaacaacggaaataaagcatccgataacattggagaaatatcctgaattcaaatcaaaacagtggctgtcactcgatctggaacttgaaaaagaaaataaactaataccacaattggcattggcatgtgatgacaacaccaggaacattcttttggacaatatttatttctattaaaaatgataacttatgaaaccatataaaacaatattgcttagcttgctgatacttcctttgccactgttacttggaagttgcgagaaagaagaagagatagaaaacacccgatgggtattggtgtggtcggacgaatttgacacaccgactcccgacaacagacccgatccttcaaagtggacgtatgaaaaaggcgcttcaggatacggtaatcaggaacttcagaactataccgacagagtagaaaacgcctcatacacaactcacaaaggtttgggatgcctgaaaataacagctttgaacgacaattatgacggagtagcttactcttctgccagaataaagaccgaaggactgttcgaacaacgatacggacgtttcgaagcacgtctgaaacttccgtacggtccgggactttggcctgcattttggatgttaggagcaaactatgccaccgatgtatggccaaaatgcggtgaaatagatattatggaaaataaaggataccaacctaatatcgtatcaagtgctctacattttccgggacattcgggtggaaatcccataacacagacttttggctatgagagccaacgttttgacacagacttccacatatttgccgtagaatgggatgaatcccaaatagacttctttgtggataatgtactttacaaaagagtgaaagtcgctgatgtaacagatggtgaatgggtattcgatcatccattttttattattctgaatgtagcggtaggcggtacatttggtggtgatcccacagcagacactgtatttccccaaagcatgtatgtagattacgtcagggtttatcagaaatcaacagaagtacaacccggaactaataccggagatatctcttcaaacggttcaattcccggatgggattttaacggaccggattctgataaagggcttatagagcctgaattaaaataaataacaatgtaactgctaaagattaaaattatgaatttaataaaaatacaaggatactatttagggcttatggcagccataagtcttggagcggtttcatgtacgaacgaaacggaatttgccaattcgctggataaaggcgacattactttctcagctcaagtaggaaaaacgatgagcagaaccacagaaagcgcatgggatggtgacgaactgataggtgtgaaagcgggagaaacagtaaaaacttacaaagtgacaaccaatggaaaaatgtctactgaagatacaccttatacatgggatggcacaagctatgatctgctggcatggactcccctcacagcagaacagataaacctaacagaccaaactaccgaagagaaactctttgactgtgacttattggcaagtaatgcgaaagtggaagcaaagaatgtacattttgtattcagacaccaaatgacccggatgtggtgggaacttcagaaatttgaaggatatacagatgaagaagtgaacaccgcaaaagtttcgtttatcggttatggaagtgtaacgtatactaatggagaaatcacaacggtaggcgatgctgaccaattgatttctactcatgacacaaaaggagaatattatagaaacggcgaagctatgatggttccttgtgaaatgtgggagaaaccattgataaaagtagaaataggagaagatacctatatctatactccaagtaagtccaaccccaatgacgtcaataagaaaaccggagatttgcttcccaatacatggcaaagatattacttgtctgtcagcaaaaaaggactgactgtagaaatggaatccggagaaattaattgggataatgaaaagatcgatgacaatcagattacggatgctaaatttaaggctattatatctgatgaagtatcaaatttgaccaattgccagtttacaggtttggaaaacagtttcattgacaacgcaaccaacggcttctccataacttataaagaaacaaatgcaagcggaggcatcgattacgaaggtctatgtgacagagtacgtacagttgataccccaaacgggactgtcactttcacattctgcaatatccgttcggatatcaaattaacatatactaaagaatatatggaagtaggctattatttctatagtaacggtacttacgggacagattacaaagacggttccaccttaggtattatctataagataggaaaacatgagacggacaacgtaacaaattacgaaggtacggatatagaaaccattcatggatatgtagtagcgctaactgatgaaactagcgacgaaaagagtagtttcaaatggaaagaaggtaatgcaaacttgtatgggacagattttccggaacacggtataagagacggaaaaaccacacaatatctaggataccctaactctaaatatcttatagaaaaagcagctgtagcagaggctacaacagtgccggcagcctcaacttctacctgcaaaaacagtaattcacttatacccggcacatctggttggtatttgccctctcatacccaattaagagatctagcaactcttgcgggtaaaacattcactaattacagtgcattgaatggcacatattgggacagtacattcgacagtgaccctaatgcttatatagtagttttcaatgaaaatggtgcaataagcagtactgatttctacagggctgtagattcagaacaaaaagttcgtcttattcttactttctaattaatcatacaaattatgaaacaaatatattcacatatcaaactggcagccgtatcgctattaatattttcggcttgcacccaagacgagatgttacctcagatcggagaaaacgaaaccaccgtttctgatgttctgactattcaaaatgtaaatgtagccaatttcgataccggaaattctactacacgggtaatcaatgatggtgtcacagttattttcgaagcaggaaacagcttggaagatgtcaatggtgatgaaatcggtattttgctgataggcgaagatggaatcggattcgccaatgaaccctttaagtatataaacgaaaacggtgtaaacaaatgggttagtaaaaacagtgtgagttataccagcaaaattaaaaaagtcatcgcctactttccatacgcccaaatagtgaaagatggaaaagagtttgttccttcatccgttaatgaactaaaagaactaaagaaagaggaagaaacaacggaatttaaagacaaagatttgctgatagcagaaatcaatgatattcaatcccatcaattgacaatcaactttaagcacgccttttcattgatagcgttctctgcggaagcgaccattaaactagatgacacggaagagatttcctatttattagatctttccgatgtatctttctccattggcgacgaactgtacacacccgaatcaatgagcggcaagtacatctgtcttgttgacgaagaacaattagtaaaaaatgattttcgctacttctacacgattgataatattacttattcaaagacgctgaaagatcctataacactggcagccaaccaatgttacactttcccttgcccaacatcctccgaaggaacggcagatattgcagtaggtgacttctactgtaccacagaaagtaataaaacaatcattcttccaagaaatgcagccggtattcctaccggtcttacctgcaaaggaatcgtattccacataatagacgattttgaaacttttaaatctacaaatgatttaaacgactccaatttaaatggatatcaagaaaaacatggcttagtagtctctacaaaaaaaggaaataattttggcactgtggcagcaactgatatagagcaagcctttattgatggaaatgcagagaaatacactgatacggaaacatcaaacggttataaattgacacaaattttagtaggaactgaaaatctgggatttatcgctttgaataatcatactgaaaaactaaacaatagtaccgcttggtatgctccttcgttcaatgaacttaaatacctgatacaaggtgaaaatactcaaacaggttccacatcggggcaagcgtacattaacaaacaattgaaaaaaataaatgcggatgaactggcaggtacaattccttctgtcactttttacaatggtgtcggagaccatggattacgccttatgacgggcggttctgaaaatggatggcacggcatacctggcgaagctttttatccaatctgtgcattttgatgcattcctctcaaaaacaagaactaataaatatttacaataataaaagacgatttatgaagataaacaagttattatttaccacaacactgacagcattggcattaacagcctgctctccgaaaggaaccaactctgattctgagatagagaacaaagtagaagccttactggataagatgactttagaggaaaagctagggcagatgaatcagttgagtccgtgggatcctaacgaactggcaaacaaagttcgtaatggagaaataggttccatattgaattatatgaatcccgaagaagtgaataaaatacagaaaatcgcaatggaagagtcacggttaggtatccccctactagtgtcacgcgatgtaattcacggttacaagactatcttccctattccattgggacaggcagccacattcaatccacagatagtagaaaacggagcacgtgtagctgccatagaagcttcagctgatggtatccgttggacttttgcgcccatgatagatatatcacgtgaccctcgttggggacgcatagccgaaagttgcggtgaagatccctacttgacttccgtaatgggagtagctatgattaaagggtttcaaggagattcgctgaacagtccgacttcaatggcggcgtgtgccaagcactttgtagcttatggtgcatccgaaggcggtaaggactataattctacatttatccccgaaagagtactgcgcaatgtatatctacctccgttcaaagctgcggtagacgctggttgtgccactttcatgacttcattcaacgataacgatggtgtgccgtctacggcaaataaatttgtgttgaaagatatattgcgcgatgaatggaaatatgacggtatggtagtaaccgactgggcttcggctgccgaaatgatcaatcacggtttctgtacagatggcaaggaagctgccgagaaatcggtaaatgcaggcgttgacatggatatggtgagtgaaacgttcatcaaaaacctcaagcagtctttagcagagaataaggtttccatagaatcaatagacgacgccgtacggaatattctccgtctgaaataccgaatgggcttatttgaaaatccgtatattgttacaccacagaatgtgaaatatgcggaagagcacttgaaaatagcaaaagaagcggtagagcaatccgttattctcctgaagaatgacacacaaacattaccgcttacaaacaaaatccgtactgtagcggtagtaggtccgatggctgacgcaccctatgaacagatggggacatgggtgttcgacggtgaaaaagaccatactcaaacacctctcaaagccatcagagaaatgtatggcgatcaggtcaacgtaattttcgaacctgcactcggttatagccgtgacaaaaacctaaacggtatcaccaaagccgtaaacgcggcacgccacgcagatgtagtccttgcttttgtcggtgaagaagcaatactttcgggtgaggcccattctttggcaaacctaaatcttcagggagcacagagtcaactgatacaagcactgtccagtaccggcaaaccattagtaaccatagtgatggcaggacgtcaacttacaatcgctagtgaagttgaagcttcggatgcagttctttatgcgttccatccgggcactatgggaggacctgccattgccgacatccttttcgggaaggttaatccaagcgcaaagactccggttacattcccccgtatgacaggtcaggttcctatatattatgctcacaacagcacaggtcgcccggccaacccgaaagaaatgctcattgatgaaatccctgtcgaagcggggcaaacatctgttggctgccgttccttctatctcgatgccggggcttctcccttgtatccgttcggctacggattgtcttacactacctttgaatatagcaatctgaagttgacttccgacaaacttgctattaacggcgagatatcagtcacggtagatctaaagaatacaggaaagtatgacggcacggaagtagtacaactttacattcaggacaaggtaggctctgtaacccgtccggtaaaggaactgaaggcttttcaacgtgtagaactcaaagccggagaatcaaagaatgtttcattctctctgcctgtttcagagctggctttctggggctataacatgacttacaacgtagaaccgggagatttcaaattatgggtaggaacaaacagcgctgaaggtttatctgccgactttaccgtatcggctttataaacaatcctcaaagaacataaaaacatagataataaaaaaggtgtatcgctttcgcaatacacctttctgtttatttagaaatactttttattatttctttccttccaactgttctttcaatgcagcaagagcgtcgatatcgcccagcgtagttgaagcagcctggttctggatcatcggagaatcttctctcttgttgctagaagatgacttcttagcaccagaagcagctttcttttctgctctttcttcagccttagctacatcttcgaagatacggctgtgagacaggatgattctcttagcgtctttgttgaactcgatcactttgaattcaagtttctcatccaactgtgcttgtgaaccgtcttcttttacaaggtgtttcggagttgcgaaaccttctacaccgtaaggaagagctacaacagcacccttatccaacatttcgatgattgtaccttcgtgtacagaacctacagtgaacacagtttcgaatacatcccaaggattttcttcgagttgtttgtggccgaggctcaaacgacggttttctttgtcgatttccaatacctgaacttcgatatcagcaccaatctgtgtaaattctgatgggtgttttactttcttagtccaagaaaggtcagagatgtggatcaagccgtcaacaccttcttcgatttctacgaatacaccgaagttagtgaagttacgaacttttgcagtatgcttagaacctacaggatacttttcttcgatagtttcccatggatcttgtttcagttgtttgatacccaaagacatcttacgttcttcgcggtcaagtgtcagcacaacagcttctacttcgtcgcctaccttcatgaaatcttgtgcagaacgcagatgttggctccaagacatttctgaaacgtggatcaaaccttctacgcccggagcgatttcgatgaatgcaccgtagtcagccataacaaccactttacctttcaccttgtcaccaaccttcaagtcagtatcaagcgcatcccatgggtgcggagtcagttgtttcaaaccaagagcgatacgtttcttttcgtcatcgaagtcaaggataacaacgttgagcttctgatccagttcaaccacttctttcggatcgctaacacgtccccaagaaaggtcagtgatgtggatcaaaccgtctacgccaccaaggtcgatgaatacaccgtaagatgtgatatttttaacagttccttcaagaacctgtcctttttcaagtttaccgataatttctttcttctgttgttccagttcagcttcgataagagccttgtgagatacaacaacgtttttgaattcctggttgattttaaccactttgaattccattgttttgccaacgaatacatcatagtcgcggatcggtttaacgtcgatctgagaacccggcaagaatgcttcgattccgaatacgtctacgatcataccacccttagtgcggcacttgatgtaacccttgataatttcttcattttccagagcagcgttaacgcgatcccaagaacgagtagcgcgagcttttctgtgtgacagaacgagctgtccttttttgtcttcctgattttcgatgtatacttctactgtatcaccgatcttcagatccggattgtaacggaactcattcaatgggatgataccgtctgatttgtaaccgatgttcacaactacttcacgcttgttcattgcgattacggttccgtcaacaacctcacggtcgttcactttgttaagcgtaccgtcgtaagctttttccagttcatcgtggctaacgttggttactgtttcgccattttcataagcatcccagttgaaatcttcaataggagctacgttctttaagttttccattaataaataaattgtttaatactttaattaaataagacattatattatctataaatcgggcgcaaaggtaggaatattttcttgattgacaaaagaatggcagaagaaaagagaattatatccgtattttttgtaatattgcaatctttaatttatacagtttttgccatggacgagagattggacaaagtcaaggtgcaatgcgactatttaccgcttattaattttgcgatacaacaaaacggtgcatcaatcattcatcagctttctattgagaatacaacgcctgccccgctgaaggacattcaggtacaaatcacgacagaaccgactttcggaaacgccgctccgatagctgtggcacagattccgcccaatgaatcgatatgcctgtcgtcattcaatctcactttgtccgccaactatttcacacagctgaccgaacgtttatccggcaatctgaaaattgaaattacttccgaagcagaatccgtattctgccaaacctaccctatcgacattctggcatacgaccaatggggagggctcaatgtattgcccgaaatgctggccgctttcatcacccccaatcatacagccattgtgccaatcatcaagagagccgcttccatcctgggacaatggactgataatccgtccctcgacgaatatcaaagccgcactccggaccgggtaaggaaacagatggccgccatctacacggctatcacggaacaacagattatatacagcaccatccccgccagcttcgaggaatatgggcaacgtgtacggctagccgactccgtaatggcacaaaaactgggaacctgtctggatatggccttgctctatgcttcctgcctggaagcaatcggtctgaatgcactcattatcatcactcaagggcatgcttttgcgggagcctggctagtgccggagacttttccggatcctaccattgacgatgtttccctgttgaccaaacggacagccgaaggaatctacgacattaccttagtcgaaacgacctgcatgaacatgggccattcgttcgatttcgacgatgctgtgaagaaagcgaacggaaagttgacggatggaaacagtttcattcttgccatagatgtgaaaagagcgagacattcgggcatccgccccatcccccaacgcattttgcatggacaggtatgggaagtagaagaaaaggagaccgacattcaaaaaagtgccgttcatgccactccgcaaagtatcaatccttatgatttatcgggtaatgaaacccaggctgtgattaccaaacaactgttatgggaaagacggttgctggatttaagcctgcgcaacaacctgctgaatatccggattaccaaaaacacgctccaactcatcccggctaatctatcctgtctggaagatgcattggccgacggagaagaattccgcatccttcaccgccctgccgattgggaaagtccggcgatggacttcgggatttattcctccataccggagtcggatccggtggttggtttcatcaactcggaactgtcacagaaaaggttacgtttctatctgcccgaaaacgatttaggtaaggcactgactcacttataccgctcttcgcgtacttctatcgaagagaatggagccaacacgctctatctggctctcggacttttgaaatggtacgagacaccttccagcgaacgtccccgctatgcccccatcttgctattaccggttgaaattatccgtaaatcggcagccaaaggttacgtaatccgtacccgggaagaagaaacgatgatgaacatcaccttattggaaatgcttcgccaaaacttcggaatctccatatcaggattggacccgttacctaccgacgaaagcggtgtaaacgtcaaactgatctattccattatccgcaacagcatcaagaaccagcgtaaatgggatgtggaagagcaagcgattctgggtatcttctctttcaacaagttcatcatgtggaatgacattcacaacaatgccaacaaaatggttcagaacaagattgtgtccagcctcatcaacggaaagatagaatgggaagctgccacagaggaaatagatgcaacggatatggacaaacaagtgtcgcccgcagacattgtattacccatcatcgccgattcttcgcagttggaagctatctacgaagccgtacacgacaagactttcatcctgcacggccctccgggaacaggaaaatcgcaaacgattaccaatatcatcgccaacgcgctttacaaaggaaaacgtgttttatttgtagcggaaaagatggctgccctctctgttgtgcaaaacaggctggcagctatcggcctggctccgttctgtctggaaattcattccaacaagacaaagaaatccgccgttatctcgcaactgaaagaaaccacggaaattatcaggcagacacctcccgaagaattcagaaaggaagcggaacgcctgctgaatttacggtcggaattgaatcaatatatcgaagccctgcataaagaatacccgttcggagtttcattatacgacgccattatccagtatcaatccgtggacgtcgaatcttgttttgatattccacaagtttatctggatacattagataaagacacattcgcccaatgggaagatgccatcgagttgttagtccggacggccaatgcgtgcggacacccttatcagcatccattaaccggcatctcaattaccgaatattcatcagccgttaaggaggagtcctcccaactgctcaccggatttatcgacctgttgaccaccatccggcagaagcaggatgtattctccgtacttctaaaagatacggatatacaccctacacgcaaggatttccagacaatcgcccacatcatccaaagaatactcgacattccggaactgactcccggattgctgactttgccgttgctcaacgaaacactgaatgaataccgggaagtagtggttcacggacagaaacgggatgaacaaaggaaagagatagaaaccggattcatccaagaaatcctgtccatcaacgcaaagcagatgttagccgaatggaaccgggtatccgatcaatggttccttcccagatatttcggacaacggaaaatcagaaaggcaatcaacgtatatgctttaaaaacgattgaaacagaagacatcaaacctctgctccaccgcattatccggtatcaggaagaagcagaagccgtccggaaatacatcgggcaacttccctccctattcggatgccccggcaagaacgaggattggaacaccattgagcagataatcgacgacatgacttcccttcattcgcatttgttgaactacgcaaaagacattgccaaagtttcgcaaatcaaacagaatttgtccgcacaactcactgaaggaattcaaacattcagagacatccatgctcattctttcaatgaactgtatcagctcgcagatacactcacagccaccgaaaagaaattgtccggcatgctgggtatctcgatcgaagaactttataccgattcagccgactggataacgattgccttgtcaaaagcccgaacctggaaagagaacctcgacaagctcaaggactggtatcagtggctacaagcctaccaaaccctgcatagtctgggaataggatttatcgcgacggaatataaagaaaagaatattcctaccagccaacttacagacagcttccgcaagagtttctatcaggcggctatccggtatatcattgccaaagagccgactttggaattattcaacggtaagatattcaatgatatcattgctaaatacaaacaaatatccgccaaattcgaagaaacgacccaaagagaattatttgcccggttggcctccaacattccgtctttcactcacgaagccatccaaagttccgaagtgggtatccttcaaaagaatatccgcaacaatgcccgcggcatatctattcgcaagctattcgaccaaattcccactttgttgtcgcgcatgtgcccgtgtatgctgatgagtcctctttccgtcgctcaattcatcgatacggacgctgataaatttgatttgattgtctttgatgaagcctcacagatgcctacttatgaagcggtgggcgccattgcacggggtaaaaacgtcattatcgtaggcgacccgaaacaaatgcctcctaccagtttcttctcggtcaacaccattgatgaagacaacattgaaatggaagatttggagagtatccttgacgactgtctcgctctgtctatcccttccaaatatttattatggcactaccgaagcaaacatgagagcctcatcgctttcagcaactccgaatattacgataacaaactgatgactttcccctcaccggacaacattgaatcgaaagtcaggatagtcaacatcaacggttactatgataaaggcaagtcgcgccagaaccgggcggaagctcaagctgtggtggacgaaatagccagaagattgagaagcgaggaattaagaaagaaaagtatcggtgtagtcactttcagcattgtccaacaagccttgatagaagacttattatccgacctttttatcttttaccccgaactggaaactcttgcgctggaatgcgacgaaccgttatttatcaagaacctggagaatgtgcagggagacgaacgcgatgttattctcttctctgtgggctatggcccggatgcagaagggcgcgtcagcatgaatttcggaccactgaaccgggcaggcggcgaaagaagattgaatgtagccgtttcccgtgcccggtatgagatgattatctattccaccctaaggtcggagatgatcgacctgaaccggacttcttctattggagtagccggactaaaacgtttcctcgaatatgcggagaagggaacccgaagcaccatcagcagtgtgccaagacaactgtcggaagcaacagtctccatcgaaacgatcattgccgacagactgcgctcattgggttacaccgtgcatacagacataggttgctccggatacaagatagacataggtatcgtcgacaccgaaaatacctctaaatatcagttaggtattatctgcgacggcaaaaactacaaacgtaccaagaccgcacgtgaccgggaaattgtgcagaataatgtattgaaagcactcggatgggacatctaccggatatggacaatggattggtgggaaaagccggacgaagtaatagcaactatccaagaggctatcgcccgaaaaaagagttcaaaggtcggctctatgacaacagccggaattaactcaactccgacagaagtggcagcacctgcaccgacggcacagataaccaacaatgaaatttcattcgtactcaaggcatcgcctgttgctcctgaaaagcaagcagcttccgttctttctactcaaaaccggatagaacaaaagtacaagtttgcaaagatcaccccatacagttattcaccggaagactttttctttacggacagttactctatcctcctctcccaaatacggaagattatggaaagcgaggcgccaatcagtaaatccctgctctgtaagaaaatcctgtccgaatggggaatcagccgcttgggaacacgggtagaggcacagatagaaacagcactcgacacattgaatatctatcgcacagaatacgaaggacttgtcttctgctggaacgacaaagagcaatgcgcttcctattcaatctatcgcccggtttccgaccgggaagcgacagacataccacctgaagaaatagccaatgccatccggcaactattgaccgactccatcagcctgcctgcagcagatttgataaaagcatgcgcacaacagttcggctttgcccgtatgggatcgaacatagacgctgccatgcaaagaggtattcgcgaagctgtgaaaaggaattacgccaagatagaaaatgaacgggtaacgattgccaattagattaataccctttctccaaacatttcaaacggttaatagaatcggacacatacgcattgtccggttctattgaccgccaataacaaagttctccaatcagccgtttcagataaacaggatcactcgagccaatccggcgctgatgttccgccaagcctttcgtcaggatgaaatagacattcttccggatctctctctttctggctttagggattgtcagtttcgcaccggaagagacagatactcctgtaataatcttcctgccatactcattgataaaactggtcttcttatgattcggttcgaatttctcatcacggatgatctgtttgatccggggaatgatttgttctttggggaacacatctcccgaaaaagtcaggtcgtcggcatagcgggtataagtcagtccgtattccactgccagtgccgccaatttcttgtccatctcataccccacgatattgcttaacgccggacttgtaggcgctccctgcggcaagtgcctgtacaagcagcacaacactcccaatactttagacacattttccggataaccaatcttctcaaatgtctttttcaccctccggctccgtatcgaaaagaaaaaatcatgaatatccattttcaagacataccgttttcccagatggggactggcattatcaaccacagaatgaccgctccggaaacctactgccgccggatgaatcattgtcacagatgataatattcgagaattaatagtggtttgaatagattgtaattctttgtcaggagcagaaatcatccgataacctccctttctttttctcatccagaactcccggtaatgttcggaaacatcccgtagaatttccttcaaccgcgctgtttccactcccaacaagttggcgcaccagacaacagccgattcatcaaacttttgaacatactgcgctctcggaacagtttctcccaaagcatgcctaagccaggctccgtgttcccattttaccttagtagtcttttcttccttaccactgcttgttgctttccatcttttatacccctcctgtttcctgcttgaggaaatcatcttataaaccaggaaagcggtgataacaatgatcgttattaaaattccgtccattttgtatatgcatataaaaaagagagaagagaggatgagttatttactaaaataaatttaggtatttataccttagaatttattttctaggaaaatacctgtgcttatgaggcgactacacctctttgatgctaaattctgccctcatcctctcttatacaaagataactaaaatctttcgataaaacaaccggaaggagaaaaactatcggttgaacaactcaaacgtgaacttacagcctattcccccaaatttccagttttcgctgctcacaaaaactcctacgtcaaaaatatgcgtaccgatgccatatcctacttccagataaggttgaaggtgcggcatagagagggcactgatataaatacgttcattctgcacataacgggtgtacttcatcagatgccggagaataaggaacggagcttcgtaggtgaaatgcccccgtacataacggcgggaggagttataccaacgtgagtcaagcacctgaaacactccaccgatttcatcattccagcccaccggaaggttatggcgggagaaattgacaaagtccacaaaatacaactcatcctgattggtgaatgctccgaatccgaaacgataataaatgttacgcatcaatcccatccggatttgatgttgaaggtcgaattctattctttcatattcgcccgtactcttgaatacgcctttgattccccgttcataatcaaccgagaaagtaggatacaatgaacgcagatttatcttccgtttcccgttcatataataatagagtcccggtgtccattccacccggacacgaggggcgaaacttatataagtattcttgaatttgtccataaactccggaggaggcatcggataatcaccggttatcacaaaacgtgaaggttctacggcagttctcttatgggcagagaaaccgacactgacatccaatccattgacaacctcgactgtatggcggaaattgaaatacaagtccttgaaataatcaagatgaatcaagttgaaattgaatatactgtccggcatggctttcagttcatccagcaccttactgctataaattcggttaccattccccacattcaagcggacaaatccccgtttctgcggccaatactcaaaatctgcgttcaatgaccaataaaactccttgcgtgtgaaattatatccgagtttaggaacaatacggagcagtttatctcccctaaaaagacggttataacgaaaatcctgccgatatgacaagccattgcttccactataactgaacaatagaggattaatgaatggagaaaaacgtacacttccgatattagccaggttgaatttatagtcctctaccatcaagtcacccatcgttccccagaaagcctgacttttggatggcttatgcgttgtcgccgtgtcacgcctgagcaggtaatcacggtagagtttcttctcactctcactcaatggaataggacgcatgacagcaaaggtcgaagcatccgtcttgtaagcattcgtatcacactgcaaggagaatgattccgacaagttatactttttcttttctttcttgcgtactttcttttctttcagttcaatcgatttataattcaaagaagcggtataattgccatctaccctatttccaagaaacttgaaaagtgcctccacattgtaacggaccggcaaaaattcatctttcttacccacctctcccatcttaatccaacatgtaaatgttatcagctccgaccgtcccgaaaaacgtatttcccggacactccagacattactgctgacaatcatatagccgccgaccaactgatcgctttttgtccgagggataaagcgtatccggtaatcgagattattgggatctcccatcacactatctatctgatatttataatatttctgtccgttcttggcaagcggcgacagtaaccgttcatcattcagcagcgaagacgaatagatattgacactgaaatattcaagcaaacccggcagtcctctgtttccccgcacagtaccttgataagcttttactttttgatcgtaaatattaggagccgtataatgaagatcactgtaagtttcgagcaaatattcgcgtacacctttctgcagacggaacatagagggcacatagcgaagaataaaattctttttctggatatccatcttaccttttatatataggctggcacgataatcactgacgatcgtttcatacagaggggcaaaggtcatgacacgctctatgatggaatcggcggagatctcctgacgcgtatacggattcattacataatcgtgagccgttccttttgaagtaaaaaagaacaaccctaatatgcatactatcaatattttatatctcaatcgtcgtatctccttcattaacggagacaaatataaaaaagaatatcgaaaagcaagaagagttagacactaaaaagagttatcaaaagaaaaccttcacatggcataaatacataactgtacggaaataaacagatttgtgtccgaacagctcatattttctatactccctcttgctttttactgattaatttcgtatctttagtggtttccatcctttcagatatagatggtcatcttgcataatgactaatgtcacgttataagcagactaatgtcacgttacaatgtgacattggtcaccatgtaaggggaccactactcgggtgcataaactattatagttttctgcactgcaatttcaaattccctgcacagaataaccttaaagactacgaatcatcaccggacgaatcaaactaaaggagtacaatcctaagaagggggtatacgtccaaaaacatatctattttcaaaaataccccctttaaaataggggtgctttcagaaaaaacatatatttttgcaccatcaaccgataaaaagaagaccatttatgtctaaaatgagattttttgcattacaagaactttccaaccggaaacctttggaagtgactgccccttccaacaaactctctgattattatggcagccatgtgttcgatcgcaaaaagatgcaggagtatcttcccaaagaagcctataaagctgtcatcgatgccatcgaaaaaggtacacctatcagccgcgaagtggcagacctcgttgccaacggcatgaaaagctgggcaaaatcactcaacgtcacacattacacgcactggttccaacctttgacggacggaacagccgaaaagcatgacggctttatcgaattcggagaagacggtggagtaattgaacgtttttcgggaaaattgctgatccaacaagaacccgatgcttcctctttccctaacggtggtatccgcaatactttcgaggcacgcggttacacagcatgggatgtttcctcacctgcgttcgtagtagatacgactctctgtatcccgaccatcttcatctcttatacaggagaggcgctggactacaagactccgctactgaaagcactagccgctgtagataaagctgcaacggaagtctgccaattattcgacaagaatattacacgtgtatatacgaatctgggatgggaacaggaatatttccttgtggactcttccttatataatgcacgccccgatctttgcctgacaggacggacactgatgggacattcttccgccaaagaccaacagctggaagaccattacttcggttctattcctccacgtgtcactgcctttatgaaggaactcgaaattgaatgccataaactggggattcccgccaaaacccgtcacaacgaagtagctcccaatcaattcgagttggctcctatcttcgaaaactgtaatctggcgaacgaccacaaccagctcgtcatggatttgatgaaacgaatcgcccgcaaacatcacttcaacgtacttctacacgaaaaaccttataacggggtcaatggttccggcaagcataacaactggtctctttgtaccgacacaggtatcaacctgtttgctccgggaaagaatccgaaagggaatatgttattcctgactttcctcgtcaacgtattgatgatggtctataagaaccagaacctgctgcgcgcctccatcatgagtgccagcaacagccaccgtctgggggccaacgaagctcctcccgccatcctgtcctgctttttgggttcgcaactctccgccactctcgacgaaattgtccgccaagtaggaaacgataaaatgacaccggaagaaaagactacactgaaactgggtatcggacgtattcctgagattttgctcgatacaaccgaccgcaaccgtacttctcctttcgctttcaccggaaaccgcttcgaattccgcgccgcaggttcgtcttccaactgcgctgccgcaatgatagcgatcaacgctgccatggcaaatcaattgaacgagttccgtgcatcggtagagaaactgatggaagaaggagttggaaaagatgaagccattttccggttgctgaaagaaacaatcatcgcttccgaaccaatccgtttcgaaggcgacggttactccgaagaatggaaacaggaagccgcgcgacgcggactgaccaatatttgccacgttccggaagcattgatgcattacgtcgacaatcagtctaaatcggtgcttatcggcgaacgcatctttaacgaaaccgaattgaacagccgtctggaggtggaactggaaaaatatactatgaaggttcagattgaaggccgcgtattgggtgaccttgctatcaaccacattgtaccgaccgcggttgcctatcagaaccgtttgcttgaaaaccttcgcggactgaaagaaatattcccggctgaagaatacgaagtattgagtgccgaccgcaaagaactgatccgtgagatttcacaccgggtgacttccattaaagtattggttcgcgaaatgactgaggcacgaaaagttgccaaccatatggacaactacaaagatagagcctttgcatacgaagaaaaggtacgcccatatcttgaccagattcgcgaccacatcgatcacttggagatggaagtggacgatgaaatatggccattgcctaaatacagggaactgttatttaccaaataaaacgtccgtaagattgcacgaaagctctcacttttgtgcaatctttttatagattcgtttattttttcattttttatttctacttttgtgctgtataacacagttttgtagcactcatggtaaaaatgaatatgtcagacatcgatatttcggaaccgttatccgatatgttagctcctctaaacaatgaacaaaaggagtttctgatgaataattatacgattcaaacctacaaaaaaaatgaaaccatttactgtgaaggagaaacgccatcgcatctaatgtgtcttatcaatggtaaagtcaaaatcttcaaagatggtgtaggaggtagaagtcagattattcgtatgattaagccacacgaatattttgcatatcgtgcttattttgccaaagaggattttgttactgccgcagcagctttcgaaccttctattgtttgcttgattcccatgggtgccatcatggctttagttgcccaaaacaatgacttggccatgttctttatccgccagctttccattgatctcggcatttctgacgaacgaaccgtcagcctgacacaaaaacacattcgaggacgtttagccgaatctctgatcttcttgaaagaaagttatggactggaagaagacggctctaccctaagtatttacttatcacgtgaggatctggcaaatctgtcgaatatgaccacttcgaatgccatccgcacactgtcacaattcgctacggaacggctgattacaatcgatggaagaaagatcaaaatcatcgaagaagaaaagttaaagaaaataagcaagattgggtaaaagtgttcctacaccaatcactccaccctaaaagtgaacatacatatagaaaatataattgcagacataaaacgtagcaacaaacaggctttcaaaaagctatttgatgactaccaccctattctttgtgttttctccaaccattatatcgaagacaaagaagtttgcaaagatattgcacaagatgtatttccagccgttcgatctagctcctatcccggaaaatgaatcgaaagtgatagaaataaaagtagaagacggcaagctgactcccatcacccgtcagttcttcatcgaccacattttcgacttccgcaaatggaaaaaatggcggagcaatacaaagggaaagtgatgttctacaaagtgaatgcagacaaagaaaaggatttatgcaatcactttggtgtacaggcattgcctactttattcttcatacctgcaggcggcaaaccgattattgaagtcggagcgactccggagaagtacgtacaaatcatcgaagaacaactactgaaatagaaagataaaataattgcaagtacttttagtacgaatacttcataatgactgccccctaaaagttttttattcaacttttagggggcagttcaaataagttttaagttccgtcttttcctctaatgcaacaaactatcaaatctttcctatcgaagaaagataacgctccgcctcaatagcagccttgcagccacttcccgcagcagtaatagcctggcggtaatgcggatcggcaacatctcctgcagcaaatactcccggcactttcgtacgtgggctatctccatccgtaataatgtaacctacttcatccgtatcgatatagtctttgaatatatccgagttcggtttatgaccgatagccaggaagaaaccatcgataggcaggctgtaacgttcttcatcaggttcgccccaacgttttacaaggttcaccccttctactccattatcaccatacaaaccaacagcgttgtgttcaaaaagcacttcaatcttctcgtgattcatcacacgctcctgcataatctttgatgcacgcaggaaaggtttgcggacaatcagatatactttagatgccagaccggcaagataaacagcctcttcacaagctgtatcaccaccgccgacaacagccacgattttcttacgataaaagaaaccgtcacaagtggcacaagcgctgacacccattccggcatatttcttttcatcctccaaccccagatatttagcagtagctccagtagcgataatcaatgcttccgtttctatttctttctcaccgtcaatcgtaatcttataaggcgctttgcttaagtctgccgcagtcgcaatgccaaaacggacatcggctccaaaacggctggcctgagcacgtagatcttccatcaattgcggaccgctgattccttccggataaccgggaaagttctctacgtccgtagtcgttgtcaactgaccgccgggttgcaacccttcataaagcaccggacataagtttgcacgtcctgcataaatcgctgccgtgtatccggcaggtcctgaaccaataatcaggcatttaactttttctatttctgccattttattatacctttatcgttttatttaatcaaaaacattttatctcaaatctataatttccgcactcggatattgctttctgtcaaaagtgaaaagagtatccgcatacttctgtccggtctgataccccgtaacggtaatcgcgttacgtgtcggatgcgcacgttgctgaagcaatatatataaaggttcgtatctctctttcgtcacataaagagtaatgcgttccaaatcctgtgccttgtctttggccgtcaacaccacttcccaaatggctttgccacgaaaagttttcattgttcccagcttataagagaatcccttctgatacatataaagaaatgtataaggattgatttgctgcaactcttcctgagtcgggttgctaacattcacttcatcattcttcgctacataactccactgcgttttcccatcaaaccaggttacaatatcggttgttttcaatacgaatttctctcctttcaattggatcgttccatgctcgacaccttctatcagaccatccgttataacctttaccgtaaaatcagccttcactcctcctgctttccgaaaagcctcagcagttttatccagaatactcttagcctgcgactgctgttgttgagcaatcacaggcaatgacagtaaagctattaaaacactaaaaatgtactttttcatttgatttataaacgaactgttactgcaaattgttcaaacgcatttcaaggtcattatcatcaatacacaagacgtcacgcgccttgctaccttgcgtagggcccacgatacctgctttctccaactgatccataatacggcctgcacgattgtatccgatagcaaatttacgttggattaacgaagtagaaccttgctgatgaataacgactaatcgggcggcatcttcaaacaaaggatcaagacgccccatatcaatatcccctacctcattaccaccatcctcactcacatattcaggcaaaaagaacggagtaggataaccttgctgacgggcaatgaacttcgttatttcttccacttccggcgtatcaataaaagcgcactgcacacgtaccggatcagctccctgtaagaaaagcatatctcccttaccaatcaaacggttcgcacccggacggtcaaggatagtacgtgagtccatcatagcagatacacggaaagcgatacgtgccgggaaattggccttaatcgtacccgtaataatattcgtagtcggacgctgtgtagcgataatcatgtgaatgccgacagcacgtgccaactgtgcgattcgcgcaatcggaagttccacttccttacctgccgtcatgatcaaatcaccgaactcgtcaatcacaactacgatatacggcataaacttatgtcccttttccggattcaggcggcgattgataaacttttcgttatactctctgatattacgcacatgagccatcttcagaaggtcgtaacgagtatccatttccacacaaaccgaattcaaagtttgtaccactttagttacatccgtaataatcggttcacctccatccggaagtttagccagaaaatgattctcaattaccgagtagatactaaattccactttcttcggatcgaccagcacaaacttcagttcggcaggatgtttcttatataataaggaagtgataatcgcattcagccccacagacttaccctgaccggtcgcacctgccaccaacacgtgcggcattttacaaaggtcgaacataaagacttcattcgtaatagtcttacccaatacgataggcaaatcatatttagactcctgaaacttcttacttccgatcacactttgaccggaaacaattttcggattcttgttcggcacttcaataccgatagttcccttacccggtatcggagcaataatacgaataccatcggcagataggctcaatgcaatgtcatcttccaatccgcgaatcttggagatacgaactccctgttccggagtaatctcgtacagcgtcaccgtaggaccaaccgtcgctttaatggtgctgatctcaattccgaaactacgtaatgtattgataatacgatctttattcgcattctgttcgtccatatcaatcgtaggatcatcattctcaaaatgtttcatcaagtcgatcgtaggaaagcgatagttttccaaatccttagtcgggttgtaaggttccagttcagggccctggtattcctcttctgtaactgccggttccacttcaaatccgggttcttcttcatcttcggtatccttatgtatcgacgaaaccgaatcagaaacagtcggctcaaataccatcgttactccttcactctcatctgccggagaagaaggctcatccggttctgcgtgctctgtaggaaactcttcctcttcttcggactgaacatccaccacagccgccggaggaggagtctgcttataagtccgtttcaaattgaattctacttcctgaggttgagaagtagtaaattccggattatcttcgcctgccggaatcgtctcaacttcttctttctttttacgtttcaggaaactcaaagcaaaaagtttgcgcaaccagataatcgtgcgcgcactgatatatataaagaagcagatagctgttatcaacagaatcatccacacaccgggcacacctacctgagaaatcagccaacggctgacattgtatccgtgcattccccccagatagatgaaagaatcctgataatgctccataaaagcaaatccaaagaaaacggagaaccagaccaacaacaaggtacatccgataaaccatttccacagtcgtacgacacgtacacgcatcaacttcaatcctgccacagccaaaaagacaaggataaagaaagaagaaattccaaaacagtcgttgatcagataactggccaactgtgctccgcgtgaaccagcatagttcttcacatgattatcaacgaccgacaaatctgccggatttccactgtcgataatactctggtcggccgctcccgtaaaaaagaaagaggaaaaagccaaaagtaaataaacagaaaagataaccaacatcagtccaatcacaaaatggacagtctcattcttgaatattgcaataattttgctaggggaagagggagtacgttccgtctccttatctaatttcttctttgccatgagtctttttattctttttataaaaccgggatcataatctaagctgcaaaaataataaaaaaataacgagcgctacgctcattcaatcctttttcttacctttgcgtttcaaatcaatgctgattatggaaaaagaaagccaaacgatatttgataagaatgtaatagagttcgtaacggtagccgctgaattttgcgcattcctcgaacgtgccgaacgcatgaagcgtagcgatttcgttgacacatcccttaaaatacttcccctactctatctcaaagcatctatgctccccaaatgtgagactatcggagaggaagtgctcgaaacgtatgtaacggaggaaatctatgagattctacgtatcaaccttgcggaattgatgggtgacaaggatgactatctggatgtattcgtacaagatatggtttatagcgaccagccgatcaagaagtccatttcggaagatctggcggatatctatcaggatatcaaagactttatctttgttttccaattggggttgaacgaaacgatgaacgattcattggctatctgccaggaaaacttcggaatgttatggggacagaaattggtcaacacgttacgcgcattgcacgacgtaaagtacagccaacaggacgaagaggacaatgaagaaggattttacgaaccaagtgacgacggtaactgttgcgaagacgatgagtgccattgccacgatgacgattgccactgtcacgaaaacggctgtcattgtcaccaatgatgaataaataaaaatgattgtaagaagaactataaataaagatgaagtaaaggagctcccaaaaacggtttttccgggacggatttatgtcatccaatcggaaacggaaacggaaaaagcagtggcttatctgcaatcccggtctgtgataggtattgacagcgaaacgcgcccttcctttacaaagggacaatcacataaggtggcactccttcagatttcgtcggaagaatgttgttttctgtttcgcctcaacatgaccggactgacccggccgttagtcgatttattagagaatccggacgtgataaaagtcggtctctcactaaaggatgactttatgatgttgcacaaacgtgctcctttcaaccagcaaaattgcatcgaattgcaggattacgtacgccagttcggcatccaggataaaagtctgcaaaagatttatgcaatcctgtttaaggagaagatttccaagtcacaacgcttgtctaattgggaagctgatgtgctgagcgacggccaaaagcaatatgccgctaccgacgcatgggcctgcctcaacatatacaacttattgcaggaactgaagcaaacgggcaattatgaaattgctcccgaagagaagaaagaagaacatttaattgaatcagataaataaaatatcatgcataaagtatacctcaaacccggcaaagaagagtctctcaaaagatttcacccctggattttctcaggtgctatctcccgttttgacggagagcctgaagaaggtgaagtagtagaagtatacacctcaaaaaaagaatttatagccgaaggacacttccaaatcggaagtatcgctgtacgtgtgctttcttttcaacaggaacctatcaatcacgatttctggaagcgtaagctggaaatagcatacgatatgcgccgcagtatcggtatcgccacgaatccggccaataatacctatcgtctggtacacggtgaaggagacaatcttcccggattggttatcgatgtctatgccaagactgccgttatgcaggcacattcggcaggaatgcacgtagaccgtatggttattgccgaagctttgtccgaagtgatgggagatcagattgaaaatatctattataaatcagaaacaacccttccttttaaagcagaccttttcccagagaacggttttctgaaaggaggaagcaacgataatatcgcacaagaatatggcttgaaattccatgtagactggctgaaaggtcagaagaccggtttttttgtagaccaacgtgagaaccgttctttattggaacggtacgccaaaggccgttcggtacttaatatgttctgttataccggtggcttctcgttctacgccatgcgtggaggtgccaagctcgttcattctgttgacagttccgctaaagcgatcgacctgacaaataagaatgtcgaattgaattttcccggcgatctccgtcatgaagcttttgccgaagacgctttcaagtatcttgaccgtatgggcgatcagtatgatttaatcattcttgatcctcctgctttcgccaaacataaagatgcgttacgaaatgcactgcaaggttatcggaaactgaatgccaaagctttcgagaaaatcaagccgggcggcattctgtttactttctcctgctcgcaagtagtcagcaaggataatttccgtacagccgtgtttacagccgcagctatgtcaggacgtagtgtacgcattttgcatcaactgacccaacctgccgaccatccggtaaacatttatcatcctgaaggagaatatctgaaagggctggtactctatgtagaataaccgaatccatgtaatctgtggtgaaacagcaagcaatagcagaaaaaagaaagcttcaaagttaattagagttaataaacagaagttttacagcaaaacattatgttgtataacataaaaccacttatctttgcactgtgtttttcatggtattagatttaaggttaacaaagattggctgtctgggatagatagcctttttttatgcccatatataaagaggaaagattagcattctgattatcaaataattaattagggatattcctaaaataataaaatttaaggcaactacttcattgcgaattagttgccttttttgtatctttaagcattccccccaaaaaacggtttgacggccaaaacgggggtaatctaaaataaaaacacatggtaaagatacaaaaaatctcagaaatcgaaccttgtttaggttttaccgagttcgatatgcttaaaaaatatcgtcaaagttttgcaacgagtgaattaggtcgactccattctctattccctttctcggaactggcccgacaaatgcatttgaagtcctctgctttgggtcgtaaaagttatttttctcccgaaggtaaaatagccttgatggtcttgaagtcctataccaacttttccgatgcacaactgattgagcatttaaacggtaatattcattaccagttgttttgtggtgtccagattgatccgcttcatccactaaccaatcctaaaatcgttagtgcaattcgtcaggaactagcgaatcgccttgatgttgagtccctccagttcattcttgccgagcattggaaaccttatcttgagaaccttcatgtctgtatgaccgatgccacctgttatgaaagtcacctgcgttttcctactgatgccaaactcttatgggaaggtattgtatggcttcatcgtcatctgtgcaaacattgccgtacattgcacatacaacgtccccgtaacaagtatcttgatgtacgccgtgcctatcttgcttatagcaaactgcgtaaacgcaggaaatcacagactcgtatgattacacgaaggttacttcaattattggaaaagttacttgaccagctggagcagcttcattcatcctacaggaacaggcttgcactatcctctgattaccaaagacgtttctcggtcatacagacagtccttgagcaagggaagaatttatttgcaggcaaaaaagtgtccaaccgtatcgtgagtatcgaccggcattaccttcgccccattatcagaggcaaggaaaccaaatccgttgaattcggagccaaagtcaacaatatacagatagacggaatctcctttatagaacatatctcctttaaggcttttaacgaaggagtacgtttgaaagactgtattcatctgcaacaacaactgaccggggttagggttaaggcgcttgcggcggattcaatctatgccaataatgccaaccggaaattttgtacaaaatatcatataagtacttcctttaagcgtaagggcagagctgccaaagatgagccgcttcggagaatcttacggtcggaactcagccgcgaaagagctacccgcctggaaggaagttttggaacgcagaaacaacattactcactggccaggataaaagctagaaacaggaaaacggaagtactttggattttctttgggatacatacagccaatgcggtatgtatgatagaaaaggtcgaaaagaaaaaaagaaaggcagcataatctgactaaaataacaggaaaaacaggagaggttttaacttcccctaaaaaagacatgtacataatgcatgggtgggaaggaaaaaacaagaatatgtaaacaatattctacaaaaaagatagaagactgggagagttgaacgaaaaaatcaagagaaaagctttgctttacgtgagcttttctcttgattttttagaaagaggaacatttactgaatatccctaattaaaggtagtagaacggataaatagccgaaataaacaaaaatagcgggtaacctctattcttatgtaggctgttatgtaggcaaaaaattggtctacatgagtacacgtaaaacctaattaaaatgtattcaatcaacattaaaggaaaagtgacctcaaaagacaaaaaactggtgaaacaggaaatgatcttcttccaaacaggctacaacagagtttctaaagtgctaaatatcaccggtcccatcaaagactgggacaatgcgtcacaatcatttatttccaaatcaagcgatgctatcaaaaagaacaagatgttgcttgatctgaaattaaagtatcagaagattgcggaagaatgggaagaggaaggactaaatggagtccggccgaattggcacttagtcttgataaaaagaaagggaaggaaatgaaagaggaagaccgttctctgtccgtttcccagatgattgattatttgattaaaaaattctctgaaaagaaaaatgacaagattgcgaaaagcctggcgagtgtaaaggactataaaatcataaagaaggctttggaagaattcacacaatagaaatacaataaaccattatccgtgttttatttcagtgacataacaaaacagttcctcttggattttgttctatatacacaaaaaaagggattgccaatggtaataaagcaggcttgaaccagaagttgcgtaaactgagagccatagccaactatgccaaagggctgaatatgcacggtgctgatccggaaatattcgactgtgtagaggataagatgaaatggcacaagtttgaaccgagaactgtttccaagagagtgatacagttaattgagaatgtggatagaagcttgcttacacctaaagaggaattttgcttggatttatttcttttcagttattacgcaggaggtatggtcaatgtggatgtctgccatttgacgtacaatatgattcaaggaaaccaggttatctatgaacggatgaaattcccgaaaattggaaaacccttgttgatagagaaatcaaaacaaattattgagaaacatgaaggtcaaggcattgacaactatgtattccccgtattcacaaaaaaacataccacggaggccaaaatcaaatctctaatagagtcaacaagacgttgactaaagtttgcaatatcctggatataaaagagaatataacttggtattccgcacgagatacatttatctcccgtatggtagatgccggttgttctccagctgttacggcagaaaaatgagttcacgctgttcttttgggtacaaggcgagcataaccatttttcaatctgaactattatgccggttttgaggatgatgcggacatggggataagaatgataacttcttttcgaatttatgataatattaaaaagaatatctgtctggctaccttgtataaacaaaaagactgttttacataattctatgtctaatgtatataataaaaatacgattgctcatttttaattttgcagcatcataattaacatcataaaacaagtatttttatttcaaaaacaatcagcgacaatatgaaaaaaatatgcttttttttctttctgctgttcagcttgcagtctttctcacagaaggttgtgctaaaaaacaaccttgtctatgatgccctgctgacacccaatctttctgtagagttttccctagggaagaaatggaccttggatacccaaatcggtatgaatttctttttttatgaaaatgatgccacggcaaacggttacaaaacaaagaaatggagtcactggcttgtacagccggagataagatattggacctgtgaaacattcaatggctggtttcttggccttcatgcccatggagggcagatgaatgtgggaggcataaatattccttttattattcaaaaccactccaaagaaatgaaagattaccgttatgaggggtatttttacggtgggggtattagtacgggctaccactggatactgtccagcagattcagtgtagaggcatccttaggactgggctatgcgcgtgttaaatatgacaggttcagatgtacttcttgtgggaaaaaggatggtaaggggaaagctgattatctgggacctacaaagcttgccgtttcgattatctatataattaaataaatgatgctttgcatatataaacattaaaaacagaatcaatgaaaccaatacaatattatataggaatactctctgtgctgggatatgtatactgtttgccggtggtaggacaggtggaggataaggttgtcagaaaggggaatcctcgtttggaatatacagatgtgaaaactggacgtagcccggaagggaaaatgtttaccgtttctttcaatatagtagaatctatcaatcggttgaggacacaggaaattgtttatatctatccttctctggtatcttctgacggcaatatcaggactgctttctcgcctttgtgtatttccggaaagaaaagatacaaagttgttgcccgtaaggaaagactgggtggcaacccgggtacattacttcctgtgaaggatattcgcagttccaaagatttgagggaacctggaatctccgtcaaggaagcattgccttttgaacgttggatggcttccggccatctctttcttcgtgaagaggtgtatggatgtgccgagtgcggtaaaggtgtgagccagttgaatataccggtaaccggaatagacctttttggcccggaagactataaatacattttttatactccggaaaaggtggagataaaatgttatgaagaagaatttgactgtaaggtcactttcaaatccgcacagcatggacttcttcttggatttggtaaaaatcaggaagaattagcccgtctggatgattttgtatccaaagggcttcggatcaaaggggctaggcttcgtgaggtacatatcataggatacgcttctccggaaggtgagtttagctataataaacatttggcggaacgtcgtactcatacgctttcttattatgtactgagtaagtacccgcagctcaagaaagcctccatatacgaaatagaaggggtgggtgaagactggaaaggcttggaaaatattataaatgtatcttctttggcatataaggatgaaattttatccgctattaagaggcatcatacggatgtggcccgtgaagcggctatacgctctttagatgagggaaaggtttatgcggagttgctttccacagtttatcccactttgcgccgtaccgtttttcacatgggatttgatgttcgttcctatacggatgacgaattggaggaaatgtttattaccgttcccggatgcctgagccagtatgagatgtgtaggttggcgcaacagtatgtcgaacagggaaaaaatccggtaaacatatacaagaaggcttatgaacagtttgcacttgatccgctggcggcactcaactatgccaatgcgcttttaaagtatgaaaaggatgcggataaggctctgatgatattggacacagtaaagagtgacagccgttctgtttatcctatggcaattgcccatagtatgaaaggagactggcggaaggcggaggaattactggaaaaagacatggagtcccgggaatgaaaacttctggactttccatgacaggattaacggataaatagcaagcatttaatgtattaataattaaattatttatttactaaacagtttaagttatgaaagcaaacaatttatttttagcgggagttgcagccttaagtctgggcatgacagcttgtaataatgaggatgtccctcaggtaaacaatccgggcgagggaacaacatttgcaggaatgtatatttcctctatgaaggatgtctcaaccagagcggtgaatgacaaacaggaagattatggaggaagaacggaagagagtaagcttacggaattacagcttctctcaaatgtcctgcctcaaacatggacgttaggaacggcagctgatgaaacaggcaagttttgggaaacgcaaacagccggtacattcaaggttgctccatggaagacgaatcccggtcctcaatccatggcgctgttgtttaacaaggggaccctttccgccgatattgcaacagccccggacaagacgcatggcagtacagctaccgcagtaaaagatattgccgctcttgccacagacaacaagtttgtcatgacttcgaaagccgagcagaaaaccattgctcccggcattaccgagaacgcagccaaaacgggtacaagtgaggctcaaaatgtattctcctttgatgtggagcgcgtcgtggcacaaggactggtcgcgaaggatgccgcattgaaagaaacaaccgcggatggaaaaggaaaggttgatcttaccgacatcacgtatactgccatcaacggtgccgcaaagacatatcttttccgtaaccatgcgggaaagcgtacaattggagatgccgacggcctttacgagggctttgcatcagccattgatggatataccgattttgagacggccaaagaaccggaaggttcagctaaagaaaatttaatccgtttggggaatcttctgtcaaaagacaatccacagcaggatgatcttggtatgtatgctgctaaaaatgctgcagcaagcgcctctgaagctaaaacaggagcaggcatttattttctggaaaattccgtaaaaaaggatgcattcactgctaaaaacaagaatttcggttactaccgtctgccctatgccaaggtctataccacttatactccgaatgaagtatggaaacttgaagacggcaaattggtcaaagagactaattttcaaaaagggacaacatttttccggggggaaaaagacggtcttatctatgctagcaaggaagccgcaaagaaaagccagttaaatccggatcaaggagcttatacttacatgaacggaaaatgtgcataccgtgcgttgtggaaccgtcagactgttacagctgatggaaaatcgattgtgaacgctgacacacgccgtaacaacacctatctgttgacaatcaaggctttccaaggattgggcatgccatgggatccttccgatccaaaagatccatatctgccgaaaccgacagatcctactgaaccgacaaatccagaaaatccggatatcgagaaagaagaaacctatatgcgtgtcgaggccaaagtgctccaatggaacctcgtttcacgtgatgtcgttttggagtaattttaatattagattgctgataaattcagcctgcaatttcttacatagctgtgagagggaagaggaatttttcctcttctttctccaatcaacaaacagtttggtttcaaactgttaaataaccccaacataaactatatcaaatgagaatcagaagtgtacattacatcgcatttatcatgttgctggtttactgtcttataggatgtaattctgcggtatttgataacttgggtggttgtccgcaaggtgtttatttccagttctatagacagaccccttgcgaacaatttcctggatatccgtcagatatcagagaagtccgggtatttgtctttgatgatgatgatctgctggtgggcgaattttctgacaagaaggcagtcctttcggcagattattctttgtccgccacattgcggcatacggggaaactcacgtttgtcgcatggggtggcagtgacctggaggcctatgatttttcagattttcaggaaggcgttactaccagacaggaaatgcaggtgtcactgcggttgaaaaacggacagatttcctcagcccccgggcctctgtatgtcggtctcgcctccatatcactggagaaccggaaggatatgggaagcgtgtatgaacgggtggctttcaatatgcaggaattgacataccgggtacacttcacaatcagttccataggttcccctttccccatagacgaggaattcatcatcaggatagaagatgacaacggtgtgtatgatttcaacggccggatcgccctttgtgaacgttttgaatacgcgaccgaagccatacatgacgctgaaggggcattgaaagcggatttcacgctgatgaaactggaagaaggaagaaatgcgttcgtatctctgattgacaagacaaccggggagattctttataccgctaatctggttgatgacatcctcatgttccggggagatgcgggcgaaccgccgtatagcctggaatgtgaccatgattttcccataaccctgaaactcaagtacgaaaaggaaacatggatgctgatacaagcgaccgttctggattggaatgtcgtttcccgccccatagaattggaaaactgataatcagacagattttaaaactaatgattcgtgtaatattagaaaggaattggtattattataaaaatgacagataatgaaatacggaattgtgataaagctgttgatggtggcctgtgtatcaattgtacaattgaccggatgttcgtctgatacggaagagttagaaaagtcagtttcgggtattcccatccggattgtggcggaaatgaatggaggaaccggtatttctcagatgacaaaggcgtctgtacgttcatccggagagtggaaagagaactatatcggtgcagaggaatatgagaaaactgttaaacatgttcttctcttcgcttttaagaatatggagagctctccggaaaaagttattttctattattcccaaggaacaaccaacccgttggcgggtataaccggcattgagcattttgagatgagagagatgggtagagtgaatacaggcgaatccaatatagccttggacctggagttgatgggaggcgattataattttgttttgttggttaattgtgaatccggattggaaaaaatcaggaatggacatacaattcctgatccgaagcaattaatggaaaagaccgaaattttcacatctgacgatctgaaaggagaaaaccggaagtatcttcccatgactgggcagtgtaacttccatgttccggataatgtagttagtaataataggattaccctttctccctgcatacttctggaacgcatgcatgcccgtattgagttcatacttacaacagttgatgacagggggaattatctgtctcctttgttacctctttccaaagtgacaaaactctctctgaataatgaggtcagcggttattctgtcctgccttccgccggggaatatacggcaactggtgggggtaatccggatatgagaggagtagattatgcggggactcccctattattaccggaaagagccagtttccatgacggtgccaacgaggggtccggagaatccgcttttgtgaccaaatgcaaagaaagactgcttccatatatgggtaagacacctagctacatctatgtggctccgggagtctacgggaaagggaaagagggggcgctgaccttggtcttatccgtcgattatcggatgggaacccccgataagccgtataggatcgaactctataatccggatctttccgagaatgataagggttattacaacatccggcgtaatacggtttaccgtgtcttcgccacactgaaaggacccggaaatatggaatatgacatagttgtggacgaatgggaggatacggaggtggctatcccctggtaactaaggtatggtcagtcatgccatcacgaagaaaaacagtttaaagaatagatacatatgagaatcaaacattacactttgatagtcgcttttctggcgatatctatgggaatccctctcgtgcaagggtgcagtgatcccttcgataagtatggaaacggcgggacagaaatgcctgtcagggaaggctggacgtctgtcagcatgtctgtcgaaggacttgggcttcgaaatcccctgacacggtcccttacaccggagggggagaattccacggcagcggagaggattagggtacttgtgtttgacaaggacaacaagttttcatatgaggccaaagtgacctcctatattccttccggtaatccggctgacaagaaagacaagggtaccatgaccttgttggcgaaaaatactccttcaggcgataccagtacattcgtgatgctggccaatgtcacccggtcagctaatacagacgcagacggactgactggaaagacacgggaggaagtcatgcaacttttcactttctccatgccggacaaggggatatggaaagacggggagttgccgatgtggggtgcctcggacccagtcagggtggatcacagtgccggtgccgttcccaaacttggaactgtctatctggtccgtgccgtggcacgtgtggatgtgggacttaacttgagcaacatatcggaaggggcttctacattcgacgagaaagccggagggattgaagggataacgctgactaaagtatttttttataataccaatacgacgggacgggtctctccgttcgagaacgggatttactgggatgaggccaatagaaaggcgaaacagccttctattcctgatcctgctccggctgtgacaggaaagattgataaaacatcttccatagtggatgagaaaatcttgttacgtgaggtatatgttccggaggcggtcaatgtgccgacggctgccacgcaaggagccaacggagagactcttcctgagaataatacggaaaattacttgaaacgtccttatatcattgtcggactgaccggtgcagataagagccgtcctgacaaggaaactttcttccggatagactacctgaaacgtaccggagccgaggctgatgcgacatacgagtaccttcccttgctgcgtaactaccgttatctggtgaatatcaaggctgtaggtggtccgggattcgatacggaagaggatgctaggaaaggaccggccgccaacattatgtacaatgttgtggtatggaacgagtccactatgtctgatgtattgtatgacgggcaatatatgctgggggtcagtgccgaccatttcactttttatagggagggaggcagcctgacggcgaaagtgcagacttcctggccggaaggatttacggtagagggactgcctgcatggatcagttattctataaaaccttcggatccggataagaccgcaccgacggatgagaaaaccgtgacctttacggtcacagagcatgtggatgcatcccgaaggtggccggaaaagccggaagatgctcagaatacgttgaaagccgcttatgtgaaggcggggcgtatgaaatggtttcttggctttgagcagtctaaggatatcaatgtcaccttacagatttttgcggacgaggcctgcagccgaccgctggagtttattgaggtcaatcagtatggcgagagctatgggcaggcggataaggtgataacgaaagacgggcggacgcttacggcggaagaggcaggtgccagggttactttctatgtaaagacagaaccgcatgatttggaacccgtattccatgctgaagccgccaatccattcaagatagagaaagcgggtcaacttgccgggggaatatggaagtacacggtgacggctcccgacattacaggaaatacggagtatttcgataatttcaataccacttatactttcaccgtcacacatgcggaaaccggtagaagtgcgtcggggaaactcagcctcttgcagaaagaatataatgctatccccttttttgacaaattcctgcatcagtcattgctggtatccaataacagtatctatctgatggatggcaaacagaagcaatattatgtcaaagccaacagcgaatacaaaattgagttggtttccgctttgtccgacaacggagcaggtgatgtgatagagacgttcgctcctttctatgagaaggatccttccctttccgggaaaccagtttctttcacggctgttgacgatatcacaacctcacgtctttactccggtaaggcgaaattcaagatttattcccctgatggtctttttccggaaagagaatttgagttggagctggtttccggaattgtacagcctgaagcgaatacatatatgcttaaagcgggagcaaagcaagggatctttattcctgtttcccgggtaaatactgcctatgagtattacaaaaagcttctggaccatgacgctgttttgagtggtaagcagggacttcccggtagcaaagaggattttatgttgaataagttggatgcagatgatgattggagagtcaatatcgtgtggacggacattaaagaggctggcggacataatgatatagaaaaagcggggctcagtgaattgtccgaacagggaggttccggtccgggatcatatatttatgtcaagccagggcagactccgggaaatgtgttgatagaaattaaatctggaaagatcaaggggaatccgacactctggtcctggcatatctggattgttgacaactatccgacagtcttggatgttgcgagtcagggaggtgatggtccgaaaacggttcatttgatgtcgcatctgttgggagcgtacgaaagggtccaatcacagtatagtgcagatgcgtatagggagtttggtatgcaatatcaatggggcagaaaagatccgtttccggcacatgatgttcgtgtcaatacaaacttttataacggcagcggcaagctatttgatttcctttgggaacagagaggaaatgatgtggattatggaaaaacagatgctcagcaggcgagaggggctgctcttacgatgaaacagagcatcgaacatccaaacgctatcgtctctcatcaaagtttctggcagtatgaatgtttcccgcatgggctggttagttatttcaaagaccgctgggtgttcctgtatccatggaaccggccttcccagacagggagtccggaggatgtaggcgggaaaaccgtatttgacccttctccttacggattccggattatgtcacagaaagaggccgtgactttgagatacgcatattattatgcaagtcgttccggccttaacacaccgctgcctggaagtatttatgacggcagttttacagatggcaagtctgggggtaatgaagtcattttcgccgtggcacaagccagaagcgatactcatgcagggcgttatctgcttaattccactggaggtcctgccggttgggcgcctacttccaatacaagcgctgtttacaggcgttgcatgacctattccgtacgtccggtcattgatccggatgtgcaggaagactacaaaaagtatttgccagaataagtcatactccgtgtgagcttttgcttgcacggagtaaaaaatcttgttgtatttttctgtagcgtatcatattttggtgtctttttatagtcatatattcacgaaataaatattgtgagaactttgtttcatatcacttttacacgagcgtttggtaactcagagacatattttatgaatactgttttaggaatcggtataccatcggatggtagtcagtcataaaaatgcatggtcttataacctccaaaactctttatgtcccaatgacctatcaaagaccgattgattgaccagtatatgttttgtgtatttaatttgtctgttttagttgagaaattgtctgttttcacaaaaacagctatgtcttgatttttgttgtaataaaaaataagaaatatgaaattactatatctgaatgaacatttatcctgtctgaattaccagatgaattcggatgtaggatttacttgtcagcaactggagaaggatgaggtataccggattgataatagcaagtcgtcgtgtactctttttatgattgaaggtgatgtgatttttgatctgggtaaatataaaggtttacgaattttacagaaccagatggtgttcattccacaaaacataggaacccggatgaagtctataaccggttcgaaatgtatgcttttattttgggacaggaacatgagtgtatgtgacaaattgtttttgggctcgttgtctgccagaggggaggaccgaacggctgataattttattcttcccgtcaggaagcctcttgctgaagtactggattctgtcggaatgtatctggaggcaaggttgctttgtaaacatatgcatttgctgaagcagcaggaactgcttttggtgttgaagggcttttatacaaagaaagaactgacagcgttcttttccgcatcgaccggcatcagacaacgttttgagaaatttgtcatggaaaactataagaaagtgaactctgtcaaggaattcgctgatttatactatgtttccgaacgctccttcagccggaagttccactcctgtttcggggaaagtccttataaatggatgcagaagaaaagggcggaacaaatgttggaaatgatttgtgatccggagttttcctttcaggaaatatccgacaggttaggtttcagttcaccttcccattttacggcatattgccgcagaatgtacgggatgcctcccaccctattgagagaaaaaaataagaaatgaacggatttttataattacattttaacggagaaactatgaaatatttaaataccggtctggtctgtgagcagtcagggctttcctgtgtggagttgccgaagatctgtataccagtctacagagaggttgtcaaggaaatggcagaagtgataaaggactctcagatgcgggatgttttttactctctttctaccgggatagatgtacagacagtttccaagaaaacaggtgttgcccccaggaatctggcatatatgtataaaaaagcgagcaggcaggttcatttggaatggaaaccttattctgaatggaaacaagagttggaccgtgtatatatcagatgccggaattatgcggcactcctgacacattcccaagagtgtggcggacagaatttcaagaatgtagtgatagttgtaagggaacaggatattccgtcggaatgtgtagacctattgattacacctttaggaaatttggatataaatttcagggtgttacgtgcgcttagaaaatacaatatctatcagcttgaggatcttttacgctttataaaatataacggatttgatgcgctgtgccgaatacccggtataggaatgaaatctgttgagcagttgtacaagaatttaaaagagaggaaaattctggaagataaggaaacttgtatgctgttccgctacctttttgtgtaaaatacataaagaatacaggaactatattcagacatttgaaatgactatggatataattgatatcttgtctttatttttaaaacgaatagatatactgataaaacgggataattcccctatgtttaattaaaaactagaattgatgaaaaaaaacatcttgattttatgtatgcttggagcatctgccctggctgcaaatggacagacattattgaaaggtattaaatttacggacaactggtctgtcggaattaatggtggcgtgaccactccgatgacacactgctctttttggaagaactcccgccctgctgtgggcattgaattatcaaaacggataacaccagttctgagcctggggacttcagtcatggggtatatcaatacaagcagtagtaaaacggcttttgacgcttcgaatgttgagcttttaagcaagtttaatatgatgaatcttttcggtggttatcctggaacaccccggacatttgaaatggaagccgtagttggagtaggctggcttcatggctacgtcaacggtacgggggatgataattcctggggtacacggctgggaatggacttcaactttaatatagggaaggaaaaagcgtgggcaatcagtctgaaaccatcattggtatatgatatggaaggtgactttaaccgacacaagagccgtttcaatgccaataatgcacgtgttgaactgctcgcagggattacttattatataaaaggaagttccggcaggcaccatgccaccctcgtaaaggaatataatcagacagaggtggacaacctgaatgcaagtgtaaacagtctgcgtggccaactttcggacagccgtaaacagacagaggaagcagttggccgtgcggacatgctccagaagcagctggctgaatgtcagaacaagaaaccggtcattgaaactgttattgaaaaagccaagacactggagtctattgtaactttccgccagggtagttccaaggttgacgtctcacaactccccaatgtggaacggattgcctcctatatgaacaggcatcctgaatccaaggttgtgatcaaaggatactcttcaccggaaggaagtatcgaggtaaacgaaagaatagcccgtgcccgtgcggagtcagtcaaatccattcttacgaagaaataccggatagccgcctcacgcattactgcggaaggacaaggcataggggatatgttctctgaacctgactggaacagggtcagtatctgtaccttgcaggaaaataaataatatccgggactatggttccatacaatccacagcatcatctgcaagatgcatgaatgttaaagatttcatataaaccatggattgcgatgcggattatagtcagtctgcaatgtagccagttgccaatcggtaactggctttttgatttcatcaagcttacggagaatttgtgggctgagccgcaagcggaccgtatcgttaagccatttcatgctgtcctcataaatcccgtatccgtacaacacttacattattgggagctatgagttttgtaagttcataaacagccagtcttaccatgtgcctcttaaggttaggattacgtgggtcatgtaacacaaaatgttgtcctgcttgtggaatatctgcgtttacgtctgtttctggactgaacacccgtcctttgtagactacgtactcgtgatccgaaagttcatatgtgttgtatgccggatcataatctgcgacggcaccccaattgtcggaaactattgggtcgaggttgctgtcaaagctgtcaagtgtcgtcaacgtgtaaaactctccgctatattcgaccacgctccacctggaaaatataaagcccgttgacccactattatattcccaattgatccatcaaaaaacattggatttatgaaaagaaaaatgcattttaacccgggtcagttttagttataattatctaccacagatgttacttctttttggcatttatttttcttacagaatctccagtaagttcaatcttgtgtgcagagtgtacaattctgtccagtattgcgtcagctagggtaggatcaccaattgcatcataccagctttcgacaggaagttgtgatgttattatgattgattacgtttgattgtacagtctattttcgaggtatagtacagctattggactttcaccataaaactattacatagagatgaaatgctcaatattaatagattatgtaggttttttgcagaagtggcaaggaaggaaatttgctctgtataggggggggattttcaaaaataattcatttctaaccttttagaagttgtaaactatatacatccgtctttgcgaaaatttgattattaattgtattcatgtaggctaatatgcgatttttcgactcagctaccttagtttgcatttgatattcagaaagttatagagcaaaataagctacctgggatagatagccttcttttttttgtacctttttctccgattactagttcacctatccaatgaaaatattatatttgcatctattatcaactatcaacgagaaagagaaacacaaatttaaaaagtcatgagtataaaagttcgtttgattattatgaacttcctgcaattctttgtatgggggtcatggttaatatcattaggtggttatatgggcagagaactccacttcgaaggaggacagatcggcgccattttcgccactatgggaatcgcttctttagtaatgcccggtatcatcggtatcatagccgataaatggtttaatgcagaacggttatacggactttgccatatcataggagccgcttgccttttctacgcctctacagcaacggactacgatcatatgtattgggcgatgttacttaatctgctggtatatatgcctaccctatcactcgccaatactgtttcatacaatgcattagaacaatataaatgcgatctgatcaaagacttccctcctatccgtgtatggggaactatcggttttatctgtgccatgtgggcggtagaccttaccggtttcaagaattcgagcgcgcagctttatgtaggtggtgcttccgcgctattgctcggcctttattcattcaccctaccggcttgccgacctaccaaatctgaaaacaaatcatggctttcagctttcggactggatgcattggtgttgttcaaaagaaagaaaatggctattttcttcctattctccatgctcttgggggctgcactacagatcacaaacacttatggagatctcttcctgagtagttttgccggcattccggaatttgccgactcttttggagtgaaacattcggttatattgttatccatatcacaaatgtccgagacattattcattctcgctatccccttcttcctgagacatttcggaatcaaacaggtaatgctgatcagtatgttcgcttgggtgttccggtttgggctgttcgggttcggagatccgggttccggactttggatgctcatcctttctatgattgtttacggtatggcctttgatttcttcaacatttccggttcattgtttgttgaacaagaaaccaattcttccattcgtgccagcgcacaaggactgttctttatgatgaccaacggattgggagcgattatcggcggatatgccagcggcgctgtggtggacgcattctccgtatatgccgatggcaggctggtaagccgcgagtggacagatatttggctgatatttgcagcttatgcactcgttataggtgttttgtttgctttagtattcaaatacaaacaccagcgagaaagtcaaaactaattaagtaagaaaaaacaatggataaaaaggtagaattacaagttataaatattacaaacagtcaggcacagataggcgcatttgccatgctgttaggcgaagtggacggtgagcggcaattgcctatcatcatcggtccggcagaagcccaagccaccgctttatacctgaaaggagtgaaaactccccgtccgttgacacacgatttattcattacaagcctcaccgtactaggggcaagcttgatacgtgtattgatttataaagccaaagacggtattttctactcctatatttatcttaaaaaagacaatgagattatacgaatcgacgcacgtacttcggatgcgatagcattggctgtacgtgccgattgcccgattcttatctatgaatccattcttgaacaagaatgcctgcacctgtcgggagaagaaagaactcgttccggacagataaatgatgagggaatatcggatgaagaagcattgcaacaggccattaaagaggaaaactacgagctggctgcccggatacgggaccagattaattcaagaaacaataatcagtaattaacattatgcacgttttttatactcccgatatacagaaaagtaacgaactgcccgatgaggaagcacaacattgcatccgtgttttacggttgaatatcggagatgaaatcacccttacggatggtaaagggaacttctacaaagcagagattacggcagcgaccaacaagcgttgtctggtggctatcaaggaaaccatatttcaggaaccactctggccttgtcatcttcacattgccatggcaccgacaaagaatatggaccgtaacgaatggtttgcagaaaaagccaccgagataggttttgacgaattaaccttcctcaactgccgtttctcggaacgtaaggttatcaagaccgaacgaatcgaaaagattctcatatcggccatcaaacaatcactcaaagcacgattgccgaaactgaatgaaatgaccgattttgacaagttcattacccgtgagttcaaaggacagaagtttatcgcacattgctatgaaggcgacaaacctttattgaaaaacattctcaaacccggagaagacgcgcttgtcctgataggtcccgaaggagacttcagcgaagaggaagtaaagaaagccattgaacaaggatttgtcccaatcagtctgggcaaatcacggcttcgtacggagacagccgctttggcagcctgtcatatattgaatcttcaaaaccaataacacagcaatcgactgaatagatgattatacaacttttaaataacataagtatggtaaagaaaatgatttcacgactctcggtactggcagtactgattgtttttctggcagcatgttccaagacatcagagtacacaaatgtgataccggctgatgcttcggtagttgcttctatcaacctcaaatccctcgcaagcaaagccggattggacgataaagaaaatgaagctgccaaacaaaaaatattggaagcactgaagagtggaatgaacgccgctactttccaacaattggagaagattatgaaaaaccccagtgaatcaggaattgacgtggaatctccggtctatgtattctcttcctcttctttcccataccccactatcgtaggaaaagtgagcaacgaagacaatttgcatgcttcattggatgtaatggcaaaagaacagatctgccagccggtgagcgaagccgatggatacagttttacgacaacaaacggagatttgcttgtattcaataacctcactgtgatgatcatcgacgtaaacggagcttcccagaccgaaaaagcccaagaaggcattgttactctaatgaaacagacagcagagaacagtatcgcaaaatccggagctttccagaaaatggaaaagcagaaaaacgacattaatttcttcgcatccatgacagccattccttccaattaccgcaatcaagtaagcatggggctacccgccgaagtaaaaccggaagatattactcttgtgggaggattgaattttgagaaaggcaagattgccctcaagacagagaactataccgagaacgacgctgtaaaagctttactgaaaaagcaaatggaatctttcgggaaagccaacaatacttttgtcaaatatttcccggcttccacactaatgttttgcaatataggagtgaaaggagaaggactttataatctgctaagcgaaaataaagaattccgcaacacggtatccattgccaaagccgacgaagtgaaagaattattcagttcattcaatggagatgtttccggaggccttatcaatttcacgatgagcagcgctccgacctttatggtatacgctgatgtcaaaaatggaaatgcgcttgaaactctttataagaacaagcagtcgttgggactgaaaagaggtgaagacattctggaacttggaaaagatgaatatgtctacaaaacaaaaagcatgaatatattctatggaatcaaggacaaacaaatgtatgcgacgaatgatgagttactttacaaaaatgtcggcaaagcagtagacaagtccatcaaagatactccttatgcttctgacatgaagggtaaaaccgtatttatggctatcaatgccgaagcgatactcgacctgcccgttgttaaaatgataacaggtttcggaggcaaggaagtaaagacttaccttgaattagccaacaaagtatcttatctatctatcagttcagaaggtgaaaccagcgaaatcgacctttgcctgaaagataaagatgtcaatgctcttaaacaaatcgttgactttgccaagcaatttgccggcatataatctgtaaacaaacggtatgaatagtattcacttacagcaaacacttccccaagtgtttgctgaccgtaattcgatagtctcggatatatggcatcaggatcttttcttccgaaaaggaaaaatgtatctgattgaagcagcttccggcaccggtaagtcctcgttgtgcagttacatctatggctatcgaaacgattatcaagggattatcaatttcgatgaaacaaatatcaaagcatactccgtgaaacaatgggtagacttgagaaaacattcattgagtatgctttttcaagacttgcgcatctttaccgaacttaccgctctcgaaaacgtacaactgaaaaacaaccttaccggatataaaaagaagaaggaagttctcgcatacttcgagcagttgggtattgcagataaaatcaatgtaaaagtcggtaaactatctttcggacagcagcaacgcgttgcttttatccgtgcactctgccaaccgttcgattttcttttcctggatgagccgatcagtcatctggacaatgataacagccgtatcatgggagaaattatcacagccgaagttgaaaggcaaggagccggagtcatcgcaacttccattggcaagcatattgatttaccttacgaccacatcttccaactatgaccggctgtctcataagaaaatactatcacactctttcgaaccgttaattgtaatctgtaaaatcgtaaataaaatgtctgctcttgtctggaaactcctccgccaacatatcagtatcggccagctggccggtttcttcttggccaacctattcggaatgatgattatattgcttagtgtgcaattctataaggatgtgattccggtattcaccgaaggagacagctttatgaaaaaagatttcatcatagctacaaagaagatcagcacgctggggtctttcgcaggaaaaagcaatacattcacagccgaagacatcaccgacctgaaaaaacagccgtttactaaaacaataggagctttcactccttcacaattcaaagtatcagccggattaggaatgcaggaagcaggaatccacctttccacagatatgtttttcgaatcagttcctgacgagtttgtcgacatcaaactcgacaaatggcattttgacgaatccactcatacaatccctatcattattccccgcaattatctgaacctgtataatttcggatttgcccaaagccgcaatctgcccaagctctcggaaggattgatgagccttatccaaatggacataatgatgcgaggcaacggacgggtagaacaatacaaaggaaacattgtcggcttttccaatcgtctgaacaccattctcgtgccgcaatcatttatgaaatgggctaatgaaaacttcgctccgggtgcagaggcacaaccttcgcgactaatcatagaagtcaacaaccctgccgactcttccattgccggttacttccagaaaaagggatatgaaacagaagacggaaaactagatgcaggaaagaccacttattttctccgcctcattgtaggaatagtattgggagtaggtttatttatcagcattctctcattctatatattaatgctaagtatcttcttgttattacagaaaaacaccacaaaattggaaagcttattattaatcggttatagtcccaacagagtggcattgccttatcaattactcacggtaggtttaaatattgtcgtacttgtcctatccatcggattagtctactggttacgtggctattacctcaacagtatccaattacttttcccgcaattggaaacaggttcattatgggtagccgtcagtatgggaattctgttattcctcgttgtatctgtaatcaatatactcacagtcagaaagaagattttttccatttggacacataagtcgtaaatgtaaagcacacagtatgaaaagcaagactacgttttctatcaatcaaagttcaatggcattcctcatcggaatgctgttgtgtatttcctcagtatcgataaccgtatctgcacaaaacatgcaagataccatcatagcccattttaatctgttggaaaaagtacctcaggagaaactatatctgcacctggataaacctttctatggagcaggggagaaaatatggtttaaagggtatttggtaaatgcagtcacacatcaggataatacacaaagtaactttatcattacagaacttgtcaatcgttccgactcgatcatagaacggagaaagattcgcagagattccttaggattccataatgccttctcacttcctcccacgctccctgcaggcgattattacctgcgaggatacagtaattggatgcttaaccaagaaccggaattcttttattctcacaatctgaagatcggtaattcgattgataatacaatcgtttccaccattgaatatcaacaggaagatgaaacacattacaccgctaaaataaaatttaccagcaatactcaggaaacgttcaacaatacaacgattcgttaccgttatatcgaaaatggcaaagtggaagacaaaggaaaaaggaagacagacgaaaatggtcttatttctatttccctgccggatttgaaacctgccgccacccgacagatcatagtagaatttgacgatccccaatacatctataagaaaaccttctacctgccttcattcacaaaagattttgatatcaaattcttcccggaaggcggtgcattattagctgtcccccaccagaatatagctttcaaagcgcagggagcggacggtctgtcaaaagaaatagaaggtttcctattcaactcacaaggagacaccttaaccgtttttcgttccgagcacgatggcatgggagttttcaccttaaatccaagtgatggaaattcctactatgtaattgccaaatccggtgatggtatcagcaagcgattcaatcttcccgctgtcgaacagcaaggaattaccctctctatgacgcactacaaaaaggaaatacgttatgaaattcagaaaacaagtacaaccgaatggcctgaaaggttattcttaatagcacatactcgaggcaaattagctattctgcaaccaatcaatgcgaacaggcctttcggaagaatgaatgacagtctgtttcatgtcggcatcactcattttatgcttatcgaccaacagggcaatgcgcttagtgagcggttggttttcatccccgaccgtaatccacatcagtggcaaatccttcccgacaaaccgacatacggaaaaagagaaaaggtatctctgcaaatcgcagctaaagatcataacggtaatcctatagaaggaagtttttctatcagcattaccgatcggagaagtatccggccggattcccttgcagataatatcgtatcaaaccttctcctgacttccgatctgaaaggttatgtggaaaatcccggatattattttctccaccaagatctcagaactctacgtactctggacttcttaatgatgacacacgggtggcgcagacatcatatcaaaaatgtagtaactccaccttctttgaatctagccaactacatagaaaaggggcaaacgatcagtggacgaatcaaagggttctttggaggtaatgtgaaaaaaggtcctatctgcgtcttagctcccaaacaaaagattgttgctaccactactacggacgaaaaaggagaatttatcgtgaatacatcattcaaagatagtacaactttcctcgtacaggcacgtaccaaaaggggatttgccggagtagacatagaaatcgatactcctaaatatccggcagcctccccaaagtcacctttccgtaatgaagcagcaacctttatggaagactatttgctcaacacacgtgaccaatactatatggaaggaggtatgagggtgtataacctgaaagaagtacttgtcacgggaagtcgtaaaaagcccggttcggagagtatatacacaggaggtatcaacacttacactatcgaaggggataaattggagaattatggtgcacagacagccttcgatgcagttagcagacttccgggagtcagtgtgacaaacggcaatgagatacatatccggaacaatcccgagcaacccgtcattgtcattgatgacgttgtgtatgaagacgacaatgatatcctgactatgatacagactagcgatatgtccagtctgagccttcttcgtggagcggacgctgccatattaggttctcgtggtgcggcaggcgccattgttatcacactgaaagagggcaaagatcttcctgcaagacccgcgcgaggcattattacatgcactccgctgggatacagcgattctgtcgaattctatcaacccacttacgatactcctgaaaagaaaaatgcgcagcgttcggatttaagaagtacgatttattggaatccagcactgcaactgaatgcagaaggaaaagcaaccattgaatattatactccggacagtaccgcaccggaagatataaccatagagggagtagacaaaaacggaaaggtatgccggatagttcaaacaatcaacaattgatagcagttcaagctcctcaatagcttttatattagggtatctttgtcctatcaagcaagcactactgtattaaggtgcctttatctttgttctaccataccggtattgttccattaaaacaccgacattgttaattcaccacggccgtggagagatcttcttacggctgtgaagagaagctaccacggctgtggagagaagtcgtcacggtcgtggagagttaaagataaagacaccctaactgaataataccggcatttcaacaccactttaccgtcagcttagccttattcttccagtatctcaaaagcgcataaccacgtatttatcaaacaattcacctgggaaagagacaaaaagcaggctgacaataaaagtctcatctcctattgtcagcctattatcagtttctattgtcagctatattttcactgataatcagcggattaattattatcctgacagattgacaataaaaactgaataaaaaaacatagtagcagagaaataaaaaaagacaagaagtatagttttatcatataatcagattcaaattcctgttcaaacgctatatagttcgctttaaagtaaaatacgtattcctcccttttctgcaaatttcccaagctctaatcttcataaaaaagtaattgtatacaggataggttaaatttatttcgtaattttgcggatatataaagaatgaagctatgccggactatgatttaatcaccatactcggacctaccgcatcaggcaagactccttttgctgctgctttggcctatgaactcaacacagaaattatcagtgccgactcccgccagatatacaagggaatggatcttggcacagggaaagaccttgccgactatacaataaacggatatacgattccctatcatctgattgatattgccgagcccggatataaatataatgtatttgaatatcaacgcgatttccttatttcttacgaatcaattaaacaaaaaggccgtctccccgttttatgtggaggaacaggtatgtatctggaatccatactgaaaggatacaaactaatgcccgtaccggaaaatccggaactgcgtacccgcttggcgaatcattcccttgaggaactgacagaaatattaagccgctacaaaatattgcataactctaccgatgtggatacagtaaagcgtgccattcgcgccatagaaatcgaggaatattacgccatccatccggttcccgaacgcgagtttccggcactgaacagccttattatcggagtagatatcgaccgggagctacgtcgcgagaagattacccgccgattgaaacaacggttggaagaaggaatggtagatgaagtacgacgtttgattgaacaaggcatttcaccggatgatttgatctattacgggttggaatacaaatacctgacattgtacgtcataggcaagttgagctatgaagagatgttcaacggtttggaaatagccatccaccagtttgccaagcggcaaatgacttggttcagaggcatggaaagaagaggatttaacattcattgggtgaatgcgacacttccaatggaagaaaagatagcttttgtaaaagaaaaactgaaagagatttagtatctttgtcggttattaaagtgagattttaatacagtaggataggaatacgaatatgagtgtagaaccgaacaaatggggtgtgatttacaacccgaaagctggtacccgaaaggtaaaaaagcgctggaaagagatcaaggagtacatggacaacaaaggtgttgattatgactacgtacaatccgaaggtttcggttcagtagaacgtctcgcaaagattctagccaacaatggttatcgtactattgtcgttgtaggcggtgatggagcattgaatgacgccatcaacggtattatgctatccgacgccgaagacaaagaaaatatcgcacttggcctgattccgaacggaatcggaaacgacttcgctaaatattggggactcagcactgaatacaaaccggcagtggattgcatcatcaatcatcggctgaagaaaatagacgtaggctactgcaacttctatgacggcaaagaacaccatcgccgttatttcctcaatgccgtcaatatcggattgggtgcacgaatcgtaaagatcaccgaccagaccaaacgtttctggggagtaaagttcctgtcatacgttgcagccctgttttctttgatattcgaacgaaaactatacagaatgcatttacgcatcaacgacgagcatatccgcggacgtatcatgaccgtatgtgtgggtagtgcatggggatggggacaaacgccaagtgccgtaccctacaatggatggttggacgtttccgtaatctatcgtccggaatttctacagattatttccggactatggatgttgattcaaggaagaatcttaaatcataaggtagtgaaaagctaccgtaccaaaaaggtaaaagtacttcgggcacaaaacgcatccgtagatttagatggccgtctgcttcccaagcactttcctttagaggtgggagtacttccggaaaaaacaacgcttattattccgaactaatattgattgacaacctgtaattcattaaataacaaaatgatagaacttaagaacaatcctgccggtaactttttcctattggccggtccgtgtgtgatagaaggagaagagatggcaatgcgcattgccgaacgagtagtaaaaatcaccgaaacattgcaaattccatacgtattcaaaggctcttaccgcaaagctaaccgttcgcggcttgactcattcatgggtatcggtgacgagaaggcactaaaaatactacaaaaggtacgcgacacgttcggggttcctaccgtaacggatatccatagtgcagacgaggccgaaatggcagccgaatatgtggatattctccaaataccggcttttctctgccgtcagacagacttattggtcgcagcagctaaaacaggaaagacaattaacatcaaaaaagggcagttcctttctcctttggctatgcagtttgccgccgacaaagtggtggaagttggcaacaaaaacgtgatgttgaccgaacgcggtacgactttcggttaccaggatttagtagtagactatcgtggtatccctgaaatgcagtcattcggatatccggtcattctggatgtcacccactctttgcaacaacccaaccagaccagtggcgttaccggtggtatgccgcaactgatagaaaccgttgccaaagcaggtatagctgtaggagcggacggactatttatcgagacacacgagaatcctgccatagccaaaagtgatggtgccaatatgctcagactggaccttttggaaggtctgttgaccaagctggtccgcataagagaagctataaaataactattttgctgtcaatttgtgatttcacgtcaaacactgcgacaaattactcagaaacatttatttaaattaaatagaacatgaaacatttattacgtggattatttattgcagttcttctgatatgctgcaatttccagtccgtacttgcacaaccgatgcaacaactgcctgtggacaaaaatgtccgtattggcaagttagacaacggactgacttattacattcgccataacgcacttccggagaagcgtgtagaattctacatcgcacagaaagtgggttcaatacttgaagagccgcaacaacgtggtcttgcccatttcctggaacacatggcattcaacggaacaaagaattttcccggcgatgaaaccggattgggcattgtgccttggtgcgaaacaaaaggtatcaaattcggaacaaacctgaacgcatataccagtgtggaccagacagtttacaatatcagtaacgttcctacagaaaaccccaatgtagtagactcttgtctgctcattcttcatgactggtcaaatgccatcaaccttgccgacaaggaaatcgacaaagagcgtggtgtgatccgtgaagaatggagaagccgtaacagtggtatactccgcatcatgacagatgcacagcccacgctatatccggattccaaatatgctgactgtatgcccatcggaagcattgacgtaatcaataacttcccttatcaggccatccgcgattattatgccaaatggtatcgtccggacctgcagggaatcgtcattgtcggtgatatcaatgcggaagagatggaagccaaattgaaaaaagtattcgaagatgtgaaggctcctgtaaatcctgccgaacgtatctactatccggtatcagacaaccaggaaccgcttatttatatcggaactgataaagaggtgaagaatccttctgtaaacatcttcttcaaacatgaagctaccccagattctttaaaaaatacaattagctattacgctagccaatacatgctcagcatggctatgactatgttgaacaaccgtttgaatgaacttcgccagacagccaaccctcctttcaccaacgcaagtgcaggatatggagaatttttccttgccaaaacaaaagaagcattcagcctggatgcgagaagcaaggtagacggtatcgacctggcaatgaaaaccgtattggaagaagctgaacgcgcacgccgtttcggattcaccgctactgaatacgaacgcgcacgtgccaattatatgcaaggcgtagaatctgcttacaatgaacgtgaaaagacaaaaagcggttcatacgttaacgaatatgtaaacaacttccttgataaggaaccgattccgggaattgaattcgagtatatgctcaccaagcaaatggctccgaatattccggtagaagccatcaataagatgatgcaacaacttatcacagacaacaatcaggtggttctgttggccggtccggaaaaagaaggagtaaaatatcctactaaagacgaaatcaccgctttattgaaacaaatgaagtcattcgacttgaagccgtatgaagacaaagtttctaatgaaccgttaatctccgaagatcttaaaggtggaaaaatcgtatccgaaaaagccggagaaatttatgggtctaccaagttagtactttccaacggtgtgaccgtatatgtgaaaccgactgacttcaaagctgatcagattgtaatgaaaggtgtaagcctcggtggaaccagtgtattcccgaacgatgaaatcatcgatattgcccaattgaacggagtagctttagtaggcggtatcggaaacttcagcaaagtagatttaggcaaggctcttgccggtaaacgcgcatccgtaggagccggtatcggtaatacgacagaaacgatttcaggtagctgttctccgaaagatttcgaaacaatgatgcagcttacttacctgacattcacttctccacgcaaggataatgaagcttttgaatcttataagaaccgactgaaagctgaacttcagaatgcggacgccaatccgatgagtgctttcagcgacacgattacaagcgcattatacaacaatcatccgcgtgctatcaagatgaaagaaaacatggtagacaaaatcaactatgaccgcattattgatatgtacaaagaccgttacaaagatgccagcgactttactttctacctggtaggaaatgtggatttggaaaaaataaaaccaatgattgccaagtatctgggaagcctgccgactatcaaccgcaaagagactttcaaagataacaagatgtatatccgcaagggaaaatacaagaatgagtttgccaagaaacaggaaactccgatggctaccatcatgttcttatatagcggcacttgcaaatacgatctacgcaacaatatcctgctcagcttccttgaccaggctctagatatggtttatacagcagagatccgcgaaaaagagggtggaacttatggagtaagctgtaacggaagtctcggaaaatatccgaaagaagaactcattcttcagattatattccaaacagaccctgccaagaaagataaattgtctgctgttgtcgtagaacaattgaacaagatggcaaaagaaggtccgtctgccgaacatatgcagaagatcaaagagtatatgttgaagaaatataaagatgcacagaaagaaaacggttactggcttaataatctggacgaatacttctatacaggtatcgacaatacaaaagattacgaaaagatagtcaacagcattacagcaaaagaagtacaagacttcctcgctaggctgctgaaacagaacaacgaaattcaagttgtaatgactatgccggaagaagccaaataaaattctctagcatatcaacagaatgatgatattcaacgaattacgcaaacatggaaggctcgccgccaaacggcatccgatgtatgaaaagaacaaagtagctaaaatactcggttatgtcatgggcgcattctgggccggttacctgatattcttcggtacgacgttcgcgttcggtttttcagatatggttcccaatcgggaaccatatcacgttatgaacggcgtagttttgatttttatcctggcactcgatttcctgttgcgtgttccgttccaaaagacaccgacacaggaggtaaagccctacctcctgctgccggttaaacggaatcgcgtcatcgactttcttcttatccgttccggacttagtctgttcaacctgttctggttattcctatttgtccctttttctttcatcaccattaccaaattctttggtaccattggagtcattacctatctcataggcattttacttctgattatcgctaacaattactggtatttgctttgccggacacttatcaatgaacgtatttggtggattctgttacccatcgttttttacggtggaacagggtgccttcttttaattccccaagacagtccgctcttctattttttcatggatctgggagacggatatattcaaggggacatcctctattttctcggcacgatactggtcatcatccttctatggctgatcaaccgcaagattatgtccggacttatctatgccgaattatctaaagtagatgatacccggatcaagcatgtttccgaatacaaattcttcgaacgttacggagaagttggcgagtacatgagactggaactaaaaatgctcctacgcaaccgccgttgtaagggctcactgcgcagtatcaccatcgtaattataaccttctccaccctgctcagtttttcgagtgtctatgacggtaacgtcatgacctcctttatctgcgtttacaattttgccgctttcggaatgatcatcctatcacaaataatgtcattcgagggtaattacatcgacggattgatgtctcgcaaagaatcaatcagaagtttgcttaaagctaaatactacatttatagtataggcgaaatcattcctttcctattgatgattcccgccatcatcatgcacaaactgactctgttaggtgctttcgcctggtttttctataccatcggctttatttatttctgttttttccaactggctgtttacaataagcagacagtccccctcaacgaaaaagtaacaagccgccaaaccaacagtgcgatacagatgttagtcaactttggagcattcggtgtcccgcttattttatacagcctattaaatacatttttaggtgaaacgattacttacaccatcctgttggtaatcgggcttggttttgtcctgacttcttcgttatggatcaagaatgtatatcatcgcttcatggagcggagatatgaaaatatggaaggtttcagagacagccgccaataaaaagttcatgaatcattaacccatataaacatagaaagtcatgattgccattgacagacttagaaagaatttcggtgaaaaggttgcggtagatatagaacactatgaaatcaatcaaggtgatatgctcggcttggtaggaaacaacggtgccggaaagacaacacttttccgattaatgctcgacctattaaaagcggacaacgggaaagtagcgatcaatgacattgacgtaagccaaagcgaagactggaaaagctttacaggcgcatttatagatgacggttttttgattgactatcttactcctgaagaatatttctacttcatcggaaagatgtacggattaaaaaaggaggaggtggacgaacgcctggttacttttgaacgcttcatgaacggagaagtgatcggacacaagaaactgatccgtaattactccgccggcaacaaacagaaaatcggtatcatctccgccatgcttcatcatccgcaattattgatattggatgaaccgttcaatttcctcgatcccagttctcagtctgtcatcaaacatctgctgaaaaaatataacgaagaataccgggcaacagtcataatctccagtcataacctgaatcatacggtagatgtatgtcctcgaatagctctgctggaatatggggtaatcatccgcgatataaccaacaaggacaattcagccgaaaaagagctggaagattattttaatgtgaaagaatgagggaatttactatttaagaataaacgatgaaaacaaaattcaaactgatacttattctagtagggctgaccgccatgctcagttcctgccgcacctccgctccacgtctggattatcaggcattggcacgggcttctatcctattaggggtggacatcaatatggaagataaccacaagctctatctggaagcggccaattggataggaactccctatcgtggaggtggagactcaaagagaggtactgactgttccggcatggtttatcagatatatcgtaaagtataccgcattcaagtgccacgcaacacggaggccctgaaaagcaggagcaacaagatagccaaacgaaacctgaaagaaggagacctgctcttttttaccagcaaccgctctaaaagaaaagtagcccatgtcggcatctacctgaagaatggaaagttcattcatgccagcacaagtaaaggagtaatagtcagcaggctaagtgaagattactataacagacattggattagcggaggcagaatccgctaacaatcaaaccccaaagttcctctatgaattataaaacctatttatttgatttcgactataccctagccgattcgtcacgcggcatcgttaaatgcttcagaatcgtacttacccgtcaccaatatttgacagtcactgatgaagctatcaaacgtactatcggtaaaacactcgaagaatctttcagcattctgaccggagtgaccgacccggcacaacttgcggccttccgacaggaatacaggcaggaagcagatatacacatgaacgtgaatacctgtctttttcccgacacattatcgacattgacagcgctgaaaaaacaaggcgcccgtatcggcattatctctactaaatatcgttttagaatagtaagctttttggaaaagtatatgcccgaagattttctggatattgtggtgggcggagaagatgtgaaagccgccaaaccttcaccggaaggagtacgatttgctttggaacatttgggtagtgcacctcaagagactttgtacatcggagacagcaccgttgatgcggagactgcctgcaacgccggagtggactttgccggagtactcaacggaatgactaccgcagaagaactgcaagcttatccacacaaaatcatcatgagaaatcttgaagagttagtccgatagcaaaaaaataaaagaaatatttgccgggtatgaataaaaatagtacttttgtgcccgattattccgcaacgggttcgacaaagagttctctaagtgattaaagaccacccgccggagctaacttatacattatatataagatgtacgcaattgtagaaattaacggtcagcagtttaaagcagaagctggtcagaagttgttcgttcaccacatcgaaggtgcagaaaacggttcaacagtagaatttgaaaaagttcttttggtagacaaagacggaaacgtaacagtaggtgcccctatcgtagaaggcgctaaagttgtttgccaggttgtatcaaacttggttaaaggtgacaaagtacttgttttccacaagaaaagaagaaaaggttacagaaaattgaacggtcaccgtcaacagttcactgagttaacaatcacagaagtagtagcttaatcaatttaaaaagtaagaagaaatggcacataaaaaaggtgtcggtagttctaagaacggccgcgaatcagcaagtaagagattaggcgttaagatatttggtggcgaagcttgcaaagcaggcaacatcatcgttcgtcaaagaggtactgaattccatccgggtgaaaacatcggaatgggtaaagaccacactcttttcgctttggtagatggtacagttagtttcaaggtaggcaaagaagacagaagatatgtttctgttgttcctgcaactgaagcgtaattgcattacagaaaatattcaagagaaggagatgtaatccaagtgattgcatctcctttcttttttatgtcagttttcattgcttggttctttgttttttctttatctttgcatccattaaacgaaagttcattaaaagtatagatatgcttaccattaaacaaattacagaaaacacagaggcggttatccgcggactggaaaagaagcatttcaaaaatgcaaaagagacaatcgaccaagtgattgctttaaacgacaagagacgtactacacaaaatcaattagataaaaacctggcagaggtcaactcgctttcgcgtactatcggacaactgatgaaagaaggcaagaaagaagaggctgaatctgcacgtgcccgcgttgccgaactgaaagaaggtaacaaagaattggatgctgtcatgacacaagctgcaacagaaatgcagaacgtgctctacacgatccccaatgttccttatgacagtgtacctgaaggtgtaggagcagaagacaatgtcgtagaaaagatggggggcatggaaacagaacttcctaaagatgcgcttcctcattgggaattggctaaaaaatacgacctgattgatttcgatctgggtgtaaaaatcacaggtgcaggtttccctgtatacaaaggtaaaggcgcacaacttcaacgtgcccttatcaacttcttcctggacgaagcacgcaagtccggatataccgaaatcatgccgccgacagttgtcaacgctgcttccggttacggcacaggacaacttcccgacaaagaaggacagatgtatcactgcgaagtagacgatttatatctgatcccgacagcagaagtccctgtgacaaacatctatcgtgacgtaattctggaagagaaacagttaccgattatgaactgcgcatacactcaatgtttccgtcgcgaagcaggttcatacggcaaagatgtgcgtggcctgaaccgcctgcacgaattctccaaagtagaattagtccgtatcgacaagccggaacactctaagcagtctcatcaggaaatgcttgaccacgtagaaggtctgttgcagaaactggaacttccgtaccgcatacttcgcctttgcggtggcgacatgagtttcaccgctgcgctctgcttcgactttgaagtatattcggaagcacagaaacgctggttggaagtaagttccgtatccaattttgatacttatcaagccaaccgcctgaaatgccgctaccgtaacgcggacaagaaaaccgagctttgccatacattgaacggttcggcattggcactcccccgtatcgttgccgctttgctcgaaaacaaccagactccggaaggtatcagaatcccgaaagcactggttccatattgcggctttgacatgatagactaataaaagagcaagtatataaagagccactcatcaaaagagtggcttttctttttgtttttcgtaaataagctgtatctttgccgaaatttataacattctgatagcagttacgtaataaaaccaacaaaataattagataatgaacaaaatcattagcaaagaacgcttttctgagaaagtattcaaatttgagattgaagctcctctgattgctaaatctcgtaaggccggacacttcgtcatcgtgcgtgtaggcgaaaagggagaacgtatgcctctgactatagccggttctgacgtaaagaaaggcactattactttagtagtacaggaagtcgggctttcttcaacccgtctttgcgagctgaacgagggtgattacattacggatgtagtaggtccgttgggacaggctacacacatagagaagttcggaacagtagtttgtgccggtggtggtgtaggtgttgctccgatgctccccatcgtacaggctttgaaagctgccggaaatcgtgtgattaccgtattggcgggacgtaacaaagaccttatcatcctggagaaagaaatgcgtgaaagttccgacgaagtaatcatcatgacggacgacggttcatacggtcgcaaaggtctggtgacggaaggtgtggaagaagttatcaaacgcgagaaagtggataaatgcttcgccatcggtcctgcaatcatgatgaaattcgtttgcttgctaaccaaaaaatatgagattccgaccgacgtttcactaaacaccatcatggtggacggaacaggtatgtgcggcgcttgccgtatcaccgtaggaggaaaaacaaaattcgtttgtgtagacggtcccgaatttgacggtcaccaggttaactttgacgaaatgctgaaacgtatgggcgcattcaagaatatcgaacgcgaagaaatgcacaagctggagtcagaatgcgaagccactaaagaaatagacgaaaacagccgcaatgcagcctggagacaggagttgcgcaaatcaatgaaacccaaagagcgtacagcgattcctcgtgtagagatgaatgaactagacccggaataccgttcacacagccgcaaagaagaggtaaatcaaggtttgacggcagaacaggcagttacagaagccaaacgttgtcttgactgtgctaatccgggatgtaccgaaggctgtccggtaggtatcgatattcctcgtttcatcaaaaatatcgagcgcggagagttcctcgaagcagccaaaaccttgaaagagacaagtgcgcttccggctgtttgcggtcgtgtttgtccgcaggagaaacagtgtgaatcaaaatgtattcatctgaaaatgaatgagaagccggtcgctatcggttatttggaacgctttgccgctgattacgaacgcgaaagcggacaaatttcagtacctgtcatcgctgataagaacggtatcaaaatagcagtaatcggttccggacctgccggactggcatttgccggtgatatggctaagtttggctatgatgtaactgtatttgaggcattacatgaaatcggtggtgtattgaaatacggtattcccgaattccgtctgcccaacaagattgtagatgtagaaatagacaaccttgtgaagatgggggttaactttatcaaggactgcatcgtaggaaaaacaatcagcgtggaggatttgaaggcagaaggtttcaaaggtatatttgtcgcttccggtgcgggactgccgaactttatgaatattcccggagagaactcgatcaacatcatgtcttccaacgaatatctcacccgtgtcaatctgatggacgcagccagtgaagaatccgacactccggtagctttcggcaagaatgtagcggttatcggtggcggaaacactgctatggattctgttcgtaccgccaagcgtctgggtgccgaacgtgccatgattatctaccgccgttcggaagaagaaatgcccgcacgtatcgaggaggtaaaacatgccaaagaagagggagtagaattcctgacactccataatcccatcgaatacatagccgacgaacagggatgcgtaaaacaggtagtcctgcaaaagatggaattaggtgaaccggatgcttccggacgtcgcagtcctgtacccattcccggagcaacagaaacaatagacatcgatctggccatcgtcagtgtaggtgtatctcccaacccgattgttccgagttctatcaaaggactggaattaggacgcaaaggaacgattgccgttaatgacaatatggaatcttccattcccatgatttatgcaggcggtgacatcgtgcgcggtggagctacggtcattctcgccatgggagacggccgcaaggctgctgctgccatgaatgagcaactaaaagcaaatgccggtaactaaccgccgacgcttgcttcagcataataaaaatagaataaggaaagccccgtctacatcaagtaaacggggctttccttattattcaaatatcaaagatactttcctactttaccacttggtttgtctcaggatccgggaaaataactgtcggtttaaacgacttggcttcctcaaaatccatcagtgcgtaagacatgataataacaatatcatccggttgcaccttacgtgccgcagcaccattcaggcaaatcttgcccgaaccgcgttcacctttgataatgtaggtttcaaagcgctcaccgttattgttatcggcaatatacactttctcacccgcaatcatgtttgcagcgtccagcaaatcctcatcaattgtgatgctacccatgtagtttaaattagcttccgtaacgcgcgcgcaatgaattttcgacttcaacacttcaatcatcataaggtttcgtctttttagttattctttatatttaatgttatcaatcagtcgtacttccccgcagaatacggtgatacaccctaccgcataagaagtattttcccaatcatttatcttctgcaatgtatttccgtctacaatctcaaagtactccaaacgcaagcccggtgcagcttcaatcgcatcttccaccatcttttgcgtctcacttaccgtatgagtggccgcaaagttacgacttttaaataatgtgcgggaaatatttaaagcattttcacgttcttctgcagacaaacgtttgttacggctactcaatgccaacccgtcttcttcacgtacgatcgggcaacccacaatctccaaagaataatttaattgccgaaccatctcacggataatcgccaactgctggaaatccttctcaccgaaataagccctatccggctgcactgcgtcaaacagcttgctgacaatctggcaaacgccattgaaatgtcccggacggaacgctccttccatcacagtatccaacggagcataactgaactgacgggtatccggttccgggtacatctcgctcaccgaaggagcaaagaccaatgctgccccacattcttccaacaagctgcaatcagcctccaacgtacgcggatatttctctaaatcgtttttatcgttaaactgtgtgggattcacaaagacactcactacagttacaccattctcacttacgctgcgctttaccagagatgcgtgtcccgcatgcaaagcacccattgtaggaaccaatcctacctttttaccctggactttcagtgccgacaattcggcctgtaagtccttgatagtgtgcactactttcattttcgtctattggtttatgttttactcgtttgcaaaaactctgcaaaataaactaatatttgccacataaagaaagaatatcttatttaatgtgtcttttttttcgtatctttgcacaatattatagagaactattgttattatgacaaaggcgaataaagttttatttattactcaagagattacaccttacgtttcagaatccgaaatggccaatataggtagaaaccttccacaggcgatccaagaaaaaggccgtgaaatcagaacctttatgcccaaatggggaaacatcaatgaacgcagaaaccagttgcacgaagtgattcgcctttccggtatgaatctgattattgacgatactgaccatcccctgattataaaagtcgcttccatccaatctgcacgtatgcaggtatatttcatcgataatgatgattatttccagaaccgtttgcagacagcagacgaaaacggtgtggaatatgatgataacgacagccgcgctatcttctatgcacgcggcgtactggaaacggtgaagaagttgcgctggtgtccggatgtaattcactgtcacggctggatgactgctttggctcctctttatattaagaaagcctacaaagacgagccttccttccgtgacgctaaagtagtattctcggtttatgaagacgactttaaaaatacacttagcgatgactttgcaactaaattgatgttgaaaggtatcacaaggaaagacttgggtgatttgaaagaaccggtagattatgctgctctctgcaaactagctgttgattattccgatggagtaatacaaaacagtgaaaaagtggacgaatctattattgaatatgcccgccaatcaggcaagctggtacttgattaccaaaatccggaaaactatgcagacgcctgtaatgaattctacgatcaggtatgggaagccgctgccgacaataacaaagaagaataaaaaattcaagatacgacaatcatgaaagcaaaatatgccttaatagctttactggcaatcactttttggaactgtgatgataacacagccggattaggactgggaatgtttccgggaagtgaccagaatattaatggaaaactaacgacatttgatgtaacaacccaatctattcccgttggagaagtttatgccaaaacaaatatcgggtatgtgggtaagtttacagatgaaatattcgggacttatcaagcaggctttttagtccagcttaactgcccggaaggtatgactttccctgaagccttcaaaggagattacaatagtggtactggaaagatgatagcagacttcaacaatgtagaagaaagcgtacacaaaaactacactactattaaagacggagagacttctatcggcaactgtcagatcaatatttatctttggtatgacagttacttcggagattctttgactgcctgccgcttgagtatgtatgaattggacaaaaaaaaggaaggtaccaatgaatattggtacaaagatcctaatgcttactataccaatatcaaccccgatctctattatgataaagagacaagtttattaggtagaaaatcttacacggcagtcgatttatccgtcagtgattctatacgtaatctttcaacctacactccttatgtcaaaatcacgttagataaggcaagaacggaagagttgggcaaggaattattaaaagaaggacgtacgaaagatttgtataagaaatttcaagatatatttcccggattatatgtcgaaagcgattacggagacggtactattctctacgttaacgctgtacaaatggatgtagcatttctggaacacgccagagacagtataacaggtgccaaattgcgcacatccttagggaaggactctgtagtatatgccggccgctctttcacatccacacgtgaagttattcaagcaaacaaattggagaatggtacgaaaatagaagagtgcattgaccaaaaagactgtacttacttaaaaagtcccgcaggaatattcacagaggtaacacttcctattgaagaaatatcgaacacacttggaagtgatacgctgaatgccgttaaattaagcattcctatctacaatgaagcaacaagcgacaagaaattcggaatgtccgttccgcgaagtgtcctgttgatacgtaaaaaatacaaagacgatttcttcaaaaacaatgaactgagtgacggtataaaatcatccctgtttgattattcatcttctacaggaaatctcaccgcatacacattcaacaatatcacgcagatggtaaacaactgtctggctgataaagataaaggagaagactggaacaaatttgtacttattccggtacttgtaactaaagactcttctgcaaacagtaattatggaacttcgtccaatgtaatcagcatacaacacgatttaaaacccggttatgcacgtttaaaagggggagctaatgcaacagatcccactttatccgaggatgaacaagataaatacaaactaaaacttgaagttatttctacaaacttcaataaatagaacactataaaagaacttacagaaacagcgcaggttgcattaatgcaacctgcgctgtttctgtatagccatagagtattccccataaaagcacattacaaagccgcggacggaatcgcatcctgtccgcggctttgtgtataacaagaatttacctcttattactttccagtcgttttcttaggtcttccggctgtctttttcggttcagtttcagtctttttaacagcggccttctttgttgttgccgactttgcagtcgtttttttagcagcagtttccttagccacctttgcctgcaatttctcaaccatcttctctagtccggtaatttcatctccctgattcttgatcgtagtcagcaaagaattaagttcttcgctatccacatcggcaggatacaatgcatccacccgtttgatgaaatcggccaagatattcatatagttcgtgaacgcatcataaggagagtcataaataccgcgattcagccagatacccgtattcttcgtcgtcatgaaacggaagttgttgcttgcctgcaaataatcccagtcctgcttgatacgccggtcatcactcagatgaacgcgttccgccacactatacaatttgttgaaagcctcacgttgcatgacattacctaaccagcaactggtatctctttcctcatccacccatgacatcggataggcaacgtcaagctgagatacagatttcagtttcgtcacaatttcggtcggtgtagagaaagtaatacctttcgcttttgcacattccggcaaagctttcaggaattcaagaatattggaagataacggctgagccataccaagcgcactcaactccataaagatattgataacctgttcttcctgtggcaacgcatcaatccaactgatatacttatcggcaaacagaggatattccgcccaatccgagttggagaaacgcaaactgatatcatccgacaacttaaaatctctcaacagaagtttgagactgggagcttgattgcagtgatatacataatgcggactcttccatcccaatatatgtttagcaccttccgtcaacattcctttgaagcccatagaagccaccaatccaccaatatcgtccgagtaaatcaaactggaattacggaacactttcggttctttgccaaacatctgtttcatcttattacgttggcgaatcacctcctcacggaaacaatcctcgttagcaagtgaggacagaccgtgtgaataaggttcgcaaaggaactcgcaacaaccggtatcgttcaactgatgcaacaaatcaattactgccggagcatggatctccaactgttccaaagccacgcccgagatagaaagcgccactttgaaagcgccagccgaattcttagccatctcaatcaatgtactgagagcaggaatatatgaacgttcggcaacctcgttcatacccgtttcattcgcgtaatcatcgtaataataatggtcattaccgatatcgaagaaacgataacgtttcaaatgtataatttgatgtatttcaaaataaagacagatagttctcatttttgtatattgtttcgttatttaccatagtttcttaacacatcctcgtaaagggcacgaattctcaggcctaccttttcccaagtaattccgtccacttcccgttttccttcttcctgcagatattggaaaagagacggattagtacaaatggaataaatcgcatcggccatcgcatgaatatcccagtaatcggtcttaatcaccttatcaagaatctcgccacatcccgactgctttgatatgatggaaggcgttccgcattgcatagcttccaacggggcgataccgaaaggttctgataccgaaggcataacgaatacatcactattcttataaacctcatatacctgcttgcctttcataaatcccgggaagtggaaacggtcggcaatgccacgctcggcaaccagattgatcatggcattcaacatatcacccgaacctgccatcacgaagcggatgttacgggtacgctgcaacaccagagcggcagcttccacaaaatactcaggacctttctgcatagtgatacgtccgaggaaagtaaccactttctctttcgaatggtcgggacgcggaatatccagcagttcctgcgacaacggataaacggcattgtgcatggcaaacacttttcttggatcctgatggtattcatttatcactgtacgccgggtaagctcggacacacacatgatacagtcggcatgatccataccgttcttctcgatcgaatagacagtcggattgacttttccgcgagaacggtcaaaatccgtagcatgcacatggatacaaagcggttttccgctcaccatcttggcatgcacaccggcaggataagtcagccagtcatgtgcatggataatgtcgaactcctgctgacgggctactactccggcaataatcgaaaaattattgatttcctcatgcagattaccggggtaacctcctgcaaactccatacatcccaaatcattgacatgcatatacgagaaatcggcatagatatggtcgcggaaagcataatactcttccggtgacgtatatccctgcaagcgtgacttcaaatagtcataattgacatcacgccacacaacaggcacctggttcatgccgattattttcaagaacttttcttcttcaccacaaggcttaggcatacaaaatactgtttccatatcaccctgcaagctcaatcctttagttattccgtaagaagcaactgcaagaccaccatatattttcggggggaattcccatccaaacattaaaactttcatcttcgttcctcctttctttaataatatttagacagcagcttcaaaacacgcaatatttccgctacattcatggcaaacgacacggcgccacgtcctctgaaaggcggattcccgtcaaatagctcggcaatggaccccacacaatggctggtcatttcatcatcatagctaatcaactgacgttcgacgaacgacagtccgctggtcttataaatccgtaaataagcctccagatagaatcccatcaaccaaggccaagctgttccctgatgataagcatagtcacgctgtacctgcggacctacataattcggattgtatcccccactcttcgggctcagcgaacgaatccccttaggagtgagcaattctttggttacgatatcgagcacctgtttcttctgcccccggtccagaggagaataatcaaatgctacggtaaatatcatgttcggacgtacactccagtccatcatattgccgtctacataatcgagcaaatatccatattcgttacggaacacctccacgaatgatttaccggtcacttcggcctgcgcatcaagttcatctgcaaggattacatcaccaccttcgcgtaccaaatcagccacaaagcgcaacgcattataccacaacgcattaaattcaacaatatatcccgtacgcggaatcaccggatgaccgtttaccgtagagttcatccaagtaatcgccttctccgtaccgttggcatacaacagtccgttttcatgcaggaaaaggttgtcatgcttcctttgacggataaataccatgatatctttcaaaagctctccatatttctggcggcactgttcgcgcgaagtttctttggtatattgctgcaaagcccatacagcccacagcaacacatctgggtgttccatttcataaattttgtaccccacaggttcttcattgatgaagttacggattgccttttccgccgttttcatcacatcttcaaactgatctatctcgtcaatggcaagtgtcagtcccggcaaagcgatgaacatatcgcgcgcccgacatttgaaccacggataaccggcgagaatatagtgttcgccctcctgctgattgtggaattgatgagcagagttctccaaacagtggtagaaactatcacgcggtgtacgatcggccacttccgcttcaaatgtctgtttcagcctgcgagtcgtcgtttctgaaattccggcagagaaaacaatgctttctcctttctttatatctacttcaaaataaccaggtacataaagatcttcattgaagtcatatccgcgctcctgttccttcggatattcgattccccgataccagtcgggttggaaatggaattcacattttttattcaactgcatataaagttccggatatccgggatacatacaagtcttgattccgttctccactaattgatactcacggctcgcctgagcgttttcatgggtatattcgcgtacacttctgaaagcaagaaacggccggaaacgcaaagttgtcgccgaatgagcgtccagcaacgtataacgaatcaggattctattttcatgatgtacaaagattttttctttgcggagaatcacacctccaacacggtaagttgtcgccgggatatgttcacaatcaaattcacggatatacttgtgcccgttaggactaaagttatttccttgatatttatgcaatcccaagttaaactctgcaccgtgttgaattaccgtttcatcaagagaagatagcagcacatgattttcatcgtctatattggggataggaatcaccaacaggccgtgatatttgcgtgtgttacaatcaacaatcgttgtacaatgataagctcctgccttgttcgtccgaagaatttctctttgaagagactcttcgagattcgtcatgagggtcttgtcaaatcgtaaataactcatagttgtgcattatttaaaggttaattattggtcattatattgtgtatatatattaccgtcatattgcatatatatcggctagagcggtatatacaacgggtataacgcccaaatgtacaaattatagataaaaacaaaaataaaaaggctttttattttcagtttttgtgcaaatattcgtagtattgcgtaaaatatctaaagaaaagaatgtcgtgaaacaagatatccagcgtatcatgctggctacagcaaaatctttgttcccaatttttatcctatatattctctagttcatggaagttggaaggattgggacttcttaaaacaacaaactgtattttagagataaacaggcgtttaacctcctatcatccagcaactaaagtccgattttcaataagatattccaaccgttctactctagtaaacagatctgctcactagagtgaatagatccgttcacttcagtgcaaagaactattcactggagtgaaatggttgatatgtctattagaaaatctgagaataaaggctaaatcgctaaaaaaatgcggtaatccgacacataaacagcctttaatttaagacagaaaggataatacaaatcgtgtatgagagatagcagagaaaggaatgagagataacgacatagagtatgagagatacagatacattaaagtatctctcataaaacaaacaactaattatcaatagcttatcattattttatgagagatatgagagataattttttttaaatcgttttagtaataacatcaatgattctgcaatgcctcaatcaacaatgttatattggcggtgaacaatctgacggaaatagccaatagaatgataccaaagaacttacgaataatatagataccacctttgccgaggaaacgctcaacacgtccggtcatactcaccacgaaatatacccagatcatattcagcaccaaagctataataatattaacgcttgcatattcggcacggagagaaagcaacgtcgtgaaagctccggcgcccgcaagcagaggaaaaacaagcggaaccaaagtagcctctttgataggcccctgattcttaaaaatctcaatatccagaatcatctccaaagacatgaggaaaataacaaatgcaccggcaaccgcaaatgactcaatatccacatgaaaaagcttcaacatcatatcacccgcatagaagaacccgatcaacaagacgaaagaaatgacagtagctttcatcgcatttacatctttgcctctttcttttaggttaataataataggtatagagccgataatatctattacggcaaaaagtacgataaacgcactgaccatctgctgccaattaaagcctgtgaacataatttcctccttttttttctgcaaatatactctatttttatgcattcaaacaataaaaaaaacaaaaagagaggtcagatgttgacagcagtatcgtattatgagtaaatttgtacgattaacaagaaattacgacgtatggaaacaatgttcgacactttgctccaattgcctttatttcaaggtctttgtaatgaagattttaccagtattctggaaaaagtaaagctacactttatcaaacataaagcaggggagaccatcattgaaaatggaagtgcttgcacacaactttgttttctattgaaaggagaagtttcaatcgtcacaaattccccccaaaatatatacacagtcatcgaacagatggaagcaccttatttaatagagccgcaatcactgtttggaatgagcacccattacacctcttcttacatagcacatacagaagcgcatactgtaagtatcagcaaagcctttgtgctcagcgacctgttcaaatatgatattttccggcttaactacatgaatattgtcagtaaccgggcacaaaatctttattcccgtttatgggaggaaccggctcaggacttgaaaaataaaatcattcgtttcttcctgctacattgcgaaaaaacacagggagaaaaaatattcaaggtaaagatggacgaccttgcccgttatctggatgacacccggctgaatacgtccaaagctcttaatgaactgcaagacaacggtgtgcttgaattacgccggaaagagatcctaatcccggacgcagtgaagttagtgaacgattagaagtggctctgcaataaacgaaacaattcgactactgctaaatttttcaccacggattacacagatttccacagattaacattaaaagttcgttttaataaaaaatctgtggaaatctgtgtaacccgtgatgagttttgatatataactaggaataatttatcactcccactctatggtagctggcggcttagaactaatatcataggttacgcgattcacgccttttaccttattaataatatcatttgatactttacccataaattcatatggcaaatgtgcccaatcggcagtcatagcatcggttgaggtcacagcacgcaatgcaacagcacgttcatacgtacgctcgtcacccatgacaccgacagactgcaccggcaacagaataactcccgcctgccatactttatcgtacagtccccaatcacgcaatccttgaataaaaatatcatccgcatcttgtaagatacgtactttctcacgggtaatatcacccagaatacgcactgccagccccggtcccgggaacggatggcgggtaatcagatgttccggcatacccaactcacgacctacccgacgaacctcatccttaaacaacaaacgaagtggctcacacaatttcagattcatcttttcaggaagtccacctacattatgatggctcttaatcactgtacccgtgatagacaatgactcgatgcaatccggatagattgtaccttgagccaaccatttcacgtctttgatcttatgagcttctacatcgaacacatcgatgaaccccttacctataatcttacgtttaccttccggctcagtcacgcccgccagttccgagaagaatttttcgctggcatctacaccaatcacgttcagtccgagacactcgtaatctttcatcacattcttgaactcattcttacgcagcataccatgatctacgaaaatacaagtcaggttcttgccaatagccttattcagcaacacggcagcaacagaagaatctacaccaccgctcaaaccgagcacaaccttatcatctcccaactgggcttttaattcagctacagtactttcaatgaaagaggccggtgaccagtcttgcttgcaaccacagacatccaccacaaaattcctcaatatctgcgtaccgtcttcactatgaaacacctccggatggaactgtacgccccacacctgctcaccctctatctgataagccgcaatctctactttatccgtcgaagcgatctttttgaaattatcaggaatagcggtaatcgtatcaccgtggctcatccatacttgcgagccgtcacgcactcctttcagcagcacattatctttgcagaaagaagccaaatgagcacgtccatattcacgtgtacccgccggttccacttttccaccattggtatacgacagatactgcgcaccataacagatacccaatatcggatatttaccacgaatctcactcaaatcgactttaaacgcatctttatcgtaaaccgaaaaaggactgcccgaaaggattacccctttaattgtagaatcatcttttggaaatttgttgtaaggaatgatttcgcaatatgtatccaattcgcgcacacgacgacctataagctgtgttgtttgcgaaccgaaatcaagaattattattttttcctgcatataaatggttggattttaaataaatgatttgcaaaagtagaaaaaagtacgcaatctattattaataataaggagaaaaataaaaggagattcacaggataacgcccggaatctcctcctatattttatcggaattaatctctcttctctttcagtaagtcacgaatttccgtcaacagcacctcttctttcgtaggtgcaggaggagcaggaggtgcggcaggcgcttcctcttttttcttagccgtcagtttcgtaatcaagcgtataaataagaatatagaaaaggctataatcagaaagtcaaaggtagcctgcaagaactggccgtaatccaatgataccgcaggcgcaatctctttgccgtcggctccaatctcagccgccttcattacccatttcaaatccgtaaaattcacaccgccaaccagcaagccgatcggaggcataattacattagcaaccagcgatgatacgatcttgccgaacgccccaccaataaccacaccgacagccatgtcaatgacgtttcctttcattgcaaacgccttaaagtcctgtaaaaatgtactctttcccatcttttttcaatatttaatgtgaatttaatatgcgaatataaaaacatttttgtaattttgcaccgcatttgagaaataaaacaaatgtggagaccgagagatatttgaacaaatattataaaacccttaaaagtttaaacaaaatgattaaagtaggtattaatggattcggacgtatcggacgtttcgttttccgcgctgcaatgaagagaaacgatattcaaatcgtaggtatcaatgacctttgcccggttgattacttggcttacatgttgaagtatgacacaatgcacggtcaattcgacggtactatcgaagcagatgttgaaaacagcaaattgatcgttaacggtcaagctatccgtatcacagctgaaagaaatccggctgacttgaaatggaatgaagtagaagctgaatacgttgtagaatctacaggtttgttcttgagcaaagacaaagctcaggctcatatcgaggctggtgcaaaatatgttgtaatgtcagctccttctaaagatgacactccgatgttcgtttgcggtgtaaacgaaaaaacatacgttaaaggtactcaattcgtatctaacgcttcttgtactactaactgcttggctcctatcgctaaagtattgaacgacaagttcggtatccttgacggtttgatgactacagttcactctacaactgctactcagaaaacagttgacggtccttctatgaaagattggagaggtggtcgtgctgcttctggtaacatcatcccttcttctactggtgctgctaaagctgtaggtaaagttatccctgcattgaacggcaaattgactggtatgtctatgcgtgttccgactttggacgtatctgtagttgacttgacagttaacttggctaaaccggctacttacgctgagatctgcgctgcaatgaaagaagcttctgaaggcgaattgaagggtatcctgggttacactgaagatgcagttgtttcttctgacttcttgggtgacactcgtacttctatctttgatgctaaagctggtatcgctttgactgacacattcgttaaagttgtatcttggtatgacaacgaaatcggttactctaacaaagttcttgatttgatcgctcacatggcatcagttaacgcttaattagaagattaacatataagaaaccgctgcggataaccgtagcggtttttttgtattcattttatatattgttaaaaagcaagcttttatccgcatagtaagctacaattttagtagttttgtgttcttatggaaagattattaataacattgatactaatttgcagcatgagtaatataataaatgcccagaatcctttcttcgggcagtacttgacaccgcacgaaaccgtgccttttgaccgcataaaaaccgagcactatgaacctgctattcttgaaggaatcaagcaacaaaatgcagagataaatgctatcatacagaacccggaaaaagcagacttccgaaatacaatagaagctttcgaacaatccggagagttactggacagagttaccgccgtgttcggcaatatgctcagtgcggaaaccaacgatgacctgcaggcattggcgcaaaaaataatgccgctactcagcgagcatagtaacaatatcacgctgaacgaaaaactctttgcacgtgtaaaagaggtatacaaccaaaaagaaaacttacagctcaatccggaagaaagtaagttgttggaaaatgcctataacagcttcgttcgtcacggcgctaatctagaaggagaagcacgtgaagaataccgtcggttaaccaccgagttaagtaagttgacactgactttcagcgagaacaacttaaaagaaacaaatcgctaccaaatgctgttgacgaaaaaagaaagtcttgccggacttcccgaaattattgtggaagcagctgccgaaacagcgaaaagtgaagataaagaaggatgggcatttacccttcacgcgccaagttatgttccttttatgacctatgccgacaaccgtgatttacggcagaggttatacatggcgtacaatacaaaatgtacgcatgacaacgaattcaacaatatcgagatcgtaaaaaagatagcaaatacgcgcatgaaaatagcgcaattgctgggttacaaggattatgcggaatatacgctcgtaaaacggatggccgaaaacagcgagtctgtatacaagctgcttaaccaactgttggaagcatacacacctaccgcacaacaggaatacaaagaggtacaggagttggcacgtaaagagcaaggagaggattttgtcttaatgccgtgggactggagttattactccaacaagctgaaagataagaaattcaatatcaacgaagaaatgcttcgcccctacttcgaactcgaacaagtaaagaaaggagtattcggacttgcagaaaagttatatggaataactttccgcaaaaacacggagattcctgtttaccataaagatgtagaggcatttgaagtattcgataaagacgggaaattcctggctgtcctgtatactgacttccatccgcgtctaggaaaacgtgccggagcttggatgaccagctacaaagatcaatggatagataagcaaaccggtgaaaacagtcgtccgcacgtatccgttgtaatgaatttcaccaaaccgaccgaaaacaagcctgccctgctgactttcaatgaagtagagacattccttcatgagttcgggcatagcctgcacggtatgtttgccaactctacctataagagtttgagcggaaccaatgtatattgggacttcgtggagctgccttcacaaatcatggagaattttgccatagaaaaggacttcctaaatacatttgcccgccattatcggacaggtgaagctctgccggatgatttaataaaacgattggtagacgcttcaaattttaatgtagcatacgcttgtttgcgacaggtaagtttcggtctgctcgatatggcatggtatacccgcaatacagcctttgaaggggatgtgaaagcctacgagcaggaagcctggaaaaaggcgcagatattgcctgtcatcgaagaagcttgcatgagtacacaattttctcatatcttcgccggtggctatgccgcaggatattacagttataaatgggcggaagtgttggatgcagatgcattctccctgtttaagcagaaaggaatattcaattgtgaaattgccgattcgttccgtaacaacattctatcgaaaggaggaactgagcacccgatggtactttacaaacgtttcagaggacaagaaccgtctattgacgcgttgctaatcagaaatggaataaagaaataagtattaactatgaagaagagtatatttcaaataataggactattattattacttcctttattttcaggatgtaatgattcggatgatgtagccgccatatttacaggaaagacttggaagctaaactatatcactgttgatggagggcacgagatgttcggcttttgggaaaatgaagcggaaaagaagaaaagtatggatgaacttaaaaaaaatggcacatacaatgttatatttgagggtacaactgaagatgatctgattaaaggaaacataagaggaagcgtcatcacttcgtatacccttgccggaacctggagtgcaaacggcaaagacaataagttcaaagccaatatcacggaaggaaaggacggaggcgataaacttgccaaaaattttctggaaggtctcaagaatgcgacatcttacgaaggagacagcaaaaatttataccttttgtataagcctaccggaagtcagcagacctttcgaatggtcttttacgttgttaatcagtaactaatccgacacacaatatggacacagagaagaaacaatcagaacttgacaaacgttatatacgcatggctagcatatgggcggagaactcctattgccaacgccgcaaagtaggagctttaatcgtcaaggataaaatgattatctccgacggatataacggaacgccttccggttttgagaatgtatgtgaagatgaaaacaacgtgacaaagccatacgttctgcatgcggaagcaaatgcgatcaccaaaatagcacgttcaaacaacagcagtgacggtgcaacgatgtatgtcaccgcttctccctgcatcgaatgtgccaaattaatcatacaggcaggtatcaaacgggtggtttactcggagcattatcgcctggaagatggaatagagttattaaagcgggcaggaatcgaagtcatctatacagaaccggatgaaaagcctgcttcggacaaataataagacgaataaataagacgaacgttttaaaaaaggaatagacatgagtacaaaaagctcttcacgttttacacctgtcattatagcaatcagcgtggtaatcggaattcttatcggcacattttatgccaaacatttcgccggtaaccgtttaggtatcatcaatggttcctccaacaagctgaacgcactgttgcgaatcgtagatgaccaatatgtagacactgtaaacatgaccgacctcgtagaaaaagctatgccgcagattcttgccgaacttgatccgcactcaacttatatcccggcacagaacctcgaagaagtcaattcggagttggaaggcagtttcagtggaatcggtattcagttcaccatacagaatgacactattcatgtgaatgcagtcattcagggaggtccttctgaaaaagtgggactgatggcaggcgaccgtatcgtcactgtggacgacagtttatttgtcggcaagaaagtaaccaacgaacgggccatgcgtaccttgaaagggccgaaaggttctcaagtgaaattaggaatcaaacgcatgggagaaaaagacctgttgaacttcaatatcacacgtggagatattcctcaaaatactgtagacgccgcttatatggtgaacgatgacatcggctacataaaagtgagcaagttcggacgtaccactcatgtagagttgctcaacgcattggcacaattgaaccataaaaagtgcaaggggctgattatcgacctgcgtggtaacaccggaggatatatggaagcagctatccgcatggtaaacgaattcttgccggaaggaaaactgatagtatatacgcaaggccgtaaatatccccgtgcagaagaatttgctaacggcacaggcagttgccagaaaatgccactcgtcgtactcattgacgaaggttccgcttctgccagcgagatcttcaccggagctatccaagacaacgatcggggaacagttatcggacgacgctcgttcggcaagggacttgtacagcaacctatcgacttcagtgacggttccgctatccgtctgacgattgcccgctattacactccgtccggacgttgtatccaacgcccatacgaaagtggcaaagaccggaactacgaactggatttatacaaccgttatgagcatggagaatttttctcacgcgacagtatcaagcagaatgaaaaagaacgctataacaccagtctgggacgtaccgtatatggcggcggcggtatcatgccggatatattcgtaccgcaagatactacaggagtcacttcttacctttctacggttatcggtcgcggactgactatccaatttactttccaatataccgacaataaccggaaaaagctcagcgagtacgagacggaagaagaactgttgaattatctccgccgtcaaggactggtagaacagtttgtccgctttgctgacagtaagggagtgaaaagaagaaatatcctgatccaaaagtcgtataagctgttagaaaaaaacatttatggcaacatcatctacaatatgctagggttggaggcttatcttcagtattttaacaagagtgactccactgtcaacaaaggtattgaaatactcgaaaaaggagaagcttttcccaaagcaccgatagctgtggaagaggaagaagcaaccaataaagatggaaagaaaaaagaaactgcgtaaacatatagcaacactgaagacacattataattcagtgttgcggaagtcactatcaacccaaatacttgccgccctcgaagcccatccggcttttagggcggcaagcaccgttttactttactattcattgaaggatgaagtagaaacacatacatttgtacaaaaatggagcaaaaagaaacgtattctactcccggtagtggtagacgatgatttagaattacggatatataccggtcccgaagacatggcaactggaagctatggcatagaagaaccgacgggagaattatttaccgactatgcaaccatagactttatcgctgttcccggagtagcttttgacctgaaaggaaaccgtctaggacggggaaaaggatattacgatcgacttttaccacgcataccatcagcctacaaagcaggtatctgttttccgttccaattagtagaagaagttcctgcggaatctttcgacatccgcatggatattattataaccatcaacgaaaaataatatttgtaataacggtagcccccactttcgtattaagcgcacgtatcagcatttcacgccccatcatcaactcctgccgaagagccgcagaagtgagatgcacatacaaagtctgattacggatataaagattgctggtataagttgccgcaggtcccaagatttcaggccaggcatccaacaatctttgttcattcaacggagactccaaactctcctgacgaagaaattgctgtatcagtttccctatctgttcagcgtcattacgtttcattgttcagcctccatttcgcgaatgattcctttttcaaccaaaaacatcttatagtcactgcccactttatgcaaaatgcgatccagatgttcccgattcgtatccgtaataaagatctgcccgaaattatctccggcaaccaacttcactatctgctccacacgtgaagcgtccagcttatcaaagatatcatccagcaataataaaggaacagtccttccggtacgtttcaaaaaatcaaattgtgccagtttcaaagcaaccagatacgtcttattctgtccttgcgaaccttctttcttgatcgggaactcccctaaaagcatattcagttcatccttatgaattccccgcaaagagaagcccataatcttatcccgttcccggctttgcttcaatacttccaacaaagaagcctcccgcgcatgggaatcgtaagacagtccaacctgttccttatcttgagaaatgaatgaataaaaagactggaatataggaataaactctttgataaacgcctcacgcttcttgaatacaacctcaccggcttgtgccatcatctcctcccacaccagaaagagttcttcttccaccggcagttcgcttttcagcaaagtgttgcgctgcgtcaatgctttattataacggatcaatgcatccaggtattccttatcatactgggaaatcaccacatccataaaccgtcggcgttcatcacttccaccggcaatcagttctgagtcggcaggcgacaccatgaccaaaggcaggaaaccgatgtggtccgaaaaacggctgtattctttcttattccttttgaattgtttcttcgaacggcgtttcattccacaataaatctcttcgggagttccatcctccgcctcatagaaaccttgaataacaaagaagtcctgttcatgacgaatattctgagaatcaatcggattaccggagctcttacagaaagataaaaagtacaccgcatccaacaagttggtctttcccattccattctgtccgaaaaaacagttcagtttagcggagaatcccagctccacctcttccagattcttataattcaatatggatattcgtttcagtatcattgtttacacgttaatttgttcacaaaagtagcaagattttcgtggttttcggaggtaaaataaaaaaagatggctctaaatttcatttgtagatataaaaaaactaattttgcgagtcgaaatatcaaacagtgaataataacaaaaagaatcatataaaaatggcagaacaaaaaaatcagaatgaacatctgaatgtagaagatgcactgacacaatcggaagcgtttcttatcaagtacaaaaacgcaatcatcggcggtgttgttgctgtgattattattatagcaggttttatcatgtacaaaaacctctatgctgaacctcgtgaagaaaaagcacaagctgctcttttcaaaggacaggaatactttgagcaggacgcttttgagcaggctctgaacggtgacagtatcggttatgccggtttcctgaaagtagcggatgactacagtggaacaaaagccgctaacttggcaaaagcatatgcaggtatctgctacgcacaactcggtaaatatgaagatgcagtaaagatgctggatagcttcgatggaagcgaccagatggttgctccggcaatcttgggtgctgccggcaactgctatgcacaacttggacaattagataaagcggcttctactctgctgtcggcagcagacaaagctgacaacaatacactgagcccgatcttcctgttgcaagccggagaaatcctggtaaaacaaggaaaatatgacgatgcagtaaacgcttatactaagattaaggataaatatttccagtcttaccaagcaatggacatcgacaaatacatcgaacaagctaaattgatgaaaaaataataaggctctaaataccttactatatataactaagtatattatactttttagacgcggataacgcagataacgcgaatttcaaaatgaacaaatccgcattatctgcgttatttacgtttaaaagtcaatccccaaaattcaaaatactacttactatggcaacagcttaccataatttatccgaatacgatttcaactctgttccgaacgcagagaatatgaaattcggcattgttgtatctgaatggaacttcaatattacaggtgctttactgaaaggagcggtcgatacattaaaaaaacatggagccaaaaatgaaaatattctggtaaaaaccgtacccggaagtttcgagcttacctttggcgctaatcaaatgatggaaaattgtgatattgatgcaataatcgcaatcggttgcgtaattaaaggagatactccgcattttgattatgtttgcatgggagccactcaaggaattaccgagctaaacgcaactggcgatataccagtaatttacggattaattaccaccaatacaatggagcaagcagaggatcgtgccggtggtaagctgggtaacaaaggagacgaatgtgcaattactgcaataaaaatgattgattttgtttggagtttaaataaatagttgtatctttgcaccgcaattgagaaacaaacctcctcaagagcaaaataaagggcaaataccagagtggccaaatggggcagactgtaaatctgctggcttacgccttcggtggttcgaatccatctttgcccacaaaaattgcggaagtagctcagttgatagagcattagccttccaagctgagggtcgcgggtttgagccccgtcttccgctctctaaagagaatccgagaaattggattctctttttttatatactttagatcacccaaattatgggtcaacgtaacaatggggggtcaacgtaacaatctggggtcaacgtaacaatctgagggattttgtatttaagcatataatttagcaagtctatataagaaaaaagctctatctcttactcctctgaactgtgctctaaatgctttgattttagcattgaatgactctgctgcggcattggttgccctcctttcaaagaaattgattatatccagataatgtgtttgtatagaacgtgcgacccttccaaaggtgaggaaccctgatttatctacttcatcataccaccttgccagccttgtcaaagcaatatccttaaacttacactgatgatagattaagcctaaccgcatagacagataatatcctttctttatatcgggatattccttgaaaagaatttcagcccgtattctttgagactgagtccataaggattccttcttgtaaagcagataaatacttctcgctaacaactgctttcttgtatctccattagcgaaaacaggtgcatgatacatctttccacaggcctttgcataagcaatctgagtggactcttcatccaaagcctcccagcgagcttttacacgcatctcctgcacagcttcataagctaacttctgtacgtgaaagcgatcggtaacacgtttggccgaaggaaagcagatgcgtgcaatctgctccatgttaggagccatatccaaggttatctcgcgcacttggtaacggcggcgacgggagagcttaagcaggacagaagtgaccgtatgaacgtccgtacctttaatgatggcaatcatactacctttaccaccgtgagcttctttattggtcagtacagtatagagttccccacgcgagagggctacctcatcaatacagatataagcaccgatattcttttcgaatagtagccaatcctctgcatgaacaagttggtcccaatggagataaccacttagatggttacggtattgacgctccaataaatccccgtcaactccatataaaacacctaagagcttgcaactgatcggatagctatcaatatagttcttttaaaaaagacgcaaaatcttgcgtcatacgagtaccttcagccaccatacgccagttacgagaaatatactcattatgcttctttaagagccagcgacgacgacgaatattaaggaagaccttcttgccacggagaggaaaatcctgaacaataacagggtcataaaagcctttactctcagtatcctgatctgtatacttctcaggaacgatatttttctcctcaaggtagaacacaacttcatttacactttccttcacatcaacaagatcaaagtagtctaaagtgccttcaggaagaagaaggcgataaccgtttaattccataagctatgaatttggagacaaagataacaatttataaatttacccctcaggtttttacattgacccaagaaaaaagtaatatctattttctagttgaaatatgaataaaattattacttttgacactcaaatgaaaagaggagtaacccttattaaaaaataaaatatgatgaaaagactacttacagttactgcaatcggtctggcactgctaacctggcatgatagctgcacacacccacctaaaactcaagcagctttcgttcccaaagtggcaactcctacccgccccaccgaactgaacagactttccatcgagaacaattcatctccggctgaaatccccgttttcacacatggcggatgaaacaaagtaaatacatttatgaagacagctattccaaaaccctccaaacagagcattatccgtgaagccagagattatgtaatgattgccgtcggcatgattttgtacggcatcggttggacagtattcttactacctaacgatataaccaccggaggagtgccgggtatcgcatctatcgtatattgggctaccggcttccccgtgcaatacacgtatttcgccatcaactttttcttgcttttgcttgcccttaaattattagggttgaagttctgtatcaaaacgatctttggagtattcactttgaccttctttttgtctgttattcaaaagatggcgacaggtatcagtctgcttcacgaccagccgttcatggcatgtgtcataggagcctcgttttgcggaggtggtatcggtgtagccttttcatccaacggaagtacaggcggaacagacattatcgctgccatcatcaacaaatatagagacatcactttaggacgagttgtattaatttgtgatatgattattatctcttccagttattttgtcttaaaagactgggaaaaagtggtgtatggatttgtaactctatatatttgtagtttcgttcttgaccaggtagtgaacagcgcacgccaatccgtacaattctttatcatatccaacaaatatgaagaaatagggcggtgtattaacgaatatccacatcggggagtgacgattatcaatgcaaccggtttttatacgggacgtgaagtgaagatgatgttcgtattagcgaaaaaacgggaatcacctatcatattccggttgattaaagatatagacccgaatgcttttgtttcacaaagtgcagtcatcggagtgtatggagaaggatttgatcatataaaaataaaataaacaagaaatgaaaaaccaatattgaaaaacatgaaatttcgaccaacccccaagttattaacaggcatttttatgggaatcgtttccctgacaacatttaatgcgacggctgaaaacgctgtaaagccttattggcaagacgtgcaagtagttgctgtcaacaaagagtaccctcgtactgtgtttatgacgtatgacaaccgcgacgatgcgctaagcggcaagtttgagcgaagcaaatattaccgcttattgaatggaacatggaagttcttttttgtagattcctataaaaaacttcctgataacattaccgatccgaatatcagcacagaatcgtgggatgatattcaagtacccggtaattgggaagtacaaggacatggaacagccatctacacgaaccacggatacgagttcaaaccgcgtaaccctcagccccctactctgcccgaagcgaatccggtaggagtataccgccggaatatcgacattccctccaattgggacggacgggatatctacctacatctggccggagtcaaatccggtgtatacgtatatatcaacggacaggaagtgggatatagcgaagattccaagaatcccgctgaattccttatcaacaaatatgtgaaacccggcaagaacgtactcaccctaaagatcttccgttggagtacggggtcttatctcgaatgtcaggacttctggcgtataagtggtatcgaacgtgacgtatacctctattcacagcccaaagtggcaatcaaggatttccgggtaacatcgacattggataatacttataaaaatggtatcttcaagttgactatggatatccgcaatacgggttctcaaacttccaaagattatattatcggatataaggtttttgatccgaaaacaaataaggtaatcgccgaaagcgaaaagaattccgcattcaacgccaacagtacgatttctctcttcggacatacggaaatagagatacccgatgtaaagacatggacctcagaacaccccaatctctacaaactgctgatgtatatcaagaacggagagaaaattgtggaaatggttcctttcaatatcggtttccgccgcatcgagattaagccgatcgaacaaaaagccgccaacggacagccgtatgtctgcttattcatcaacggtcaacctctgaaactgaaaggggtgaatatccatgaacacaacccagctacaggacattacgtaccagaggatttgatgcgtcgtgacttcgagctgatgaaacgacataacttgaacagcgtacgtctttgccactatccacaagaccgccgcttctacgaactttgcgacgaatacgggctgtacgtctatgacgaggcaaacatagaaagtcatggaatgtactacgatctccgtaaaggcggcacactaggtaacaaccccgaatggctgaaaccacacatggaccgtacgatcaatatgttcgaacgtaacaaaaactatccgagtgttaccatctggtcattgggcaatgaagctggaaacggatataacttctatcagacttacctatggctgaaagaagcggataagaatatcatggcacgccccgttaactacgaacgtgctcaatgggaatggaactccgatatgtatgttcctcaatatccgggtgccgattggttggaaagtatcggcaaaaacagcagtgaccgccctgtagctccttccgaatatgcgcacgctatgggtaactccaccggaaacctgtggggacagtggcaggctatctataagtatccgaatcttcagggtggatatatttgggactgggtagatcaaggtattctccaaaaagacaaaaacgggaaagaatattgggcatacggaggcgatttcggtgtaaatgcgcccagcgacggtaacttcctttgcaacggtcttgtaaaccccgaccgaagtccgcaccccgcaatggctgaagtgaagtatgtacatcagaatgtaggatttgaagcaacagacatcgcatccggcaaattcaagattaccaatcgtttctacttcactaatctgaaaaaatatcagattcattataatgtggtcgctaacaacaaaatcataagaggcggcaaggtatcattggatatcgaaccgcaagcttccaaagaattcacagtaccggtcaatgggctgaaagcacagccggaaacagaatattttgtcaacttcagcgtaacgacagtggagccggaacctttaattccgattggttatgaaatagcatacgaccagttccaacttcctgttcaggcagaaaaagaaacgtataaagtcagcggacctgcactgagcacatccacacaaggagatgaactcattgtatcgtcttcaaaggtaaatttcgtatttaataagaaaagcggtctggtgacttcctataaagtagacggtactgaatatttcaaagatggattcggtatccaacctaatttctggcgtgctcccaatgacaatgattatggaaacggcgctcccaaacgtttacaagtttggaaagagtcgagcaagaacttccatgtgacggacatcagcatgacgaatgagaataaagtggtttcattaaatgcaacttacttgttggctgccggaaacctttatatagtcacttacaaaatctatccgagcggagtggtcaatgtgaatgccaagtttacttctacggatatgcaagcggcagaaacggaagtttccgaagctacccgcatggctactttcactcccggaagtgatgcagcccgcaaagcagcttccaagttggaggttccacgcataggagtacgtttccgtctgccggctcagatgaataacgtacaatacttcggtcgtggtccggaagaaaattacaccgaccgtaatcacggaacagttgtcggtgtatataagacaacggcagacaaaatgtatttcaactatgttcgtccgcaagaaaacggacatcgcaccgatacacgttggattgccctgtctccggacaaaggcaaggggctggtcattgtagccgacagcttagtcggattcaacgctttacgcaactccatcgaagatttcgattcggaagaagcgcttcctcatccttaccaatggagtaacttcacccccgaagaagttgccaatcacaatgaaaaagcggcacgtaacgttctgagaagaatgcatcatgtcaatgatatcactccaagagacttcgtggaagtatgtgtggatatgaagcaacaaggcgtgggtggctatgacagttggggatcacgtccggaaccaatctatcagattccggccaatcgcgaatacaattggggattcacactcgtccccgtccgttctcccggtcaggccaatgaagccgctaaatatgattatcgataaccttagtataaatttttaaagaaaagacccatgaaagatttatctggcattgtagctaaattcaaagttcaaggcacagtagaagagatcaagcctttaggaacaggacttatcaacgacacctataaagtaaacaccaaagaggtagatgcccccgactatgtcctgcaacgcatcaatcatgctatctttcagaatgtagaaatgcttcaagcaaatatatccgccgttacaggacatatacgcaaaaaactgacagaagcaggcgaagcggatattgaccgcaaggtgttgaacttcctcgaaacggaagaaggcaagacatattggttcgacggtgaaagttactggcgtgtgatggtattcatcccacgtgcaaagacctacgagacggtcaatcccgaatattcaaattatgccggaaaagcattcggcaatttccaggctatgctagccgatattccggaaacactgggagaaacgattcccgacttccacaacatggagttccgtctcaaacaacttcgtgacgctgttgctgcgaatgcggccggaagagtggcagaagtacagtactatctggatgaaatagaaaaacgtgcagacgaaatgtgtaaagcggaacgtctgtatcgggaagggaaactccccaaacgagtctgccattgcgatacgaaagttaataatatgatgttcgacgaagatggcaaagtgttatgtgtcattgatttggatacggtaatgcccagctttatcttctctgactacggtgatttcctccgtacgggagctaatacgggtgacgaggacgacaaggatttggatcgtgtcaacttcaatatggaaatattcaaggcatttacaaaaggctatctggaaggcgccaagtcattcctgactccgatagagatcgagaatcttccttatgcagccgcactattcccttatatgcagtgtgtacggttcttggctgattacatcaatggagatacttactataagattaaatatcccgaacataacttggttcgcaccaaagcacaattcaagttattgcaaagcgtagaagctcacacaccggaaatggtggaattcatcaacgaatgcttaaaaagttgagagtggagaattgagagtggagagtttacctggtaaaagctccattctcccagcgataaacaataggacggcggagaaacggcttcaatttctctgccgtttcttttgacatataatcgggagtggtcaatgtaacggtcagctctgtattctctttattaaagtcagctttcatcagtagcatatctgccggacggctagcctcatcaaattcataaacagctgtcggttccggagtattcaggaaatcgttcaatatcggtaaagtgacaaactgagaagctgcaagcggttgccagtcggtagtataaaagtgaatacggctgtcgcaagcaggagcgcaagccgtagaaatagtacaaataatattcgtcgtatcgttcaacgctaataatttcatttgccacgtagtctgtggagacatctgcatacggatatagtctttacttaaatccgtcatttccgatttcttaccgaatcggttctctacctgtgccctcatcttactttccagaaagtcgatacagtcttcacgatttactttggtcagcagaggactcaaagaatccggcatattcacaaatacggttttagcttcttgcgcctgaagagaagtcatagaaatgctcccggcaacagaaaaaaagatagcgactgctaatttatttattttcatatttatcttatttagtccccaaatataagaaatttggagttattttcaaacaaccatctatatatcaaacaattagcacacacagctcaacaccttcgtaaattattcgtaaaaccgaaagcaaaaatgcgtcattttttagatgattttctatgcaaatatagtgaatactttatagaatagaaacaaagttggctataatcaaaaaaggcagcttatccggctgccttctcttatttcttctccggcttgataaacccgatcggattacgtggcttattcatgactattttactttgatggtttctttttatgagcgattttctttatatcctcatctaattctttaatgctattcaaatgctctttaaaatagttcatggaagaaccggaagtaaaacgctcatcgtttaatgtaaatcctttgataatatattcccgtagccgttgcattgcccaaatacggaactgtgtaccttgatgagatttaacacgatagccgacagatataattacatcaaggttgtaatagttggtatcatattcttttccatcagatgcagttgttcggaaattccgaactactgaatcaatattcaattctccttcctcaaaaatatttttaatatgctcactaatagttgatttagattttccaaacaactcgcatatttgcgcttgagttaaccaaaccgtttctccttaaaacagaacatcaacctttatatgtccgtcctccgatttgcatattactatttctccgtttttcatattcattctactttaatattaatgtcctttccgcagtgagggcaagtgagagaaagaccgtctttctttgatcgtacttcttccggtgaggcaaagagttgccacataggaacattcagtgcattggaaatcttttcgagtgttgggtatgatggcgatactatcatacgagaaagactttcacgtgctatacctaacttatcggcaaggctcgttatagtgaagcccttttctttaattacttctttgattctattcataattagttttttctttttgcaaagatacgtttattatatatgcgtgatatatatgtatcactaaataatgttaacaatgacgattaatatcactatttgttttgtgatgtgatatatataccttacatttgtaacatcaaaaaggaaataaagtaataacaattaaaagataaagattatgaaagcaacaatcgaaatgacaaaagaagcacaggtaagaggtgaatacaaagaaacatctttggacgctcaaaaaaagcaagctgacatgctagtaattgcaattgatgacaaatatacactttggttaaataaacctgtaacagtaaaaggtagaggaatcaaaagggttaatgaaaagacaattgccgttactgataacgcttttgataagctgaaagcagaatacaatataatgtttgacttataattgaccagcagggcgaaagccctgcacgacaatacagaatatgaaacgagaactagaaagcaaaataagttagtgtttagggggcttcggttccggcacattagttgacgccaatcaacaggaaaggggtactatcaagttcccctttctatcttctccctaaacaaccttaactggtcaactgttgggtaaaacgtagggttctcccagttcttaccaatcacaaggatcatcgaatcaagatacttctcgcaatcgagaatcttggcgcatttgtccagttgaaattccccaaccgggtatctcttattgttgagcgtttctttagcccaagaaagcaactcatttatcgagtcgtggtcgtatttcttttcttctgccataatgttagttttcggcaaaggtataaaaaatcccggcatagcatcaaaaaacgtttgtcttatcatcgtcatcctcgggaaatagtaacgacatttgctggtattgcttgggtaatgccacatcaagcatttgcataaactttgggaggctataattacaggcctttgccaaagtttggatagaagccaagtgctctttcaatttaggatgcccaatatcagtcgtaagatattgatgtaatttacccttcctgttcccattttcatttttaggatttactttctttagttcagtaagtaccataggccccaatcgttcataaacaatatcatttatccaatacccaacaacacctgggtgcctatgagttttagaccaactccagttatgtaatttatataacatttcaaagaaactatcatcaaacgttttagcccatcttgcagcctcttgtgaaataaaagttttcaaaaaacgttgcaattcatccttagctcttcctttttctttatcgtaccctgttgcttcgtcaactaaagcgataataccaactttagcgaccgcacgtattatgattgtggcattctttatatactcttcatctatatcaaattgccggtcacatccagcatcaattatagcattgcaaagatctataagcaaagttgcttcatatccatatgtgactgattgtgaaccacctgcattgttccttttaaaaggtatcgggttgtttaatttctctaaagtaccggacaataaattcatctgaatacctttactattaataaatctattgatccaagttcctgatgaatttttagcaccaattgcactttgaataccacgtccggaaaagactctcattccgttttccaacacataacaagggagttctaaattgccaagttttaaaggtgttttatcagacccaaattcagcactaagtatttcttcttcaattatcaagtcagatatagaaatattaagaacatctgatattcgcctaagcatttctttgctagtatttccattaatggctttactcaatccaacttcagtcactcctattttttcagccaactctttttgggtaactcccttttcctttaatacttcctttattctatttttcatatatagtttaattttaccacaaatgtatagaaattaatttaatatatgaaaggatactcaaagaaattaaactgtataataaaaatccccgactacatagccagggacaagcacaaagatataacccttgcaataatcgcaagaggaatcagccaatacaaccacctttctaggcgttccatagcataaccaacagaagccgacagaaatccgagtggtaccggtcatctgcctgtgaaatcaaatcatctatgtagtctttttctctcattttcgcctgttacatatattcctgacaaaatgccccttaatatcttcgacataagtttttcctgcaatgttcacacaagaagttcttcgctatcgggaacatcttctgacctacctcaccggaaagatattgggcttcctccccgtaggggtcaatattgaatgcttgtgagatatgccgacacaagtgccctttttcgtggtcccatgagttttggaactctcccggggaagaagtgagagcaattaccatcacagtctcacgctcctcaaagtccgaatatgtaagaccggtattgagagccccggaagagaggtttctgtatgcctgtttgaaatcttcccctctacaaccgatacggtgaagttcgcatagaatctcactgatccagtaagtcgttacggcataatacaccctaactctccaatcatatttcggtatgtagaaatcctggactatcataaatcagagcatatcatcccacattataggtgtgccacttccgatacaatccgcatagaaacgggtaaaaggaagtccgtcatatccgtctggatcatctatgtaatccttcaagaataatgccaaacgggattcatctgtaatggaactcttataataatcagctttcgccatattggctacatatacgcaatcgtacccggcatctttctccagtttaattccgtattttttcagaagctcctccacctcttcctttttgatcggaacgagcttttccttctgcttggtagtcttgttctcaacttccattttagaaacagcccattcgcacatcttcttagagaagtgccagccgtataatgacagataatttttcattgccgtcggcatcttgtcatacgtatctagtctttgtcccataataattgctttattagaataagaggggatttctcccctcatacgattaatagaactcaccgtttgagcgtctgcgtctgcgctctcccatatctccgtacataggggattccgggaaataacccggcatacgacgctcgttcatgccatcgctgtcgtagcgtccattctcacggaatcccattccaccgccacgcatttcactcatggccttctcataaccatggcggcagccttcacgataagcttcttcgatttcacttttgcctcgcattccgaagtcacgatcatatccatcgtgttcttctcttattgtccacattcccatatcatttcttgtttttagatgtttcggttactcctatttgttccattagccttttgtttaattccataagatctgccatattcttgctcatttccgacatttgccctttcaaagaggcaatctcctgttcttgacgctgtttttcagcaaactctggattcaagagagtaagcatcttgtcgcatccggcaatcacggatttatgtatgtccatgctgtttaggatatctatgcttttttgtttcatagaagctacctcattgttcattgcatctcgtgaacatgataccacaatattcccgttttgaccaaaatcggcaatatccattcctgcagggagattttgaaatgtagtgttttgaccgttgatactaacgacaacatcaactaccatctccatttgggtgagctgtcccactacaggagaggctataggatattttggcttaggggctgaaacgcttactaccggaccatattcaatatatggattggtatctttatgaagtatatacaactggttattggtgcgaagtgactgaaacatattgatttaatttaaatagggtgccaataaactctgacacccgtgttgactacttgtttttacttgacgctgcttctgctgtagcagccggagtagcggtaggtctgtatccgccattaacaaggaacagctcattggtgtacttgttatagtgaatttcataaataccggttccggcaaggtttgcaactgtaataggctcgttgttgtaagccatcaacggtcttgtgtccccattggttccaatcagtacaggaagcgttgtcgctgttcccgcagggataggctggcgaagattaacatagaaacttcctacgtagtcccggttacggaatgcatgattgggaagttccaatgtcacattctctgtaccgaccgttacacccaccgtcggaagggtgttgttattgatccttccaagcgtcggaaacagaaagggaaatcctgtaaaaaagttaggccacatagttacctcctttcttaccggatcaaccccagtagttattacaaccgcatccgccacgtccgtatgctgcgtcaccggcataagcaccgaaggcagcagcacggtaagtatccatgtttacaccgacaatgttagggtattgaaccggaaccgtattgggcaacttgcatttgattccatcaacatcgctttgtaatgcttgcaatcccgctgcaagaggtgcaatctgttgacctactgcatttaaaattgtagcattttggttgcgttgggagatttcagcagtaagagttgccttttccgcagtaagagatgcaatcttgtcctgtaacgcctgattctgcatagcatccaacttggcaatgatagcctgcgtgttagctgttgcactgtcacgcaaagaaagcgtattttgatttgctgtgttgactaatgtattagtctggttgcacattgcaagctgactctcgtatccttgtgtagttacaagttgcttcatgtcgcagcaacagctacagatttgagatgtcagagcgttgttgccctgcataattgcagtaaggatgctgttggtgttctggcccatttggttaccaagcccacagattgcctgtgatacggaattaataccggcaaggatttgatctgaagaagtgttcacggcttgtgccagtgatgcaatgtcgacaccatttcggttaagtgtctgcataatcatctctcttccttcgttcgctccctgattattattgccgccaaagccgaaattgccatttccgaaaatagctgcaatcacaataagcgcaatgatgtcttgaaaaccaccattgttaccaaagaagccaccgttgccattgccgcctccaagcagacccatcaggtaaccggtgtcaacccctctgttttgcaaagacggaagaatagaagcaagcagaccgtttcctgaagccgctccaccgtcctgattaaaaacgtacgttctttccatagagatttatactttttttattacggtcaatattaaccgcatcacaaaagtatataatagagactgcttaaatcagcactcatttgcaagcgatttgcgaatattttgcagatatattgcaatcattttgtttgtatttttacggctctcgaaagtggatataagatagcgtatactggcagatgtcttatgaagtaaagcggctatctgttcaggatatagaccgtattcagtaaggaagaacactacaatagaacgggcatcgacgacttcggtcactttggttgacgaaaggattagttctgtagaaacttcagtttcttttcctacaaggttcaatatttcggcaaaaatctcggacttacacatggtaattaatttttttgttgtacttttgcctttgccaatcaaacttaaggttattgaaagaacaaaagcatgtatagaaatgttaaggatattatacccctggcactatctatacatgcttttgtatgtttaaaagtttgattggcgtcaactttagtgtcgggggttctttttactctaccccccccaaaaaagagctacatttgctacgatatccggccttctactttaccggataaacttattgcttagtattaattaatgtatcattttatcctcctttctttatgaacctttttccattggaaattgttatgtaagtaaaacttaaacttttcataccggaaacggtctgtgaagatagtgccggttaatttctaaacagcttaagcattaatacaatagatagtattataattacgccaacagcccaaccgcccagctctattttcatctgttgccaccgggttagctgtttctccaccggataagggatctgcacagaatcggtcagcataaccgtatctgtcttgttaattgtcagataccggtatttataccgatatttctctttgtagacagtatctccctttacgaacaggaatatactgtcatgctcatagatgctgtcaaaacggatgctatcacgtgtcttgtactccgtcttcacggtctctaccggaacatacttgatgttccggcagcttgtgaagcatattcctgacatcaggaaaatggtcaggatgtataacagacgtttcatgctacctcaacgtaaataccaatcaaatcagagaggttagcgtacaccgcctgtccggtagaacgggtgcacttataggtaactccgtcctgcgaatagtatttgccctcttccaatgccatattgttattgtatgggatcggatcatcctttgttccggcaacggtctcgttgatttcctcatagagagctgcggtgttgatgcttgacggttgattctccaagacgacagcaatattctgccttacccggtagagtttatcgttgtactgcactttcattccggctgttagcgacttgctgataaactcgttccaatacggatacatggacttcactttcaacgcttcgttatcagtcaagttcattgtttgaattccagccttagttatgttcaacaggttttgagctgctgccacctggatgaattccgcactcccttctggttgttcctcttccgtccatgaccattcatcacccgacaggagggcgttcagttccgggctgtcaaaatagtatctcggaaactcttcgtccttgtaaggggacaaatactcttcgtggaggattaccttacttccgtctttactctttctcattgtggggatagccaacagaccgtgctgggctagccattcgattgttactactgcgtatatcatatgttttttaattaattgtttaacttacttcaatgttattctcaatacctataatatcattcagctcctttatttcttcttcactagatatttctgggaatagcataaaatcgaatagagccatttgagcaaaattacctctagcaaatgaagtgccaatattaggagcatattgaactcctatattagcattagctgcagttatattatgagttatattcagtaaatctttatcaataatgtgttcattaagtataccatcaatataagttttaccacctttatttgagtattcataagctattgtcttacctgctgaaacaatagctaagtattgactccaagtatttctttggtcatacaagtatctatcataactttgtaaattcaccttcatcaatacctgcttagcaccatgagccaaagtaggaatggtaatatagtcatccgttccatcaaagcgaatactaccgtcctcatttgctccactttcttccgtgtaggcgaagttattcaatctaccatgattccctttacctgtcaagtccggaatgtagcctagtatcttataagagctgtttggtattcttagagtctgaggggcaagaatacagttcggctcattggctttcttataactatgaggattaacaaagaccatagatttttctactctaatggatgtattccaagaaatagatgtaccattatattgtactccaccgctaacagtatataaatcaggaagaagattagtatgatttacaaaagtaacttcactaccaacttttaacttgtctccccaagtaatactcttaccatcctgacttagattaactattgcaggatacggctgtataatgtcttcaaaccttatgtactcatctatggtgatgtctatcttttgaggggatttggcaataggaatatttcctatattataagctgttttatcaacagaactttttacaaaagtaacattaacgccatttattctaaaactttgtagttcatttaattcattattaagataaatattagctctaagtatagaattaataggtacatagtctccgggatatatttttttatcccagctttgtgtataaaagtctattcttctatattgattattattcttaataataggtctaaactccaccatatccggatacaacgtacccaacttatacttctttagctgtctctctagcaagaactcggagagggagtatgggaagagtaatagtgaccaaagagctagtttgctgtatctattagaattaccaagcttagcaagccaaagcttatcggtatcagttgctgttccggcatttatattaattccattattaacatacttggattgataactaataagtcttttggtgtctactaatttttgaacactacccccaaagctactagattcattagtataatcaaaactgaaagctccttctctaaagtcttcaccttttaaaaatactccaccatttgtagctcctaacatttccctatcagctactaccgtgtaatccttgtatatgggaagattttctactttaccgtaatcatcaataccatcagataccaatgctccttcgtagtcaggaataattgtgacttttactctaacattatcattaattcctccactaacatagaatccactatgtgcagcattttccgttagtggagatcctggaatttcatattccccgtcttctgatatatatttaactgatattgaaccatcagaagctgcaattctatatgcaagtctaccattagtaatagtatcaattccttctgccttaattttaaaagaaggaacctctgtatttttagtattaatctccaagaagttattaccatcaaaatttgcggtaaggacaaaatcacttttgttaacacttacagaggctctgtcagaaaaataattataatctttaaaactaaaaggataactaccaattcctgattgcttatcccagtttaaattatataatttcatattatgcccgttgccggagaagtccacaagctcatcattgaaagaagcgtggttctcattggtgataccctgccggatggtgtcgtagatgatatccggtttaacatgcttgtccaaattgaagtaggatattacctgattgatttggtcggtggttaatactttgttagagacgaatgtccaatagtaggctattggggacacttcacttatggagccactgtatttataaccttgaacaaagaatttatcagtaggatctaatgctgagttaccttctgctgtatagtctttcttatctccaagtatattatttatcagcgtaggaggattgttagtatttatctgtcttgaatacccgtatatacctgtttttccagcagaactacaaatattcctacaaactaagtgagctacactttccgaacgaatattattaatagttgtcagggaagacaaacctatctgatgaatcatactcaccacggtaacctcattgcttcctcccaacatttccttaaccgtcttggtggaagtgattaagtcgtctttaccgtcagtgacgaaggcaccttgatgagagaggatttgggtgatagttatatcacaatctccaattgtagaaccgtctaatttaattatcataaatccataccatccaggtactaaatcgacagatatttcattaactccatttgctaactctttaataatagagccttgattattaatagtacatttcatatcagatgttagccctgatatttttaacttaatattaaacttcctattagttgtagttctattttcaaagaatgctagactattttgaagcggtttctttatacgagttatatgaatgctattggcatttattgtactaacaataccagatttagatattctccatgtagtaaaatcttcttcatacttcccatacccgctattccgcttgtaagccgcattgctaatcacaaacggattgtctgggtccaccaagttcttgattacagccctgtcagggtcgttattgctcttgccgtcacagatacagacagcgaccaaagaagctaatacttccgggtctatgtaaggacgggcggaaccggaagctgctcccggaacgcccaacttaatcgcattgacgcggataggatcaagccctatccggtcaagcctaatcggatttaatcctatcgcttccattattcttcagattcaaagtattgagccttgaggggctgttgtgtagattcgagtttgatatattgacctttctttagaccaacgatagggcgggcgaaaacttcaccacacaaccgggattctaccgactggaatttttcgctgtcgtagctgatataaacccacaatgtgcttcccttttcaaattcaagctgcaagccaatgctttcttgatttacttgtatagagtcgcttacatacttgccttctactacttgattgaatgtaatatcttttaatgccatgattgttcctcctattgattataattttaaaacctgtttcttcacgttgcagctatcatagctgacgtgaacccatgagaagttcttctcatcgatcagctgcgtaaaaggaaggttaagctcctgtacgagattgaatagctttttgttttccgcttttgtattcggagtgccaactatatcagccgccattcctttcatgtgctcgctggtcttgcttcctcctacagccttgtttaatgcttcgcaacggtatccgctcgttacaacgataggtttgccataggcttcccgaagaggatcaagaacgttatctattaaaccatctacattgcagattaacgcttttggcagacggttatcaataccacgtctgtctgccgtttcgctctttaccatttcggctatcgtgaaatactttcccatatctttcctcctataatatcaatgttaatactccgatttgaatcacttgtccgatgaaaccgcctatcagcgtggcggcaatatcgagccaatcccattcgttgccgtatgcacggtccttgaactccatgccgacagccagtcctgccgcaaacaggatggttaacagtgcacctgccgggatggcgtagagcaggtgcttaatacggttactttcatttatccagctcatccttcttcttatccgttatagattcctcaatcgctttctccaactccctgctcttgaagccgaccaatacaagcagcagtttgaacacattgatatccttatggattccctttgtctcacaatagttggatttaatgctttcaagctccgccagacaaccgataaggacaactatcacagaaacaaccaatgcggaaactcccaaaggctcaccgatagccttgccaagaacggcaccaagtatcagcaggcagatataatcaccgcatttaagcaggaagcgtttgacgcaacggctcttccggaactcttcgccacgcttgatggacttgcttactccgtaccacatatccacgattataaggattaagataaagagcatgagccatctcatatcccacatcagagcgtacaactcaccgaaaaatacggatgagctgattgtacgagttaactgaccctttaccatagacaagtaagataaacggtcaacaatgaaattacctcaatccagaacatcggctttctctttatgaaatcggagatgaagttacccgtccaatgcttcttcatggagacaaccatgtaaataatgaatcccgaccataacagaagccaataccaactgttgcagcctacccatatctgggagaatattaaggacatggcggcacctattgcatgaggaaccttttgctccgatttgaagttgggagacacaccgagcacaaccataccgacaaccgaaaggaatacaagaaactggctgttctccgtacttgattccaaagctgccggaagaagcagcacaccggaaccaatcatacacagagcgaaccagaatttgtgtgtcagcgcatagtaggtggcactgattgaataagggatttctttccctttcttaatcatcgcaaagacatagcctgcgatgagaatgaatgataatagtactaatgtaatcatagctttatctgtttttgagtttataatacaaaattgagttgttccgggtatccggttttgtaattgtaggcttccacttgtccggcatcagacaaacctttcacagccgcaatatgtgactgtgtcacattgtagcagtcaagggcgtacaattcaagccggttgagcatttgcagggctgtatcaacaggaataacgtacttctcggcattgtaccaaagcgtggtattcatccgtccggattctttctcgataccgattgagttgaccagcccaacacgggtgtctttgtctaaccatatctgttttccggcaagcgtgaaagagttgacggcatccgacttgtcataggcgttgatttccgctatcttcatctctttcagttcgtcaatcgtatgttcatgctcgaccagtataggatacccgtcggcattctctttaatctctttaccggatgattgaccgtctaataattcttgccaatattcgacacttatttctacacaatccttaatcggataatcaaaaaatccgcttttccaatacatttttttatttaccgccataaccttttatcattaattatttccaacttcctattgctatccatctgaatgactgcgaagaaggggatacacctcccgcatttgcatatcttctataaaccgtaaaatatgaagcatatatagctgcataattcacagaccatatagaattatccgtattatccgtagaactagaaaaagctagggaaaaacaggatttaaaagatactgggaaatttatagactgattatttgaagcaccggcgctaaaatatccccattgtatcagcagaccgttattaaacttagcataaccgttctgaccgagtgatacagtcatggcattggagaggtcggctaaggcatataatgacaagtctgattttaatgccaatttagtttcagttgggatacccgcctctatggaataatcattctggactgtaagtgtcatactacatattgaagaaggatcatccggatttatccaagacaatttcatccaggaaccaacttgaatatcattatccaaaaaatacggactataaatggaaatagggatattcaatcctgaattggccgtatactctccgccatagtgtacatgcattttactataccctccatcgtagtaaagcttctttatattattcgcatcttcattgcttaaaagcaaagatggtctatcaacagttaacaactccggagtatttaagataatgaatttactcgtcgacgatccatttgtactaattctcgacattcccattttttcaagaagtatagtcatattaaacatttgtccgtcttcggaaatttgtgttttctccggactggaattgccggatcgcacatagcattctccattcacgtcaaaatatgagagagaaagtatattatttataaattggataatccaatacggaacacctgaagcattcccgcacgtgaaagtataagtatcgtaaggaacggaataaagttctataattttctgctgttgggttcggaactgctcattatcaactttctgggaaacccctcccggcttgaatcctccttctactctgaattcaaagtattgctgtactccatcaacccaaaaatgattgtcaaagcttgaattattatctttattggaatatttgatcaaacaagtttcctgcaaaagcataggatccgaacaaacagagaaaggttcgcttactatgttagtgtcggagttatcctcccgaatcttcaaagtatatacagaatctttcagacctgttatactcgctgtaaatagacgtgtagtatcattgactctatattcatccaataatatatcattatcctcattggtaatattatcacagatagcagctgatactacatcactataatcatccgagaagatttggatcaatattttatctgtagtgtagaatttttggatatagtctatatcctgttggaattcgttctttaaagggttaaagaacaatgggcaaatgtctcctgttttaatcatacggtcttttcgttcttaattgggtcagagtgccacatgacactgtaccgcaaatatactatttttttgtaaataaatgcaacggattatcaactttttatatctctcacaatcagcgtgtaggtactccctttttctttggctatattcaacgaaagattcttaatatatcccgttatcgcctcgccttgattcgtgaaccttacaagtccggtcagatctgaaggaacatctatgtcgctggtctttatgttgacttccccgactgtaaacaggcgttccgggattaacagatcatccgtttcccttactccatctatggatacatcactgtttccgttagaagatgcaaatttaagcatgccggtacaggctccaatgtattccttattagcctccaacatgaagcgtggggagtaattaaggttaaacatagtgtccgggctcaacagaccggaaagctggtctgccgaataaggcctgtataaaagtaacggctgatccaccggaaccgaattgtcacactccacaaagaaaacatcattatcactatcgttatcggtagtatcctctcctctcttttgaaccaagaactctattccataggcgtcagcacggtacggactgatcaaggatagggtattgtcggtcagtttcaagccggtgctgaattcgttggtaaaccggaactcgtcacgtccattaacactgtcataatcctgcttatcatatcctacctttaccgaagaatatatcaatgaatcattgacagccaactcgtagtcattgatttccatccctaattcattgactaccgtatttgcgaacaaattatcacgatgggtaaacgtcacctcatttccacttatgactggcacatatccgaactccgcttccatccagtcacagaacttcttatacgaagtgtatatttttgcttttggaagtccacgggcgctttcagcagccatgatgtatgtcctttccaatttcaagtttctcgaaccatcgggcataccataattaaaatatcctttgtattcatcactgccatcagtcatgcttttaagaagactgttcaatacggttgtgggagatataacgtcaatattcagaatatttattctggacttaaaattgatattaatcgaaaatttaggaaaaacaatatcagctctgtttgttaactcactattatctctaaattttaccatcattacaaaacatacagattgcccaccttgcaaatcaataggtattgtttcatctatatattgatatccttgattgccttcataggttacttcttttacaattgtcccgtctgtacctctaataccaaatgttaaacgaattacttcaatccatccactataaactgttgcatacaaatccgtcctaaatttcaaatcaatatggatatcagataatgcgtttaaaaatggttttgcattatttaaagttgccccatctgccatcggtgagtcatcaaatagtaatggagaattaagtgagggaagttcactattactcattttatacaaaggcatagaaaaacttacattagtattcaatgtatagatacttataaattgagttccatcctcgaatgatcttgcacctagtgtatatttgccttcatattgaaatttaagcccgtcataatttagctttctaatctgaatgtcagatataggatattcatactgaatactctttttagctttgataatagcggctagcgtattatcaatagcattaatagaaacgacgtaaccatcttctgaataagtagaaaaatcaagtgcgcaccggaatacttcgtcatactcccaattattatttctcaaggagaatataacagaagcagaagcctccatatacctagaccgatattcctttttcagaagtataaaagcattattcacaaattcaaaactcgtagaatatgaccgtaccactccatcatagttagacctcttttgggataattcaaaatcatcccaatttttcaaatcatcggttacatcgtaccttttttctctaatcaaaagctcacatttaaacatggctattttttcttatgaatattcattgattttatatcctcacacatacgttttaccatgaaggcatattcctttgcgctaatttcattcttccggatttgcattccataatgagccatcacagcgacacgttcacggacaaagtagtttttatccatttttacagcactttccgatttttccttagcatttgtacgttcgagcaaatatttactcatagaaagaatagaagcagcttttttacgtatcttatcatgttcggaggggaagtacttgaatccgaaatctgacagtatccgcatagcagcttcccaatcattgtttttaatcataacctcaacgcctttcatacactcaatttttatgtgaaggttgatgatattgtttctttttgacatctccgacaggaaggaagcgcctccgattatttccacatattctgtgacaagtttttccgattgttcggacagttcttcatcggaatatctgcccttaattattagtttgctcttatctcctgtgaatacatctatgaatgtatctagggggattttgtctaggtcggtgtatagcatgttatacgatgatttaatttaaactcaaattctgcttgataaacggttgtattgggaagccctagccattttgcggaatgtcctatttaattttgctattccttcattggttgcttccgtattcctttcgagtctacgataatcgttattaacgttaacaatcaccggatcaccgtcattacttctcctttgcctatccaacataagagcgtcagagtgcaaagacattttgcgataatccaccaaattagggataacccttgccctctttggaatatctaccaatgtaggaacagccggagtgatataggcaccattatccgtttcaatcacttcctgtctacctccatcaccgacaatagccaatcctccgggatggttgtcggttccctttgcatacttggggattggctgggcggcaatcattgcaacttgggcagctcccatggcgccgattacagctgcaagaacagcaccggcaataggtccggcctgcgcaaaggcttgcattattgccagagaggtggcaatagtggtttgcacgatggagtttgctttctgccatttggcctgcctttgctccaattcggctttttgcttttccaattccttgtttttatctgctgttgctttatctgcagcacgttttctagcttctccttcttctttagttataaccccactttctaccaaatcctcaatgcgctctttttcttcttcaccagcttcctcgttcttttccttctcttcttctatttgctcaatgcgggcatcaaaggcagatgtaacaatagaggttattccattaaatagttcaccaaaagcctgcaatatcattgaagctttctctgtaggatctaacttctcccaccatttagaaagagaaaaatcaccagtttctgcaaattgttttgttaatatatcaatgacactataaaatgagctgaataagctggcagtttctcccaaatattcttctgttttatctctcatattagacaaggcatcgatgaatccgtccgcccaatcctgtctatctgatttttctttgccataggtcagatcttcaatatcactattcagctttccaatctctgcctttactttttcaatcttatctttcagagcatcagatttggtgtcagatgaatcaaggacggctaactctgccttcaattgggcttcaagcaattgtaattgtgcctgaatagaatctctggttatttcgtatgtcttttggcggtattccttttcatttatttcacctttcctatattgcaattcgacggcacgaagctgatcttctacagaattttggactatatttgtttctttcttggtattcttctcaattagaccgactctagtcagcatgttcttttctacgatgtcatttctcttcttttcgtatttctcctttatcaagtttacatcttccccattcttacgagcagcctgtatttctgcggatctcaatatctcatttatttgtaactgaatacttaatctttggtctaactcttctttcgaattagtggaaagagcctccaaacggttctgcaaattaactttctctttattttgattatacgtatatatcttttcggagagctcatcttccatggcgacagccagattttccctcgttttaatttcttcctgggtattacctttgacagccgcaatacgtttggtatagttcagacggattttagcaagctcttttcctaacccttcatccattaaatcgagttcagattgctggtattcttgttggatgcggagacgctctttgcgttgcttttcgagttcttttatttctttatcggttaaagttgctccgcctccacttccctcttttggcggatttattataagtttcattttctctatcatttcatcaagagaatcattataagcctgagtctttgttatgtcaaatttaatattagcaaatcccttaaatgcttcatttacattttttatttcatctgtttcatagttaaacatttttgaaaatgcatttttaaaattcattcccaagaatgtggtatttccccagttcttgagtgattgagtatatacacctttggcatgttctaagtttctttcatcagcggctgtaatctctttttgtttacttctaacttcttccaaagacttcaatgtctcttttgccgcttgtacttgagcttcttttatagccttagcattagccacttcctcttttattccttgatctatatatttttgcctgtattcctttcttaattcttctattcttttttgaaactccaactcttgaatttccatttgggtttgtacctctttttgagcatctaattcaaatctagcttctaatgctccggttcgttgctctggttcctttaataactctgcgatttgtcttattctagctgctacccaatctataaaacttttggctggtcctgttccaccgctaaacgataacataagagcctcccatgcagattccaaattagctactgctccctgaacattttcccccatagtattagccatgtcattcaattcactagtaacgcctgttatctgttctctcaatggaactattttatcggcagcagtcaaaaaggcgttgaaagcagcaacactacgtttatcagtcagttctaaagtggtattcaagtcaacgctttgctctttcaattttttcaaaccagcaactaattccggcaatgtatttaccgggcctcctaaagcttttgctaatttaccacttccatccgctaggttcaacaaaatatttctagttgcagtcgcagacatagaagcatcaaatcctgcatctgctagcttccccaacaaagccaaagtatcttctatctgaaaattaaatgctttggcaaccggaccaacaataggcatggcggtttgtaaataagagaaggacaatgcgctttttgttgtagcaactgccattgccgatacataacgttcagtttcagatgtttctgcaccaaacattcttaatgccgctcccgctaaagccgcagcttccggtaaatcggatcccgttgcttgagcaaatttcaatattccttctgttgactggaggatttccttccttgagaatccgagtttggctaattctatttgcaaattagttgcttctgatgcagtatattttgtagccgatcctaatctttgagcatccaaggttaaatctttaatattgtttgatgttgtaccaagtatagcagcaagtttgctattagcagcttcaaaatcaacaatggattgaactcctgatttgaaaagtcctatcaatttttggaatccggatattacagcttgcgctcctatcatcccttttatcatagtgccaacccctattttaacttcggctagcccaacccccatactagattttaataatcctccagtacttttagctagatcacccatgttttttagagaaacatttccttttaggattgaagaagctgcagattcaatatcttgcttataacgcccgacattcatcttagcttgaaccaattcatcagagtttctctttaaaaatgcagtatttctatctattactgaattaaaacgattaaccgttgtttccccttctttagtagttaaatcaagatcttttctagcattacgaagaatcttattttgttcttccgcttgcctcatggtttttatctcttgattaagagcttcatttgcttcttcaatagtatatttggttttcttccgttcctgattaatcagcttttgctgttttaatctttccgtttctgctttttgaacctttaattctgcatcagcatttagttgattagctttagcttcttgaagtataatggaaacattctgtttaccttgctctcccaattttttaagaactgcttcatgctctttctgtaaatcagccagcttattttgggtagtaataagctcattcaagactttgttataattagctgacttattggataaatcctgaaatgacgcaggtttatcctgcatacctttagctaataattcaatgaaatttttgtaggaattgtaggattcgtcaatctcttttttaagattctgtaactgggtgattgccttctgatcgactacatctgtaatttttaattcattagccatataacgtgcgaattaagtaccatgccacttgacacagtttccgcacaaatataaaaagaattggtgaattttacaagctatttagaatcaataaagataagataaaacggcaaaagaaaagcggaggttaagactccgcttctatttatgtgtttagaatatatatatttctgaagaaagattctatatctgccgttttaatagtgccattttgtaaagatgtttttcttaaaagcaaataagcactattgccttcatctgttcggtgttcaaaagtttctgtaccaaaataagtattgaccattatacggtaaaaacgaaaacgtttggtagaacttttatcttcaccaatactattagcacctataaatgcaaaagatgaattattatcactttcaaaataatgtctcattatatatatacagctcattactatccttcttggctcaaaatcatttgtttgaaaactgtatctattatccaagtgagcttgtgatttcagatagaatttaatagcataaacattattttcatatacttctacatctacaagatatatctttccgcttttcattgatttaaagcgccataaatcaattctaatcataccttcagatgtagaaggcttacacataataaattcagatccgtaataaggtggaagaattttcattacggtataagataatcatatacaggtattctgtatgctttatgttccttgatagtaactcttttgaatacgactttatttgaggctttatttatagcctttttaggaaacgtttttgtattggagttattggatttcataatcattatactattgagttgtttatattttcactaattataaaataattcttctactaatagaagcaaaacagcatgaggtactaactacgttaccttctccgacaatagctctcaagggaacctctttttcattgtctaatggttcccagccaagtctctcgcctttagtttttaatatgcgggttctctttttttccagagtctttttacatattcctcttttaagttcacttcccattagtttcttggtttaatgtatgttttatggattactctctatagatttaatgtcaatttataacattttggcttttcccagtatagaacgggcagtctttgcctgtctactataatcaatagtagcacgcttactttcagctttgcttgcagctctaacaaagcttttagcatcatttccttttaaagttgggatacttttaattgctattgccataatctttattaataggtttgttatcatcaacagtattactactatctttgttcgtaacgtattatagttacattactttgatgcgctactttgatagtgcaaatataaataatacaaattaagattgattgattgattgaataattaactatgtctgttattggtttttaacggttttaactctttagaaagaaaaacgcccatctttggatgggcggtaatttgaatttaaaagctctgaatttataaagtcgcagattgtaactctgctccgatattctttatggtatcgagaatcttctttgttgttgattctccagcaaatgccaatccgtttttgtactggcgcatctttgattcgtttattcctgcctttttagcaaactggctcacattaatccaatcaaagtaattaaagaaagattgaagatcgtatttaaaagttacatctatatgccccacttcatcaggaagaacattaccttcttctgcaatcatttcctttgcctctttaatactttccatgaaatcagcttttgcctcttccacacttgaaccatatccgcccaatccgtgattaagcagcatatcatccgaatagatggaatataaaccatctgttcccttttcaataatagcaagtattttcataactctttgtttttgatttgaaatttaaaagccattgaaaatatgttttctcaatttagtaagaaagtagcagggattaaatccccgccatcttcttaatgctctttaatgtgccgtctctcatttcttgactttcatgtcttggtactggaaaagtctgtttggttatcggactataccatatatcatgattagcaccatgacgatgaataaaacagccggccttcgttagcatccttactaactctgatactttcataatttcaatgagcttttaaattcaatacaaaagtaacgtttttgttactacctaccaaataaaacagtaacaaatttgttactacattgattatttaacatttttagctggaaatggggtaaactagaaggaaaagagaagggattagaaacaaaaaccgcccctcttgcgaagggcgggaatgggttacaatgttgactccgagaaatccaattcgtagacaaccttaccgctttcatcccttttgaattttcccacacagataagttcgggaaagtcgggacccgatgtccagaaaggaacggatactgcatctccttcagcaagttccagtgtgctcactagtttttcagcttcttccttacagattttctctaatttttccatactgtccgtatttttaccacaatgaacggcaatttcattttgttggtttgatgttttcatgattttattgtgttatttggttaggaaaattcaatatagtacgcatttgggcatctatttgcaataatgcttcaaattgcgtttccaagcttttaagcattgaatcaatagtattatctgaaggcttgagggactccacctcttccaataacctatcagataagttttcattaaaagatctttccatttgcgccaaataagcttgataagttattcccggcattaaaaactggtttcctgcgttatatttttctataaattccctcaattccgcttgaacttgcagagacaacctttgagtagccttaaattgtattttcaaatgagaaaacttttctttaggcttacgatggaattgatagatgaaagttattatagcaataacaacacctattatagcaattatatccatacgtttatattttatgagtttattatcccattctattattgaaagctaattaaaataagaaacttttccgttttttatatatatacatttcattcccgacttatttctgtatattaactgttctacatcaggagttgtatttaccttatcaggttctccccaagctagctctactagttctttagccattcctacttttattatattgttcattgcggcaatatacatatctccatatttctttttatacatatctcccataaatttaggaatcatataataatgaatgtaatcattagattccattattgtattattaccatttgccaatatcaaactcatttttcctagcttatcatcaaatactatatcaacacatttccaagaacttaatggcactagctctatactctcacctgttttataatccttagttgtattgtttacacgttttttataataaaaatcagcaccaatagtcttcttcttaagcttttcgtaatatcccatgcataaaaatgggaaagttgcagatactcccgtatattcataataaatcgtatcttgcatattttcacattttaattctaaaaaaaagatatactcattggaaagccctgttcccatataaggagtttcaggatattctgcttttctgtatttaacatcaataactttaaacgttttattttccaaaaaatcttttggggtaaaaatactatgtgctttataccgactcgaatgtggaagatatgactcataaaaacccatgtatcctctttccttatctgacggcggtaaaacatacaaatcctgcccttttaatgaaaaaactttttcccctggataattaactaaactatcaaacttttgtttctcatcaaatattcgttctacatgttgagctatttttatttgggaaaaacaaaatccagattgaatacataagataataattgcaaatatttttttcataactatgtgtgttttatgttatacaaataatgacaaaataaccgacaactcttcataaatgcaaacaaatcaacatatatctttacttcgcacgtaaaaaagttgttttttcttgcttttttcaaaaatagtttgtacgtttgcggtgcttaacatatataatatccgatgcgagcgaggcttgcattaatcatgcgagcattttttatgcttgtacttaaaatatttgaggtattactatacccccatgtggaactgtaatggaaccacagcatcggatgtatgtgttaagcagtgggaaaggtagttatacctctttttttattgtttatgcttaacaatacatccaatcatcatcaaacaaataatagtagtttgatggcgacgttaatccacgagacggatagaatgagttcgcttgaaatagctgaactcacagggaagcgtcacgacaatatagttcgtgatatccgcagtttacttaagcagggagtatcacacctcaattttgaggagtcatcctacaagcaaccacagccaagaggaggatacaaagaactcccctgcttcgaactcaccaagaaaggctgtttgatcctcgcctctggttacgacgcagtgctccgtgagaagattattgatcgctgggaacaactcgaactagagaagcgcaaacctcaaactccccaaacctacctcgaagccctgaaagccctcgtatcatcggaagaagaaaagcaacggctagcgcaggagaagaaacaactggaacagcaaaacgccaaactccagccaaaggcagcctttgccgacgcagctttcgccaccgacgacaaggtagacataggaatgtccgccaagattctaaagctcggattcgggcgaaataccctgtttgacaagctaaggaaagcgggcgtattcttcgccaaccgcaacgaacccaaacagaggtttattgatgccggatacttcgagatgaaggagaagttcatcgaacgcaacaaccatccggggtttgtcgtaaccaaagtgctagttacccaaaaggggttggcttatctgaaccacctgtttggcggaaagccttcagacgggaagctagccaggatagtataacacacatcacacatttacagcagtccgtttcaatgccggacagccacaactatatcgaaaaataaaacgaatcacacgaatcacactaataaaaatatatcactatggaattttcagaaattagagaaaagtttgaaggtctgaatgcagaccaagtttgcgaactggcaaagttcggtaaagagattttagaccatgccggaatgttcggcttatcatctgggttgctgaacttgattaaggatattctcaacgcagatgattatgtgtatgatgacaataagtgtacaatcgagacacttatacatattatcagcctagttaatgatttgactgaaaaatgtctgcatgaacgtaaaaccccgtttgggcttacagggctaaaagatgataatgaatacttaggattaaaagaagaaaccaaaatagaagcattataatagattttgtcagggggcttcggtccggcacattagttgacgccaatcaacaggaaagggtagcttttaaagctgccctttctttatgatttacattgccaacagattgatgatgccctgtctaccaattccggtaatctttctatggtagataatatgtccgttgtcagcaacctcttgctttatatcaaaccaaccaagcgtagagtatttagtgtatggtacccatgtctgattaactttgtattgtacgccaagttcttttaaacggttattgagttcaattgccgatttaagccctaattctttagcaacttccgtacatgtataggtcttattgacatgagttagtactgctacctgtttctctgcttcaatacgtgccgaccgttcttcttttagcttagtgagaagctcgattccgaaatccgggttattcaatatctggtcaataacattgtcggtagcgtatatgccatgcttgcggatagaaggtaatacttcgtgtataatccatcttttataaggtctaaccttattgctactgcttagtaaaagcgtatcatacagccctgattcattcacaaatgtagccattgagttacctacaatctccatatccgggtttaggtcgtgtaaatcaatcatttgcacatcttccttttctaatcttgatttaattgatgaaggatttgtcaattcaaccaccttacatatatctgccaagcagaataatggttcttcacttgttccggctacacgaacttcaccgaaagcttcatttttgaaaatctgaatatcattcatacaattttcgtagtgtgtcctttcacacacaggaatataaaaaaaacagcaccgaacgcttgaggatctttcggcactgtttatatattcccaactctatggaaatacttaatatcttatatgcgcttccccaagctgtatcgcactacaaatatagcaagtttttattatttggcaaacaattattttatttttctttcgacggtattttattgttctatttttcctatgttttttgtataacccccgtaatttttctaaccgcacaccctgaatattgtcctattcttcgtattacggatatatatattcgacgaaaacacctttgtaatcttctccctcttttgcataccaaatactgccatcctcttttttgaataggacatacaccgatttctccattttagccgccttctttgcgatttcccgcattttctctatataagcaagccgtttattaccttgacaccagcaactcataatacgccaaattttgaaaagtaattcttaagcgccgggttaagcacatattcgaggaagtattcacgggacttcactcctactcccaatatggcacttccatacttcctttctatatccggtcctatgtcgcttcctctagtttctatcttcaacccctttgaggacgaagagacacgtatagaatcataaaattcccctgttataatgaggttgggagtataaatatccctagccggatacccctggaaagagggagtaggctttgttattctcttcttcatcttagcgtaccccttcgcattgttcttccactttccggcttcatcagtagcaaaccaaggatcgttcaaataagtaggtcgcaatggtttatcattcccatttacacctgaatacaactgctctgtcacaaattccctaacaagagatttgtttgaatccatagtgtgttgaacctctccttcaaacccattaacaaaagctgtcacattatccaatgcttcttttattgtagccatacgcaaattataagataaaagggaaggcaaatgccctcccctcttgaaaacaaaccacttaaataataccctctgaaggagttctgataccgacaatcttgtcgtagatgtcagagaggatattttctttttcagaatccgtacggtcagaaaaaaagaccttgtgtttcgcaatgaactcctttttcttcatcttccgtacctcttcatctacaaaattgattccctcgactttcatgatacccactgttcaataccaaccacaccgttttcctgcaaaactttaggggacttcaaggaaggagtgccggttgccgtgataaccaaatttccattttcaaatttgacagcggacacctctccatcaaagcaagcagatgcaccttccgccaatgccgcaccgaagaaagaggtaacatcaagaccaccaaaatgctctcttagtttataattgttttctcctgtgtcgagttttacgagttcaacatacacaagtcctttcaaggcttccacaacatcgaacttgtatacacgataatctgcgtgcttcacgtatttttcgtaatccttgaacatcgtcccaatagtaaggttagcctccgtaccggatgaatcccagtcttgtccgcccggataaacaccggaaagaggaataccagcaagaatatcggtgccgtcattcattccgtacactacattgttttcatctacgaagtacgcatcaaaagcaacacctttggctgccatgatattcgctttcagactggcatcatattcatccactgtccaaacatcatcctttgcggaatacgatgtaatcttgttaggaccatatccgactgccgctttgttggcttccccaccggaaggtgcatattcaataattgtcttgatcgggaagatacgattcggacggtcatcatgacaagccgcctcaagcaattccgccgtagcatttgcgggaagcttataaccatgcatcgtaagaataatagcctttacttttcccggatcaagcaaacattttgaagtaccggtattaaattgagccataccggcacattctctaaattctgttgccatagcacttaatatttttaattttaatattcaaattctttatctcgatagcatcgatgaaatctctaaatggtttaccgtcagcttccactccctttcttccatatcggtagttttctgtatataaatgaggaattacaccgttatattcattaacaatgtccggagatgaaagtatgctttttatgaaagcatcataaacaggtcgtagaacattgatgaacgacaccctttccctttcttcattaagatactccttccgagtatctaccatgataataaattcaagactggcgtttgggatcttagatgtacgatcctcgatatacggagaatacaggcatataataggaaactttagtttactcgtctcatgcgactgactccattctgttaactgcccggcaatatattcccaatctccaaacatataggaaacattactaccatatattttcgcagtattatctacaatatctctgaatatgtcgtttattgatttcatattcctagtccatttatgagttcaagcatagttgtgttaaaaacaaagccgtcatattccttatctgattccaggaaatcatacaaatcttcattcatctgcaccatattattccaagcagaaatcaaaagaggatttggatccgcctttttgtcatcagaggcatatacagtccctaccggagtttgtactaccccacaccgcctaacatagtgaaaatacacataattagcaattgggctatatcctttacgagaaagcttttctttcaacttttcccatttatcgacatcatttttgcctgatagaagatattcaatgaattcacggctcatacttttccccaagaccattcggaggaactttcgctcgtataaatcgatatacgattggagattatcccgttctgcttttcttgtgattgaatcatcgtctatatcccagattataccgagacttagcaatcctgtaaaatatgagccgtcaataatcattgtttattctcctttcttcttatcttttttcaaaaggtcagagcatccagccttatcggccgcagaagttatttcagaagtttctgaaactacacccatctttacccatttcatcgcaatcggaagagagacgtgggtttcatcccccgacttaaatgcaccgaaatccttttggaatgtaactttgtacacttccgacaagtccatattataagagttgtcgctttttgctttattaatactgcttcttttcatattttacattttaacacgttaagcacttttggttatcgcagtaatcacatttttaaatgtgtcagacacgaatgctgtcttatattgagacttgatataagcaagcattctcttttcacccaagatagtcaccaagtttttggtgaaatcatcattctcccaaccaatgctcatggaaaggacaacataatcacggataaatagataacgaaagtctcccatctggaaagatcctagcttttcgttcggatcttggataacccgaagtcccgtaatcaattcatccccaattttaaatgggcggatataatcaccattgtcgttctttgtgagctgcatattagcataatccaccggattcatacgaatggcattcggagaataagccatattgcttacacttacaatttgagtataagcggccacaatcgcatcatacatattaggggacttggacacttcgattcccgttagagagaatgccggaattgaatcaccaactccttttatctggccaccggaacctgttccattgaatattccatcttcttctttcaagccaatcttattgataatctcggcttcaatttctctttccaattgcggaatatcttgtaagacttcggttgtaaccttggctgtcaaagctacctttccggcagaaacggtaacagtctccacagatgctgtcattgaaggttttaaacttccttcgggaacccatgcggcatcaccggtaacatctttcaattcagcatatactacagacggagtagaaatacttgctacattagccacgtcacggatagaagcacgtttacgaggggctacactgatttgatcgtcaattgtaattccaccggcaacaggacttcctcctgtagtcattacaggagcagatgatttcactacgacatcaaatttaactccgccctttttctttagagcttcaacatcaatcgttttgactccgttaatctcggttacaaaacctttgcaggcatcagcaatttgttctccaagagacttaaatctaatatcgcctccctttgttttttcggtcgcagctttgatccggacgattgtttcttcaaatgatttcaagcgttcgttgatagatttgctgtcagcaaatcctttcacctcgtttttcagttcatcgatagccttagttgcattttcaattgactctttcatagacttagaatcaatctcgtctttaacaaactggtcgaaaagagcctccatgtagtcatccaaccccttggaaaacacttcaaaaaccttagattcgtcttcggacaatcctttagtatcaaggaaatccttaaactcaacctttttcacttcttttcccatacttactttaattttaaattttcaaacattgattttaccttattgccgtgcatgtcggcttcctctccttcaggtgtaggctctttccgaatctccggcctgaatgacgcaagtgacattgcttttgatataattctttgtatcttttgctgtttggatgcaggcattcctgaacacacttctgatatttcggtatttagttcttcataagctttttcgacatcctctatggattttagccccaaatattctgtttccccattgcaaccgatagagactaccgatatttcataaagctttacctctttcactatgaaagcgtctttttccgcatcgtattcgcaattctcccacacatactgatatccgattgagaattggtttaaagttccggattcgagctgttttattgcctgttctcccctcgggacttcatctatttttgcttcgaaataaagtcctttttcatcttcatttaatactgcaatccggcctataggctcattcatattatgcatccaaagcataattatcttatcgttagccgggctttccggccctctgtcctggatgctcttggaaaaacatccttttatcagaatatcacccgctttgtccttgttcccaaaaatggcggcatatccgctaatggtacggctttcattgtcgtagtttacttcttttgcataaatagagaatgtcttatactgcatccccattcttccgctatatttattagttttgtccattttcaatagagttattagtttttaattcaccttttggattatcaggatcgatatctataaactttgccagctcattcctggattcatcaagagttatctgacctttttcaactaattgaattaaagaagaagccattttctgaaaagcggaagaagatgcggacttgtctttctgaaggcaatcaatatgagtataatccaactttataaaaacacctttgggacaaattgcgtctgtcaaagcctctgacactttttctgaatcaggaataataagaccttggtaagcggacttttccgctatgcttttgttgtcatatttagattcatcaaataaactataatcaatacctatcgcattgcatatctttctgctacaccgcttatcctcttcgtgaagtttaagctgggacgcatcataatttaagggaatccatccaagttttatctttgacgtcaggataggaaatttattgagaataccatatttttcttttagtttagattccaatatttctttttcctctggtgtcatagcctgattacccatcttatcggtataatcagaataaataatacctttgggaccaccatttacaattaactgataactggctgccattgctgcaatccagttattaattggcatagaaagggagtctgtaaccgaagagaattctatatcctgattagagccattaacttttgcagaactatcgtaaattacaaaataatcttcgtcggataattcttcttgcaaaccattccattcaagataaactctagaaacaatatcttctatatcatactggcgaaataatttcccggaagaaaccatgtgaaatatctgtgcaggtatgacatacattgcgagtggagatgagttttttgctgctcttacagtgaaaatgggacaatatccgaaaagcttaagagacatctcaatctctttaaagaatccagctcttgtttgaagtgggttaggacgcgatagcaattttctaatatcattatattcctctttctcattcccatccttgtctgtgacatatattctcccattcgcaaaaagagaacctattttatttataacagtagagaatggggtgcatacaagaagagaatctgctttatccttatccaaggttagattataatcatttttgatgtcaccagatggcgagaagaaattggtaagatacaagaaattcccattagaatccttttcaatagcttttactgtctctctcattgagggaacagatatattaatttttttttgaaaccaatttcctaatttagacataaaaagaatgattatctgatttgagataaccattccctacgaaatgaagaggtctttacggacaaaaatactaacgaaaaatccgatagtataaaaattataggttccgtgcatcttcacacgaagggattgttatcctcaccgcaaatatagaaataatttctatttagtccaaataaaaatagataattattattcgtaattatatcacttttgaagattttgcacgagcgcacacgcaagataatacatacatgccttcaaagctgttaataccatcataatcagacatgttagcgattaatgcagaaaatgaatcatcggattctgggaagtagattgttttaataatcgatttatacgattcaatcatagttttcttatctgttgattcttctcttacccacaaatcatgatctataagcttcctataatcgtctgcgtaatgtttcatttctacgggaatctccatttgtacattcccgtctgttttattaataagttggtcaacagatattagcgaatcggagaacaagcagtcaatcatgaatatctttccgccaacaacgcaataagaaaccattataaacaatccgtttatattggggtgtatttcaacaaatatttgattatttacccctatttcctctttcttgtagtacagaatatctacctcacctctcatctccacagttcctgtaagagcgtcgcatgcgtcatcgtgagcgtttttcccccttttcctgtatgttttcagttgagacgcaaattccggccacctcctttcccaatcagcagggaaataagtaaggttcatcacctcggaagatctggtaaagatccgaacctctttgttttttgactgatgaaaccagcttacttgagtcttggagttgccaatcatccgcatttgtttctctacattccgggcaaatccccttcctccattattgctttctatatttgccttggatatttggtctttagtgagcattttagcagtttccggttcggtaaattccatctccttttgtgtaaaaaggacatcaagaatgaaattccctatctctgtatcgatataatcaatagaacataaataatcgcttccggtatcggctgtatctgtatagtttttccttattgctctattggttatcggaatagcctcataagtcttaaactttccatacattaagccttccataggagttggattctgcatatattgagtttcaaaaacatagctattcaccctctgcatcctatgcaactcttctatggtatgtttaaactcccataaagctttctccttgccattttcatatattattgccggaagagataagacagtccattctcccggctctgtttccatcaaatacccgcaaagatcatgctcatgaagtctttgcataatgattataataggggtattccgtgagtttacacggtttcttatagttgtttcaaaccgttggtttaccttttctcttggagtgtccgatattgcatcttcaggtttaaccgggtcgtcaataatcaatgcacctgcaaatttagatgacggtttgaactcttctaattctttggatagatcgttttcatcatcgactgcaccagcaccaaaacctgtgacttgtcccccagaagctgttgcgtacattcccccgccttctgttgtataccacttcttttttgcatcgcttgttttctttatgtctacataagggaatacacgcttatattcttccgacttaactatatctcttacctcttctgaattatcattggccagatcatctgaataagataaatgaaggaatttggcagaaggattgactgcaagaccatatgaaataaagtttttaaccactaattccgtttttgaatatctgggagctatatttattatcagcttttttattttcccatcaatcacatcatcaagagcctggcatatctttacatgatggtcatttactacaaatttgcgaccgaatcttactttaaagaaatatctcgtatagtttaacgtccctgataggcaaaacgcccgtatataatcatacccttcccccatcataagtcttctattattcgtttggcttcctctttagtcataggagatatcatgttcacattgacgtcttgcggagaatcaaaaccaagcattttgcaaagtcgttggatagtccatgtacgcccattcagttttatttcaatcccctctttcccctgtttcacgctttcgacttgcattgccatttcgtcagtccagtcttcactatctttgaaagtaacattgccgtcctttatggtaaggaaattacgtatatcagcatacataaaacttcttagcatcttcaatacttcttcttttgtaatgtctgatttcttctttagctcttcttgaagctcttttatcctttgggaaacctttgggttatttaatagtttagatgattcttcccaaatttgtttttccttcatctttgagcaagaatatgcacgcctataagcctcggacgcatttccacactcaatatagtaattgcaaaaattttcctgtttaactgatagcttcatggtcttttcgtctgattagctacatgccacttgacatgtagcacaaagttaataatttcctgtttattactttacactcctcccccatattttcgcattatacatggaataagcccataattcaatctcccagtctttttctaggaatttctctctcatggctgattcaaagcagtcagccagtaggttgttgtctatttcttggtccataatctgatttacatttaaaaaacttccccaaacatcaaaaagacatttggggaatcagcttgatttaacttgcactattaataatacttcgttcaatcaaaggaagtatatcacacttcttcagcgtctcatagataaataaacgtcctcgctgtgtccattccgtattcattttaacgtcaggccgaccatctttgtgtgtgatgttcaccgatttgctgtgcacatatccacttgacatataaggagcatatagaatccattgcccatttacctttcgttgtattcctttatctgccaaaaggcgattgaatgcctttgcgctcataccgtaatcttgcgctatctgtgttgttacaaccgttcctctactggataatataatttcaagataatcggttttcttcttcatctcgacaatctctgtgctcatacaggatatttgcttttgctgctcttcaatttgaagctgctgttgtgccgctaacattagggcttcactaaaagacgaagggacttgatatgcaggggtagctttacctgtttctaaggcatcccaacgaagaactaactttgcccttgtttcatcattaaattttgctgcgacatacatacattctttatagtcaagttcatagcatggtctcatttcacctttcgaatcacgatattcaacgagcgcaaaattacgcccgttaattttttcccatgcaggttccatatcacggatggaacgcataacgtctttatgatttctacctgcaagttctgctatttcaagagaactcatagtctttttattacttagtattaaattgttcatagtttatgctttaaatatcagataataggaactccatacaatccttatgtggatcgtcgggatgataattgttgcagaactctgcaaactcgttgagaagattgtgggacaatataaagaagtaagcctcattcttggcattcttctctatttcaaatttacgataagatacacgctttcgtggtgcggacgtagatgtagaagttactgcgcttcgcttcttctctaatttcataggacttggcatgttatgaaatttgagttattaaaaataagaaaggctatcgcctcacgaaccgccaagtccaagttattacataattgtagtaacccatgtgagtgatagcccctatatctttgcaatataaacgcaatgcatagccacaaaaatagctactacaaattatgtctaaatacatgaacttggcgtgttcaccgcaaagataactcaaattctcaaaatgccaaacaaattataaacttatatcattttcaggaataaatcacttttccactcttcttttaaaattatcgaattcaatctcaatacacttgcttatcttgtcagcttcctcgtagcgttcaattactactgtatttttcttatcataattactcatacgggcacatttaccatcacatgacatatttatatgcacattgttggcaactcccgtaataattgattttttatagcattgaccgctgtatgggctgtaatgcctgcatagttgcctgtattcttctcggttcattttattcctccgttttaagttcttccaatattttcttcactatctcatagtgagtcaaatcccaatcagaacaaatatcatccgcttcatcatcgtaatgattggcgtatacgtatgagcccaattcttccctaaactgttctccgcataatccattgtcatcacaatcatcgtacattctcaattcatgggcaacttccttacattcttgatgtgtgataaagtcatacacgactccgtcatatacatttgtctggcgaacatatttttgccctatcgctatcttttcgcaacaaaactcgcatacatgttctttcttggctgttggataagtttcttttagtattgttggcatggctattcctccttttctttaaagtgttcgattagctcttctacggtagccttatgactacaatggaaccatgccgcctgtacactatctttaatattttctcgtgcataattgatgtcatcgtcatcgcatataaaccaaatattttcaggaggatatacaaaccattgtgaatcgtcagtatcgtctctcaatgtagcaatagccaagaaaagttcttcgttggttccgcaatcaataaattccccacataagaggctgtgtttatcaaaaggaatatcaaaagaatttgcaatcacataattaggagtatcaaatcctttcactggatattgataagcccatattatactgcaattatccgtccatattggggaatttttaacataccccaactcctccaacttcttccgaagttccggtgtatttttgcgtataaagcacggtgttgtaaatcccatagttattcctccttatctatcttaatatctgttactttaccacgattgacaaagcagaaacaacccatcacatcgcacagatatgcttcattcttcatctcacactcattgcattctttattcaacgaacatttactgcaatcgaaatttatattgaacgattcactcatttcatgcagcactccatttattattattccgttctttatttccatattcaatctccttttttatccatataattctttgtaaaagcgatgattgtctctaaaaaaataggggttgcattactagatataatacacttacctccattgtttccgatttcgtgtctttggattgaaaagaacgcatactcctttttagtgagtgcgtaccaagctacttttattcgttcaatcatatatcaatctcctttctctttaatccgttctagtacatccctgttggcttcgagtatttcatcgaaagaggggatgggcatccacaaatcatcatcagatatattacatgaataatcatcaccatccgaagtatcccatacatgatagtatttgttatatacaagaatttcgggttcacaatgcccgctaatctttactaatacaggttcgctctgctctgaaattttttcttcgtctactggcggcaatcgttctttcacgcttatccacggggattgctttgcctgccattctgcaccttctttaaatcctattctgaaacattctaatcgactccaatcaggatgtacgccgctgatactatttacagcttcttctaatgtctgtttcatatctgttcttgttttaatctattccacttttactttaaatggaagaggataaccgccaatcaaacgattatagatatcttcccagcagtacggcatattggcgttatttgccaattcctttgctatctcttgtaatctttccttgctcatatctatcttgatttgaattatatatacttttcactttccgatataattcctcttgcctctttgtaaatggcatgaaagaatgattaagccaacgacatatataatagcatttatcatcagagcaatctctattttcatttgaaataatccaatctaactttaaacttcctttttctcttgctataataaaagtgtctattagttttggatatttcatcagtcctatgtaattggaggtaaagttagcttttggacatacgatacaaccgacacgacttttgtattgatattctggattgacaggcagattgtatctgcgaatgtaatcccaaacttctttatccgtccaatcaatgatgggcttcaactgaattacacttgacgtcccagtggactggcaatgttcctcgaagtactcatcgaacaaagccttgttgcgtttcatcacggtcttgttttttacctcgaacgcagtccgtcctcttctcttcgcactctcctgcttacgtacgccgacaatggagcaggcattaacgaatttcctgttgtgtttgtagtcttcgcagcagtaagcggattgtacagtggggaggaaacctttatggttcacacggatgttgcggataaagccttccttgacttctcttcggaaagtaacattcggataattatcacggataaaacggatggtggtgctactctcgaagcagtggttgaagtacgccgtgaacgctatgccgctacgcttacataagtcatagcacacttgactatccttaccaccggagaagcctaactgcacctcaaatcccattgttcttgatatctttgcgaatttccgtattcgctcaatggcttgttgttctatttcatctgcaaataagttcattactgatttgttttactctaattaaaatacacctccatcacaggcgttaagaataatttctactattctatcacttttcattcttccattttcgcccacttcatcattatcatccttatcaagtttcaagatatttaaatttccatcagcaaagagaatcagattcttaggtttctttcggattaacttcttcagctccttaatccattcctcttctttcttcgttagtttgattatttccataatgttccttattatatcgatttgaatcacttttttattacaactgccatagtgctaacagtcgttccactttccttgaattcacctgctccgatttcaaaaacttctccatgaacctcttccaaccatttccggaactcaacacatttcttttcagatgcgaatttccaatgctggctggtaatagcagcaagagttccaccttcttccaagcgttcatacataagccttacatggtcaatatcctgattaccggaaaacggaggattagcaataattttagtgtaatgtcctacactatctttcgtaaaatcttcatcaagcaatattacgttatcaagtgcatgaagaaactctctgttttccggcatcagttcatagcattcaactgttactgacgggcacgacctatgaatcgcttttatcagagcgccacgtccggcactcggctctaatactgtatcatcctcatatatccctccggcaagcataaccagccagtcggcaacatcagcaggcgtttcaaagaattgaaaatctttttgtaaatcgcatcgcttaccttctttcaagatggagaacacacgttccggattaaaagggaatgtaaatccctgtatcttatctccctgccatgagccgccagcttcttctatccatttctttgcttcagcataggatttcttattgaattgtactttcggaagtttaagaacactatcctcaagagtacaatgcttcaatatttcttccacattccatttcttaccttcatcagcctgctttttcttttcgtcggccggagcatccggcgctaacagtgaagatattttttctacaaccatattgctcgcatccatgaaggcattgacgcaagatagtgcttccatgagaaattcagtatcaacatatccggcagcgtcataaacatctataccttcagtcatattcgacaattcattgagctgagctacactaccacgtaacgtttttattaaagtctctttgttgttcatcataacttttctgtaaataaattcttgtcgtatctacactaccatgaccgagaaggtctgctaattgaattacatctttggttttcttcaggaacattttagcaaagaagtgccggaaggcgtgagcgtgcattttttttgaatcgataccgcaatgtttaccccatgctttcaggtgctgagaaaaacctctttgagtcaacggtccgaatctcccgacagcaagagtaccggatttgcctgtctcctttatatagtccttcacctccctctgcaattgcttctggaaaaagaaacgtcgatacttgttccctttccctttcagaacaacttcaccggtcgctatatcctcccacgtgaattgctgaaactccgagagccgggcccctgtagtacccaataccttaatgaagaaatagtaatccttgttgagttttgttttaagatactccagtaaccgattatattcatcttcggtaggaacattagaaatatctaacttacgtttcattttaggcctcttcaattctatcggctttttcatccatttagagaacttctcaatggctgtaatacgtaatcgaatggtggcaggagagagcttcgcctcttcaaggctttttataaatcgcctgcaattctccatattcagttcattggcgtattcgaagtattgcttaagagaggtgtgatagatatcaactgtatgtgatgaataatcattgttatcagtcaaccatattatgaaatcatggagcagtttcttatttttctctgaaataacctcaagtttctccaaaggttttacagccttttcccgtcggccatatccgattttaagataagacaataaatcacaaacagccgcacacataaacgaatggcgcaccatagcatccgcatttttatgtttatatttcaaataaccgcggcgattgatttcttcggcgctctcaagaaaatccgttacatacttgatatacttgccaatggaatcatagttctttcctgttgtatacaggtatgatatgtaatctaccaatatttgttttcgtttatcatccatttccatttaatatcaaatcacaccaggtattatcattctcaaagaaccactcaaaaccacaagctttgtgtttgccgggtttcttatggcagatataactaatcaaggacgggctgacccctgttgccttgcctgcatcttgaatagaagggaagataccacacagttgaccattttttatagctactacacttttccgattcatgccagcacccgtcttgtgccatgctccacgtcctttttccaaattctttaagcatctacgtttactccatcttgaatggaatttcaacttcttccccttgttatgaggggtgtgacctttcaggaacctgccatttaccaaattccttgtagggcgttctatgggtatatataattcactcatttctttcttatttagaggtatttctttaattcttctcgatctataaaaaaggcacatgcaatatacttacctggtaaccccattgtttgggcgaatgcatcatctccgcaaactttttcaaccccaaaaccaacgattgagccgcgcggatcatctttaacatcgactatcgtagtggtcattctcaaacctttattgtcatctgctgccattctcttaatagcatctagaattttattaccatcactattcatttctatcttgttatgaatatcaattatcaaatatatgcgcaaacacactcttctcatcagccagctccaacccaagctgtgaagggaaccgcttgatgtaattataaaactcgaacatcttcttatcatcgtctccgcaccggtctaccaacaatctgataaacgcaagaaggcaatcggagtcgtttccaaagttctcctgtgtggagaactgggttttgtcaacgtcctgtttcaatttacgaatagaagctatagctgtgttgaaattgcgtttcgcatcgtggcgcaactcatagccttgcttccccatttcacttctcaaatcatagagaagggtttctacaacatctgtcaacacataggttaagttgagggtagtattaagatttgttgttcctactaacatagctttacttgtttcttatttggataaatccacgtttttctgtctctctaaggagttccatatcttcttccttgatatcacagggagtctcaccgtttacggtagtatagtccggaatattaaacttatccctgattttctttttgattctagggatgtctttaggatcaagatgctttgttttccaatagatagttactttcatgattcttgcttactataaaattcttctaattgcattttatgcttttcaaactttcttttggctagctcatccattaaactgttagatatacgcaaagcattgatagcagattcatccccagatgctgcacgcttttcaagttccgtcctatactcttcatagaacataccggacataggctttaactcatcctctatatgcgatttatgctcattccaagactgggtgtcggcagcagcacatcgttctttgttatactcacgaagccaactcataatcacctgcccatcaatacgattgtatattcgtccgtatttcatcttcatggcatttttaaaacagagcttcaagtcgtccattttgaaatacggatattcctccataatcaaatcaacggttatagctacctgaacatcagacatggtttcagtagcattgaaaaactccaaagcatcggcaagtaaaaaaacaacggctgctcttgactttgtttctccaagtatctttgtgattgttcctattgctggttctgaacttaaaaatacatcttcaatcgttttggggcgaagcatcttgcagtattgctccggcgaggtttttaaggcgaccaaccgactctcttcttgtggcagcagtatcagttcgttttccattgtaattaccttctaaaattttagtataatttgcttgtttaaatatccaatcaaagttacacttccagttgcggtcatttcctccaagaagaaagggactctgaagaacaagattgaaagctgttctgacggattctttgccatattgggatatccgggcttttacggctttctttctatcctcggtcattgactttatctgctgaagtttgtctttgaatgtagcgttatagtattccatcaatccattgtaatcaaccttttcagagagggagagcgaagaaagcttgtctttctttgatactccgttaggagtattttctttcttttgattattaagagacatatctatgtactctctttctttatctttctttgtatttgtgccctccgtgtgccctaatttttgtgaaaattcaaattgtggcgggttattattcataggctgtgccgcaagttgtgcccttagttgtgcccattcttcttttaaactattgatttccatgttaatatccgtgcccttgattgcgtccttagttgtgcctacatcgttatattcgtcatatttgcacaatgttatgatattgatgccttgcgtacattcagaagttatcatgccttctttccgtaggtgctccaaaaaagaacggactttcttttctgaccattgccaacgttttgctaaaaacctaatggatgctgggtattgcccacgattatagatcacctctcgacctccgatacactcctttcggggcgttgcatcaaatcgtgctgactgtattaagtctaaccacgcttcgcaactgctaaatgtccgggcttcattccacattatattcgagaagaacctgcggcttagttttataaatcctttatcgttttccatttgcttagaatctcacgtttgttaattgtcttcctttagagcaaactacccatttaccattaccgctatcaaacaaccgtaaatcagagacttcgccaaaacgtttgatattaccgcataaatccacaatccagccgtattttttggaagggtgggggcggatagcccgaccgattatctgataccacatggcaagtgacatcgtaggacgtgccataacgaccgtatcaagttccggatagtcaaagccagtcgtaagtacacccacattggctactaccgaaatctcaccagctttgaacgcctcaagaatatgttcacgttctttcttaggagtatcacctgaaacgatagcgcaaccgggtatagaccaggttaaccgttcggcttctttcaagaaccgggtaaacactaaaatacctttccgctttcctccggctttgggattcatcagcctttggacgatatgaacgagataaccgtagaagtctatccgttcatattctctttgaactgacctatctgtatagtcggcaccagtggtatttactttcaaattgagttcgttccatccaataggattcataggataataatttagttttgctaaatatcccaaatctaatagggttgatacctgtacatggtaaatgacctctgaaaaaacatgcggctttgtccgggtgatgaatttcagcatagagccgaaatcacggctagagcttaaacggtatggtgttgcagtcaagccaagaaccttgcactttaccgcatcaaagaaatccttgtacattccctctttagggtttacaaggtggcattcatcaactattacgtttctgaaatgcaggaacagttcgggatgagcttttactgacccaatggtggcgaatgttatccggcttatctccttggaattaaaagaagccgagtagatggagcagtcaagtacgccatacgaacagagcttcttaaaattttgctcgagtatttccttgctgggctgaaagactaaggtgtgcccgtctaagcgattggcgatgtcggcaatgatgagcgatttgcctgaacctgttgggagtaccatgatagcgtttgtcttctttgccttgttattgaaaaaagaaacggctgcatcagaggctttttgctggtaatcacgtagtttgtacatatctatcttctgatttaatgataaaaggggaatcctcactaagtttggaaagaaatgtccggattatataagcctgttccttacttaatccaaccggagagaatgaaccatcattattcttgaccatcatgacaaatgttcctgattccaaatcattcataaccctttctcctttcgtaacttcttattaagtgctttgtaatacttgattagctgttcatactcaaaatcagcgaacttccggctaatagcctgctttgcttcgagtaggataactctctgttcaccatacttggcaatcaagccctttcgatagttctgaatgttaccttccatgaagcgattacagtgcctacattgagcgttgcagttcatttcatcgaaacgggtgttcatgtgttggcgatttatgtaatgcccgttatcagcttgttcaaagggctttatttgaccgcaagagatacatctaaaatacccgtttggcattgcatcacgaagccggataaaaagggaaaactccttgtcgagcttagctttcaaatccggcttcttctttattgtcacccctgctttatcaaacaagggtaaaggcttgtctttcttcttagcctttcgttttatgtaatatggcataattcattgtcatttaatcattgaatagggaagtttgatttatttcagcacgttttctgctgataagtatcctattcttataggattttatcagtctctctatattcgttaacaaagggattacgctataattctccaaatcggaaataaacagttctatatccaacgctgattttaaattattgaatatatgcttgtgaatattattctttaactctaacggatcgacttcctctttttcttcttcgaatgatatataactgcttacagataatgaatacccattatcttctatctcacttatgggaacaagcctacttaaattgcgctcatggtctataaactcaatattggtagtactcttatttttcctgaaaacgattaaagcggtactgattgcagtatcttcaaaatatcctccctctatgtgtacaactttttctatccaattattctgtataatccattttcttatctcgccttcgcgccccccacggtaaagtacaccgggaaaattcaatacagccgcagtcccatgttcggaaagcatataaagtatatgcaatataaaagcataatcggctttcgattcggttggtattgtcggagcgttcttaaatcgttcatctgcttctgacggggaagaccactttatggaaaatggagggttcgcaacgatggcatcgaatttccgctccataaaagccggggcttttaatgtgtcccctgcataccctgtaaaattcacaagcatttctttggcgacttccaattgttcaggatttatttcttgcccgaattttttcacatcgtcagcaaatacggacagcaaggaaccgtttccgcaagtcgggtcatacacttcccttacatcatcacctataaatgatttgatgtatcgggataatttttcatccgtatagaatacgcctttggacttaaactgctttctgatttcttttacactatatcccattgatgttgttaattaaatttgtttaccattccgtcaagccaacttcgcacatttgagaatgatgtcgaacgcatcctgtaacgcttaccgcaataatgaatctcaccaacccacctgatacgccccgaagccaccaaacccacacccctgacacggcgcatacatccgcgaccgcttgattccctctttcctatgtttcgttggaactccttgtagatacatcctgttcttttcataatctttacgttttcagttgtggaaaagcccggactcgaaccgggacgaactttctgatttgagtaacccttccggctgggtaaagctccagtactcgtcgtgcgtctaccaattccgccataccaccatgtttgcccgctatatcttcacagaccgagcaggcaggggtaaaaggttaacaaggctatctcaataactcacctttccgaataatagcctttccagtcagaatggtatcatccgtattgtgggataatgtactttgttttattcctatttgattctcgctcatgtgccgatatattgcagaaattgaaccaaaatagtagttcttcttctcaaatattaaatacacatgaacaacctttatttttcgcattatttctatttcaaaacttccaaattgctgttatttggaattatttatatttcttgattactgaaagaatatcatcaataggcagggataaagctgttttctcattatcttcgtattctttcaaatattcgtaagcatcaggaaattgatctttcactcttttgaatgttcgcagagaaagaagcgttgaaacaattgagttgtacgtcttttctttttcatcttttagcttttcaattttcaatctcaacttatcaatcttaccaactatttgactaccgacttcaacatgaggaaaccatgttgtagaagcaggaaagtatgaaagtccatccagtcttacctcttgtttcccattacagaatgttacactttgagatttgcaaaacacgcttttatatttctcaaagcattgtttcaagtcctttggtaaagcatctgaaacagctttgtttgctaaatctatcctttcctcggaaagcgatttaattttagcaccaataggggctaccattttttcagccacctgcccggatatggttcttgttatattcatagctaaataaattctttgttacgttcaatttcttgctgggcatataccaacatttgatgttcattagcagccggtagataaatatctgcctgtgccgtgctccaattacggaaacgctcaatagataaagtcatttctcctgttgtcagttctgccgaactgcgtaaataagttacttcttcacctttcttgttgatcgttttgcgttcaaacaaatcacggttgcaagttctcttatagaagtcaattttggcttcgtcaaggctacaaccgtactcactaccgaaataccctaaaagaagatgcaagtagctgttttgggcaagcgtgcggttaggtagtttctttttcacttccaccaccgcacgttcactaaacagcttgtttacatactccttgaacttgggtatttcataatgatttgataaattaaatatcatttttctttttccaaatatagccaccagccgttttccttttgccgagcgtacaagcattgatacttgatgcagcaacttgtgtttcaagagaagccacttttgcactttcaaattcagctatataattcatttgtaatccaaattgcacaactggaattgaatgagttatagacatctttcttttagaaaaacttgaatgctttttattatacattggatgtttttccccttttcggctcattgacattcgttttttagtttctgcattgataactttacctttagcagatttactaaaacggcttttagtaataggattattattgttttccgtgcgagttacccaccttaaattacaaacattattatccgttctaattccattaatgtggtctacctctggtttattaaatggattggggataaaagtttctgcaacaattcgatgtaacagtcttttatcttttctcaaagtaacataaacatatccgttctttactccaacatttggagtaagcaccttattaggattccgaactttacctgtattagaaacttgataatatccattataaccttttactgttttccaaatctcttccatatcattcttcaaatcgaaaatcatacgctaaaaaggtaagtcgtcctttgcattaccatttgcatcaaccggaggcggaaaatcctgcggttgatgataagttggctgtggttgttgtattggtgcagtttgtggggactgggatacaccgccacgcccttctattttgtagcaccgaatagacgccatacgtttaagctccccatcttgattcgtccaagaacgcccttgtaatgcgaatgacacagtcaccacatcatcatttttatagcggtcaagttctgcacatttatcacctgaaaactctaagggaataacattttcatactcgctacgctcacccgtataagggtcataagtggtagcatctaaaataaattcccgtttagtaaatggggaaccaccacttttagatggaatttggacgatctgaccgatttcgataattcttccagttatttgatttgccatattaatttatttttaatgttacacttccaactacagaagactctttcaagtattttttataaacacctggatagtctttttcaaaagactctttgtcgaacaatttgcggatgctgtctttcgtacgcacgaactggatagattcaccttgccaattatagacgccgacctttaccatttcctgcattataccgtctgtgagttccttcttcttttccgcccaatatttagcctgctcattaatctcgataatggtttcttctattgccctatatttatccggcaggtttattttatcaggcgtaaaatacgggttaatgaatttttcaccattcacttcacattcaagaagccggataataatctcatcgggaatcctttcaatatctaccaattcggcaatatgtcccctaagccatatgccaaatagcttatctacttttaattcagggttgttcaactcgaagaaataggcgtaaacggaaagctgccatctaagatagtccttatccaacttgtaggtagtctttatatctcccaaagagtatcccttatcgcttttataaactttgtctatacaagacgcaaagtgtttattatcgcttactagatattcagaacacacatacgacaagccgagcgataattttaattctagatagttttgagcttcctccacacccatatcgcatcctatatcatccaaggtttggcacacctcatgaatgaaacgccctctttctgcggctttttcgagaacctctttaggaatattgttgtatttatccgggaatatttgtctgttaatcattccggtgatacccgataagctcacaccgttcagcgaataagtatgagcttcggggtcgaatattacatctgatttatgcagcatctttaatcatatttactttgttattaacagctttgacaaaaacctcgtttttgcctaataccgccctgtaattatcacaaatttgttttattgtttcaatggattgtgcagcattcacctcttggagtgccattgccaacgtgtcagtctgctcggatttttgaggttcggttttcggttttatcaccttgcccatctcatatcgtttgttacctttattatcaacaataacaagcgatgtaatttcacgcttatcattatatccgatagactgtaccttgaatgtggtttttattttgccatttgcgttcaaatcatcttttgctatgttcacccaaataaaaggtgcggtatatagctctctccctatgccgaaattaaaacaggctcttttaaacgaatcggatgcctgtcctttttccttttcggtgtagctttctgtgccaacatcctgcttagttatccacattttcttttcgttatcccaaacagacacattgcaatataggtttccgtctataagttcgtgacttctcatccagttcattgggccgaacgtttcatcaagaagcctcatgtcgcatcttgcatccttatatagcaataaggaacatcctgcctgcgtgacagttgctatacgggcatctatctcatcagcatttaacagccttatttctttcatattttatattattaaagtggttaatcaaataaataaagcgcctatcctcacgaaccgacgcttccgaaaagtttaattatatcaaaaaagattatttgcgcttttgaaggcacttcaagatgtttccatcctctatggccttcattatttcacatcgcttataataaatacgccctttaggctcagtaattatattaccttcctcatctgttacagtttcgattccaaactgatatggggatataaatcctctatcttctaagttcttgagaaccattcggccacctgcatattcttcagcttttgattttggtactactatagatggattatttaaaaagtcgttcctccatttgtcaaaagcttcaaatgcaatttttaaaccttgatcgatagcatattgtacaaccgcatccataattaatagtttctaaccactttgatatatccagcaccccgatttgttttcaccgagtataatctttgatctttttcaattattctatcaattctagccaatctatttaagtcagaaacacatctgcgaagctgaactgccaaaccatcactaaattcgtaacgaatagagtcttctttttttcttaattttttctctatctctatcctttctttaagtttatctactcttgccataactattaaatttaaattattgatttgtggacgtaaccggattcgaaccggcaataacccaactggacaggtgagctcacacactgccactttacgcccgtttcctgtatcacgtcagatacaggacttaatcgaaacacgaattttcacacataaaacagctattctctcgaaccgcatacctatatcacttttctctctttagtctcttttggtgcttttccatgtatatggagcataatgcaaacacagtaaatgaaagccagaaaacgatatttaatcggtttgcaaacaatatcaccattgcaaatgatattgtccaaattgctaatagtggagtacgtttcataagattaattatttgattattattgtggagaatcttggatttgcaccaagatgagttgtcaagctcgccacatctaaggttgacattcctattatcgagtggtgcgtctactgattccgccaattctccttattaaaaagtgcactatcttcacagaccgtacactatagaaccacacaaataaaaaataaaacactgcaaaaagtgccctacccgattctcgctatcggatgccgttcaatccgtcagtagggctatatatacacactaatagtgtgatgatctttaacttatcgactgctgctgtcttaggctcatatcatcgccatcgattgcttatacagtttattattctccgcctcggctataatgcttattagcgcaggctactttaacgtgccctgaacacggcttcatttttgagggttaagcctcccatcccgaattaggagtcatcggtttaccattgtgccctgaaagcgtttcgctcgcttctttcgtagattctaacctaacagggcttcgtattcacttatcaaattgaagaggtagtttataatccatttctttggcttattaaaagtggtcaacaactgaacggtcttttcgtctttctcctccaaatcctttacgtattgatgaaggaaagccaaattctcgttaatctgttctgtattcataattatctccaagaactatcgtagttagtatatttatcggcaaagaacgccttcaatacatttcccttgcttgcattgaataccggcttgaaggacttcttttcctcttcaacctttctgtattctttctgctgtttctttgccaagaaccaagcctgtttcaatgcttcacttaaagagatacgacgatacgccttcaagatgtgagcgtgtttcattatcccactgttattgaattttccatcttttaaaaaactgaatgcgttcatcttaatctctttttagttattactattgtttctatcaaattttatccttttatttgtattaatttgatttgacattgcaaatatagtagataaaatatcaactacaaaacaatagttgatattttatctaccgcaaaacattatttaactatttagaaatatggaagactattttagagaatcaattattaaaaaggaggaaaattatccaaaagtgataatgcctgaagagaaagataaaatagtaaataagctgattaatcaaaagaggaatggattcttgtttgaatataaagatgttccaaaccttaatattagtaaggtgcaatttgaaaaagtgatgattgagcttgaaaatatgggaatgattaaaatcgaaggctataagaatagcggcagaatatatccaacttcaaaattggacacattctaccgctatggaggatttaagaaacaagagcaaatactttccaatgacctggaaagattaaaacttgaacttgaaaatcttaagaaaacggtggatccatccatttcggaggagatatcgagaaaagtaaaaatcctcactgaaattgcggcatctattacatttgcattgaatttcgttttcgggaggatataatcctaaatgcttctcaagatgcgcaacgggagattctttttcgctatcactctcaaaactatgaagagaggtatatataacctccccatctttggcgtttttgatgactctctctacattataaccatctccacttgtaaatctacgggaaatgataatagtgtaatttggttcattttccatggcaaaaatattattaattggttgttcttatgattatatcagctatgataacagaaaatgccaatatagcagaagcaaatcctacaatgcaacatgcccaacctaatttatcgtttttatgaggaaaaaatttattcatatataattgttctttttttatgattacagaaacaaataaagtattagagatggagaaatatacctttcttcgctctttggtgactgtacaggcggcatttggggcggttctcttcggcctctcatcggacacgattcgcacagtggtgtatcttcgtgccgcagcaatatcaactctactatccattttcttcggttgtatttgcctgtatgagaggacaaatacctgcaatcggattttaaacaaaattcagaagggacaaatagatagcatttaccataatggccatttagccatcgataggctatcaatcttctccttatgtgagtggctattctatctatcctctgcttcaattttgatttcattgctgctatatgtctgttatatttaaaattaaaaaaatatccgcaataggttgcagctactacggataccatatattaaacctcttgtgaggaaagtttaaccactttgtctctgtaacatctgcaacttgttacgacgcaaaaatagtagatatattatcaactaacaaataaaaattcatcattatggaagaaaaagataaattacgttctcaacgttttgtggaagttattgaagagctacaaatcagcaatcaggagcttaaagataaatttaaaatagacaaaacattaaaatcgaaaattgtaaatggaatacaaaatgcatccattgataaaattgcggctatatgtgaggagtacgaaaatgcaaacgttgattatattataacaggacgaggagaacctctaaaaaagcccaatgaggaaatccctaatattccaatagcttctggtatatcaatcacatcagaagaggaataccgagatgccaaaaagaaaggattccatttgctgccacaagttagtttcaggtttgcagccggacaaacacagttaatcaatactacggaagatattacaagatactggtatctgccggactgtaaagattgtgaaggtatcgctcaagtagtagggcgttctatgtctcctactcttccttccggatgttgggtagctttaaagaaatatacactcccaagagaaaacccaaacatgattccatttggaaatatatttggaatagtaatagaggacaaagacacgggagaatatcatgggcatattaaagtattacgcaggtacaaagagcaatcattatcttgtagatattggatcgctcattctatcaatagcgaggaatttgacgattttgatatagagatagagcaagttagaagcttatggatagttaagcagcatatcgttagcgacgccctgctataactcaacaccctttctattaaatgctgaaattatccaaatgaagtactatatatcagtattaatattatgaactatttgtatatctaagaatatcaatagttcataatattgccaattaccctttattttaactcctcatctatttcgaaaacatactctaccactttatttataaccttatctattctcgaaaagtcttgttttatataggtatccgttaccgtctttcctgaagaatggttcagacataaagaaatatcgtctttacttatattacattcgttacgggcaatggtagcaaaagaatgacgggctgaataaaattggatataatcaattccaagttcttcgcataaagatctcatcccgcggtgtattcctttggttaagtttctcacattattatatcttttataaaaatcaaacaaatgctgtccggatggatcacgatacttgttaataatcggaagtgctaacgggtggatatacacagagatgaaagcgttgtcctttcttctatcttttgtcttttgacgttcatactctatcctcccgtttaccattcgacaattaagcatatcaaccgcattcattcctgctagcaaaaaagacaagatatagatatcacgggtaaacatggtagttctttttcgcttatttactggagaatagttatatatctttctgattatatcaacatccaccgctcttttctttgcttctaagactgccggaatagtatataccttgaacggatcattagtaataatgatatcccctttttcataatcattaaaatgaagcaaagcggcattaaacactgattgaatgattcccatataggaatgtaccccagtatcatttaaagcgggtttctttattgtcttatacgcttgttttgccgttttattttgcctaacggttatatacctttcttgtctcaaccattcctcatactcacgtaaaaaacgtgatgttaaatcctttatcagaagcttttcattaccatttttataattaagaaaatggcaaagggaattaataccagtcgtcttgactgtttttgttccttcgtttggcgttttctcaataaacattctagcaaattcaataaaatctatttctttcctctgcttcctcctttcgatcattgcgattatatccttggaagtttcgcactcattaactatatcttgatgttcatttattatttgacggtattctctaaccaatccgtctagctcttcctttattttttcagaagttattgtgcccgatgcggaattcttcttgaatctgaccagttctgtatatatagaagttgatatatacgatgaagttcgattgtgggatatcctaattttcggattatacgtattgtccgattttttatgatgcttaaaaactacccaagaaactgttgccatagctatctctattttcgtaaatcatttgtaaaacaaagatagtattttggtagagaaatacgctaccaaatcgtcctttttaacttttcaaataccgcacatatccactctacagcagcacaaaagcccacaacgcacttttatcaacttttgctacccaaatataagaatatcattccgattaacactagtataaggtcaatcgctttgctttttaaattcttttcacggaagaaaagcgcaccgaaaatgaaagaaacaattacacttccccgacgaaccatcgaaacaatggaaatcatggaatcatcataactcaatgcatagaaatagacaaagtcggctgcagagaggaaaatggaaatcaggataatcgtccaatcccagcgaaaaggggtagtcgactttcttttcggccaccaaagcaataacagaatgggacacatgataaaaacctgataaacattataccaagactgcaccaacatcgggttcaatgacttcatcagatacttgtcatacaatccgctgatagctcccgttatcgcagccagcacgataaagaatatccatttattatgcttgaagtcgattccttctttctttcccgaacggctcagcatgaaaaaagagacaacagccagcagcacaccgatccattgataaaggttcaaccgctcgccaaacacgagcattgcccctacaagcaccatcaccggacgggtggcattgatcggtcctacgatcgtaataggcaaatgtttcatcccgaaataaccgaatatccatgaagacagcactatgaatgacttgatgataatatatttatgctgttcccaacccgcaacagggacattgaatatacttccttccaacagattcggctcatatatagagaacaggataaacggcaggaagataaggctggaaaagaaagtgttcaagaacaatacaggaagcaccgcattgtctttcagtgatttctttttaaatacatcataaaagcccaacaaagtagctgatagaaaagccaataataaccacatagaaaataagtaagaagtaagaattaaaaattaaaggtgtgtaggagaaaggaatatcgtatcaggatattccacattcaccagaaacaaagcctgtcccggagcggaaatcccggctttgcaacggtctttctgttctataattcgcctgaagccctcaatggaaagctttccacgccccacttcaatcagtgtgcccactatggcacgcaccatattccgcaaaaagcggtcggcccggatggtaaacacccaagtggcgtcctcttcccgtgtccattccgcatgggtaatatggcagatatttgtctttacatccgtatgcaatttgctgaaactcgtaaagtcagtatattcgaaaagcactttcgccgcctcattcatacgttcataatccaacggactgtaaaccctgcagcgatattgccggttgaaaggatatttggcagtggtcacataatatttgtaagtccgggctgtcgcatcaaaacgcgcatgagcctccggccggacacggcaaacacgatagacagaaatatcaggcggtaacaaacgattcagtttgtcggcaacggattccgtatccaacggttcatcatagtcaaaatgggcaaccatcaaagaggcgtgcacccccgcatcggttctccccgctcccacaacttctatctcacgacgcagaaaggtagacaatgcgttcatcaagcattcctgcacactaattccattcggttgaatctgccaaccgtgatagttggttccatcataagccaaataaataaaatacctttgcacgcttattcctccttttttgaattttcgcgtgcaaaagtagtcattttatcttatttatctttgtatagttcgcataaactcgtatatttgaaaaacaatatggatgattcactaactgtaccaaattatgagcagtactattttcctcattatcgccctcgtcacaacaggcatttttgtgattcaatttattctatcaatcttcttcggagatatagacgctgatgttgacgtagacactgacatcagcagcgtagtttctttcaaggggctcacccatttcggaatcggatttggctggtatatgtatttggcaggaaatacggagattcaaacctatgccgttgcaatctttgtaggtctctgtttcgttctcgccgtctggttcttgtataaaaaagctttccaactacaacaggtaaaccgttccgaacagacagaacagttggtcggacgcgaatgtacgatctacttcaagcaaaatgacggcagatacaccgtacagacaaaacgggatggagccatgcgcgaagtggacgtaatctccgaatcgggaaagacgtatcaaacgggagaccatacggttatcacccgatatcagaatgggacattgtatattcagtaactatttaaaatacacaaatctatgacacaagaaattctaatcatggtcgctatattagtggcggtcatcttactcacttttatcggtatcttgtctcgttatcgcaaatgtaagagtgacgaagtcctcgttgtatacggtaagacaggaagagacaaaaaatccgcaaagctatatcacggaggagcagcctttgtatggccgattatccaagggtatgagttcttgtcaatgaagccgatgcagatcgactgcaaactgacgggggctctttccgcacagaatatacgtgtcgatgtaccgactactatcactgtagccatcagtaccgacccggaagtgatgcaaaatgccgccgaacgtatgttagggctgacaatggacgacaaacagaatctgattacagatgtagtctatgggcagatgcgtttggttatcgccgacatgacgattgaagaactgaactccgaccgcgacaagttcctttctaaagtaaaagacaatatcgatacggaacttcgcaaattcggtctgtacctcatgaatatcaatatcagtgatatccgtgacgctgccaactatatcgtaaacttaggtaaggaagccgaaagtaaggcacagaatgaggcgcaagcgaacatcgaggaacaggaaaaattaggtgccattaagattgccaatcaaataaaagaacgggaaacaaaggttgccgagacgcgtaaagaccaggatatcgccattgcagaaacaaagaaattgcaggaaatttccgttgccaatgcagataaggacagaatctcccaagtagccatcgcaaatgcggaaaaagaatctcaagtagccaaagcggaagctgaaaagaacatccgtatcgaacaggcaaataccgaaaaagaaagtcgtattgccgaactgaactccgacatggaaatcaaacaggcggaagctgcgaagaaagccgctatcgggcgaaatgacgcacaaaaagaggttgctttatcaaatgcggatttggctgtaacacaagctaacgctgataagcaagccggtgaagccgctgcaagatcggaagcagctgtacaaacagcccgtgaaatcgctcaaaaagaagtagaagaagcaaaagcccggaaagtggaatcttcattaaaggcggaaaagattgtacctgccgaaatctccaggcaggaagctattcttcaagcaaacgctattgcggaaaagataacccgtgaagcggaagcccgtgcaaaagccactttggcacaagcggaagcagaagcaaaagctatccaactgaaactggaagcggaagcagaaggtaaaaagcgttcattacttgccgaagcggaaggtttcgaagcaatggtaagagctgccgaatccaatccggctatcgccatccaatacaagatggtagaccaatggaaagaaattgccggtgaacaggtgaaagcattcgaacatataaacttaggaaatatcaccgtatttgacggcggaaacggaggaacaagcaatttcttgaatacattagtaaaaacggttgcaccaagtctcggtgtattggacaagttgcctatcggtgaaacagtgaaaggtatcattaatccggaaaataaaacggaagaaaagcccgcaacgaaagctgaagaaaaaaagaaataatccgaatttattagtttagtaaagtgcgctgatgagaaaaagaaaagtcttattctcatcagcgcacttttatcatatatacgaatcagtataaaaacggtgcggaaaggagccaaatactatttttatttctttttctgcctaatcagattagccgcgttacttattctttttgcgtttgactatagtattccgcaagagtaactatagtcttccttacgtataactatagtcatacgcaaagtacactatagttatacgaagtaaaagtaacgaatgaaatgagtctaaatagtgaatcgattataaaagaatgcctatagaaatcaataagaacaagaaggctatcattgtttaattcaaaacctagtacgttatgaatatgcagcggaaataatgcaaagcatagaacgtatggaaaaatagcgtatatttgcgggcaaaaagacaaaatgactatttacaagcttcgcatactaccactatttttactagttattagcttcacgacattcacttcagggtgcaaaaagaaagatatgtcactgaaactgaatgagccccgcaacattcgtggcgttgtcagttacaaacgctctttccctgatttgaacgatgcccatctcaaagtcgctaaaaagataggtatcagcccgttggcagaccgagaggaagcggaagctatgaaagaaaagctgactcatatcactgataatgatttctatacagtagattcattaacgcactccatcccctacctcgttccacgtgccagcgcattgctcgatacaatcggctccaactttctcgattcactggctgccaaagggttgaacccgaatcaagtgattgtcacatccgtgctgcgtacacaaaacgatgtgaagcgtctccgccgccgcaacggaaatgcttccgtcaattcggcacattgtttcggggctactttcgatgtaagttggaaacgcttcaagaaagtagaagatgaagacggacgtcccttacaggatgtcagcgcagacacccttaaactcgtcctgtcagaggtattgagagacttgcggaaagctgaaaaatgctatattaaatatgagctgaagcaaggttgtttccatattacggccaggtgacgtaagaaatgaatgtaaattgcaataaaattcgcccctaaacaatcagagaatccaaaacgtttcattaaatttgcagaaatttttctttaatacaattgaatgatagagaaactgattgttcttgaggacattgatccggttattttttacggtgtaaacaacgccaacatacagttaattaaagctttatatccgaagctacgcatagttgcccgaggtaatgtcatcaaagtgctgggcgatgaggaagaaatgtgtgctttcgaagaaaatatcaccaaacttgagaaatactgtgccgaatataactctctgaaagaagaggttatcattgacattataaaaggaaatgccccgcaagcagagcaaaccggaaacgtgattgtattcagcgtcacaggaaagcccatcatcccccgaagtgaaaaccaactgaaactggtagaaggatttgccaagaatgatatggtattcgccatcggtccggcgggttcgggaaagacatataccgctatcgcccttgccgtacgcgcattgaagaataaagaaatcaagaaaatcatccttagccgccccgccgtagaagccggagaaaagctcggtttcctgcccggcgacatgaaagataagatcgacccatacttgcaacctttatatgatgccttgcaagacatgatacctgccgccaagttaaaggaatacatggaattgaacgttatccagattgctccgttagcctttatgcgcggacgcacactgaatgacgcagtcgtaatcttggatgaagcccaaaacaccactacgcaacaaatcaaaatgttccttacccgtatgggtatgaacaccaaaatgattgtgacgggagacatgacacagatcgacctccccgcttcacaaacatcgggactggtgcaagccctccgtatcttgaaaggagtgaaaggtatcagttttgttgaactgagtaaaaaggatatcgtacgccataaactggtggaacgtatcgtggatgcttacgaaaaattcgacaaagaagcgaaagccgaacggaatggtgaaaataaagaaacataattttaatatatatcattatgaaagcattaacaaaaacagatttcaactttccgggacagaaaagtgtgtatcacggaaaagtgcgcgatgtgtacaacatcaacggcgaaaaactcgtcatggtagcaaccgaccgtatttcggcctttgatgtagtactgcccgaaggtatcccttacaaaggacaaatgctgaaccagattgcagctaaattccttgacgccactactgacatttgcccgaactggaaactggctactccggacccgatggtaacggtaggtgtattgtgcgaaggcttcccggtagaaatgattgtacgcggctatctctgcggcagcgcatggcgtgcttacaaaagcggcgtacgcgaaatttgcggtgtgaagttaccggacggaatgcgtgaaaacgaaaaatttccggaaccaatcatcactccgactacaaaagccgaaatgggattgcacgacgaagacatctccaaagaagaaatcctgaaacaaggactggctactccggaagaatatgaggttctcgaaaaatacacattagctctcttcaaacgcggcactgaaatcgcagcggagcgcggactgattctcgtagatacaaaatacgaattcggtaagcataacggtaccatctatctgatggacgaaatccacacaccggactcaagccgttatttttactctgaaggttatcaggaacgcttcgaaaaaggcgaaccgcagaaacagctttctaaagaattcgtccgcgaatggttgatggagaacggtttccagggtaaagaaggtcagaaagtgcccgaaatgactccggctatcgtacagagcatcagcgaccgttatatcgaattgttcgagaacatcaccggtgagaaatttgtaaaagaagatactagcaatattgctgaacgtatcgaaaagaacgttatgaatttcttgactgaataagaatggattacccgcaacaacatatcaaaccttacgacaaggaaggaaagaaaaccgagcaggtggaacgtatgttcgacaacatcgcgcatgcctacgataagttgaatcacaccttatccttagggatagaccgcagttggagacgtaaggccatagcctggcttcgccctttccatccgcaacgtatgatggatgtagctaccggcacaggagattttgccatccttgcctgccgcgagctgcaacccgctgagttaatcggcacggatatatcggaaggtatgatgaatgtggggcgtgaaaaagtaaagaaggaaggactctcggacaaaatatcttttgcccgggaggactgtacttcactctcttttgccgacaatgactttgacgctattaccgtagctttcggtatccgcaacttcgaagacctcgacaaaggtctctccgagatgtgccgtgtactgaaaccgggaggccatcttgtgattctggagctaaccactccggagcgctttccgatgaagcaactattctccatctactcaaaaatcgtcattccgttactgggcaaacttctctccaaagacaacagcgcttaccgttatttgccggacaccatcaaagtatttcctcaaggggaaataatgaaaggagttctttcaaaagccggattcggcgaagtgagtttcaagcggctgacctttggtatctgcactctttatactgcgacaaaatagtgagttaattaatttaatccttttcttttatggaaaaatatggtttaatcggttatcctctgagacattcattttctatcggatactttaatgagaaattcaaatccgagggtatcgatgcagagtatgtgaatttcgagattcccagtatcaataacttcatggaagtcatcgaagagaaccccaatttatgcggactcaatgtcaccattccttacaaggagcaagtaattcctttcctggatgagctcgatcgtgacacggcaaagataggcgcagtaaacgtgattaaaatcatccgccaaccaaaaggtaaagtaaaattagtaggttataactctgacattatcggattttcccaatccatacagcctttattgcaaccccatcacaagaaagccttgattctaggtaccggcggggcctccaaagcagtctatcacggacttaaaaatctgggaatcgaaagtgtattcgtttcacgcactcataaagcggacaatatgctgacttacgaagagctaacccccgaaatcatggcgaaacatacgattatcgtcaacactactcccgtaggtatgtttcctaaggtcgatttctgcccgaatatcccatacaatctagtaactccaaaccatttgctctacgatttgttatataatccgaatgttaccctttttatgaaaaagggtgaagcacaaggagccgttgtcaaaaacggtctggaaatgttgcttcttcaagcattcgccgcttgggaaatctggcataagtaaatcacatttcccctcactctcggcagaagaagtcaggggcaaatcaaagaggtacaattatgaggagaaaagttatctatagcattatcgttgtcatgttgatattgaccggttgtaccattggaggaagtttctatatgttgaatctatctctgacgccggatggcaagatattgtctaaagacgctgattcttatccttttatgtacagaaactatccttttctgcgttcgtgggtagatagtctgcgacaagtaaatgccctgaaagacacttttatcgtcaacccgcacggcatacagcttcatgcttactatgtggctgctcccagacccacaaacaaaaccgcagttattgtacacggatatacggataatgctattcgtatgtttatgatcggttacctctacaatcgggatttaggcttcaacattttgcttcccgaccttcagcaccaaggcgaaagtgaaggtcgggccattcagatgggatggaaagaccgtctggatgtattgcaatggatgaacatcaccaatagtatctttggagacagcacgcagatggtagtgcatggtatttcgatgggaggcgcaaccacaatgatggtatccggtgaggagcagcagcctttcgtcaagtgctttgtggaagattgcggttataccagtgtgtgggatgagttttcccatgagctgaaaagttctttcggtctccctcctttccctttgatgtataccaccagttggctatgcgaaaagaagtacggatggaatttcaaagaggcctcttcgctgaaacaagtagcaaaatgccaactgccgatgttgtttatccacggcgacaaagatacatacgttccgacttggatggtttatccgctttacgaagcaaaaccggaacctaaagaactttggatagtaccaggtgcggctcacgccctttcatacaaagagaataaacaggaatacacagataaagtccgtaagtttgtcgggcaatatattcattaaacgatgaaattaatattcacattcatagctattactttcttgctgatccccttacgggctcaagagaaagtgtacacagtagacaatcttccgaaagtccacttacagaataagacgcaatatgtatgcaatcctgcgggaatactgtcaaaagcagcctgtgatagtatagattccatgctttatgctttagaactgcaaaccggtattgagacggtcgttgcagtgcttccctccattggagaggaagattgtttcgatttctgtcatcaactgctcaatcaatggggtgtaggaaagaaagataagaataacggtttggttattctattagtaaccgaccaacgctgcattcaattttataccggatacggtctggaaggagttctccccgacgctatctgcaaaaggattcagacgaaatacatgattccgtatctgaaagacgggaattggaatgccggaatggtggccggtttgaaagcgacttgccaagtccttgacggttctatggagaacgattctctttccggttcaaccaataacggaggttcattcgatttcatcctcgccgtatttttctttatactgattggtggaggtatcgctttcctttccgcacgcaagcaaagccgttgtccgaaatgcggaaaacacacgttacaaagaagcggtagccggctgatctccagagtcaatggcgtaagaaccgaagacatcacttacacgtgtagaaattgcggtcataccctcacacgtcgccaacaaagttatgacaatgattatcatcaccgaggtggtggcggtccgtttattggtggtttcggcggaggcagaagtttcggaggcggaggcagcttcggtggaggaatgggcggaggaggtggtgccggttcacgattctagtcaattcacgactccaactaaaacctagaaaagtcaaggaaacaccaagatttaaaatcaaattatcaatatcaatcaataaaaacgataaatatgaaaaagtcagttatcattattttagctgttatagctgtcattgtcatttgggctgtcagcatgtacaacggtcttgtcgctatggatgagaaagtaaatggtcaatgggccaatgtagaaactcaataccaacgccgcgccgatttaattcccaatctggtaaatacagtaaaagggtatgcgacacatgaaaaagaaacgctggaaggagtggttgaagcacgcagtcaagcaacacaaatgaaagtcgatgcagccgacctgacaccagaaaaactcgctcaataccagaaagcacagggcgccgttacttccgccttaggcaaattattagcaattacggaaaactatccggatttgaaggctaatcagaacttccttgaactgcaagcccaattggaggggacggaaaaccgtatcaacgtggcacgcaaaaatttcaatgatgctgcacaggcttataacaccaatatccgccgtttccccaagaatatctttgccggaatgttcggatttgaaaagaaagcttacttcgaagcggaagaaggtagcgaaaaagcaccgaaggtagagttctgaaaagaggcaacggcatttctagtaagatagttggctgtacaaaaaaaaagcagtacttttgcagccgtatacaaaataattctataactcatgagtaatcaacgatacatgatgcgtggcgtaagcgcatcaaaagaagatgtgcacaacgccatcaagaacatcgacaaaggaattttccctaaagcattctgcaaaatcattcccgatatattgggaggcgatccggaatactgtaacatcatgcatgccgacggagccggaaccaagtcttcgcttgcttatatgtattggaaagaaaccggtgacctgtccgtttggaaaggtattgcgcaggacgctttgatcatgaatatcgatgacctgctttgcgtgggggccgtagataatattcttgtctcttctaccatcggacgcaacaagctgttaattccgggggaagtaatttccgccattatcaatggaacggatgagctgcttgccgagctccgcgaaatgggagtaggcgtatatgccaccggtggtgagacagccgacgtcggtgatcttgtccgcactattattgttgattccacagtaacttgccgcatgaaacgttcggatgtgatagacaatgccaacatccgtccgggtgatgtgattgtcggtcttgcttcttacggacaagctacttatgaaaaagaatacaatggcggcatgggcagcaacggcctgacaagtgcccgtcacgacgtattcggcaaataccttgcagaaaaatatccggaaagctatgatgcggcagttcccgaagaactggtttattctggaaacctaaaattgacagacagtgtggaaggctctccgatcgacgccggcaagttagtactctctcctacccgtacatacgcgccggtagtaaagaagttgttggatgcactacgtcctgaaatacacggaatggtacactgctccggtggtgcacaaaccaaagttttacactttgttgaaaacgttcgtgtagtgaaagataatcttttccctgttcctcctttattcaagactattcaagaacaaagcggcacagattgggcggaaatgtacaaggtgttcaatatgggacatcggcttgaagtctatctgtcaccggaacacgctgaagaagttatcgccatttccgaatcatttggaataccggcacagattgtcgggcgtatcgaagcatgtgacaagactgaattaatcattaagagtgaattcggagaatttagatactaaagaatggcagataacagtaccatattagagaaactggacggtcttgtagcccgttttgaagaaatatcaaccctcatcaccgacccggcagtcattgccgaccagaaacgttatgtcaaactgacaaaggaatacaaggaactggatgacttgatgaaagcccgcaaggaatatattcaattgctgggcaacatcgaagaagccaaaaatatccttgccaccgagtcggatacagatatacgcgaaatggccaaagaggaaatggaccttagccaggaacgccttccggtattggaggaagaaatcaagttaatgcttgttcctgccgacccgcaagacagcaagaatgccattcttgaaattcgcggtggagcaggaggcgatgaagcggcaatctttgccggtgaccttttccgcatgtatgccaaatactgcgaagtaaaaggatggaaactggaagtctccaacgccaacgaaggaactgtcggcggatacaaggaaatagtttgtagtgtcacgggagacaatgtttacggcacattgaagtatgaatcgggtgtacaccgcgtacagcgtgttcccgccacagagactcagggacgtgtacatacttcggcagcttcggtagccgtacttcctgaagcggaagagttcgatgtggtcatcaacgaaggagaaatcaaatgggatactttccgaagcggcggcgcaggcggacagaacgttaataaggtagaatccggagtgcgtctgcgctatatctggaagaaccccaataccggtgtttccgaagaaatcctgatcgaatgtaccgagacacgcgaccaacccaaaaataaagagcgcgcattggcccgtctccgtactttcatctacgacaaggagcatcagaaatatatcgacgacattgcttccaaacgtaaaacgatggtttcaacgggagaccgctctgcgaaaatccgtacatacaactatccgcaaggacgtatcaccgaccaccgcattaattacacgatttataatcttgcggctttcatggacggggatatacaagactgtatcgaccacctgatcgtagctgaaaatgcggaacggttgaaggaaagcgaactttagataagttaagagttgaaaattgagagttgagagtgattctaaaatagtaaaaaacagtaaacaataagatggataagcaacaattatttgaaaacataaaacgcaaaaaatcattcctttgtgtagggcttgatactgacatcaagaaaattccggaacatctgctgaaagaagaagatccgatttttgctttcaataaggcaatcatcgacgcgacagccgatttgtgcatagcctacaaacccaatttggctttttacgaaagtatgggtgtaaaaggatggatcgcttttgaaaagacagtaaagtatatcaaggataattatccggatcagttcatcattgccgatgcaaaacgtggtgatataggaaacacttccgccatgtatgcccgtactttcttcgaggaactggatatcgactctgtaaccgtagctccttacatgggagaagacagtgtgactccgtttcttacttacgacaacaaatgggttatcctgttggcattgacttccaacaaaggatctcatgacttccaattgacagaagatgcaaatggcgaacgtctatttgaaaaagtactgcgcaaatcacaggaatgggcaaacgatgaccgtatgatgtacgtagtaggcgctactcaaggacgtgcttttgaagatatccgcaaaattgttcctgaccatttccttctcgttcccggtatcggagcgcaaggcggctcgctcgaagaagtttgcaaatatggtatgaatagcacttgtggattgattgtaaactcttcccgtggcattatctacgtagataagacagaaaagtttgcagaagctgcccgtactgctgcacaagaagttcaggcacaaatggcagaacaattgaagagagtgattaacaatcagtaattaagtggtctacgaaagaaagataattaacgacccggtattcgggttcattaatatacccaagggattactgtatgatattgtacgtcatcccctattgcagcgtcttacccgcatcaagcaggtgggactctcatcggtagtatatcccggtgcacagcacacccgtttccaacattcactgggagcattctacctaatgagcgaagcaatcacccaactagcgtccaaaggtaattttatctttgacagtgaagcggaagctgtgcaggctgccatccttctgcatgacattggacatggcccattctcacacgtactggaggatacaatcgtgaaaggaattcctcacgaagaaatttccctcatgctgatggaacggatgaacaaggagatgaacggacaactcagtcttgccatccaaatcttcaaggatgaatatccaaaacgtttcttgcatcagctggttagcgggcaactggacatggaccggcttgattatcttcgtcgtgacagtttttatacaggagtaacagaaggaaacatcggctctgcacgaatcataaaaatgcttgatgtggccgacgaccgtctcgtagtcgagtctaaaggtatctattccatagagaactttcttacggcacgccgtctgatgtattggcaagtatacctgcacaaaacctcggtcgcatacgaaaaaatgttgatcagtactcttctacgcgctaaagaactagcctcacaaggaatagaactgttcgcatcgcctgcattacgttttttcctttacaacgatatcactcctacggaattctacagcaatcccgattgcctggagaattttatccagctggatgacaatgatatctggacggctttgaaagtatggagcacccataccgataaggtactttcgactttaagtatgggaatgattaaccgaaatatctttaaagtggaaatttcatcggaaccgattagtgaagacagaaaaaaagaattaactttgcaaatcagccaacaactagacatacccctttccgaagcgaactattttgtttctacccccagcatcgaaaagaacatgtacgacccggcagatgacagtattgacattatctataacgacggcacaatcaaaaacatagccgaagcttcggacatgctgaacatctcattattgtccaaaaaggtaaagaaatactatctctgttaccagagattacacagataagtataaaatattcattcaataacacggaaatctgaaaaaaaagtccgttatttgtgaactaattaaattttaaataaaagacatggagttctcggctaagcaaattgcagaatttatccaaggggaaatcattggagacgaaaacgctacggtacacacattcgctaaaattgaagagggaatgcccggagcaatttctttcctgtcgaaccctaaatatacaccttatatctacgaaacacaatcaagcattgttctggttaacaaggattttactcctgaacatgaaattaaagccactcttatcaaagtggaaaatgcatacgaaagcctggcgaaactgctcaatctctacgaaatgagcaaacctaaaaaacaaggtatcgattcactagcatttgttgcccccagtgccaagattggtgagaatgtatatattggtgcttttgcctatatcggtgaaaataccgtaattggagataacacccagatttatccgcatacttttgttggagacggtgtgaaaataggtgataattgtctgctttactcaaatgtcaacatctaccacgactgccgtataggtaatgaatgtatcctgcattcaggtgctgtgatcggggcggacggatttggctttgctcctactccgaacggatacgataagattcctcaaatcggaatcgtgattctggaagataaagtggatataggcgccaatacctgtgtagaccgtgctacaatgggagctacaatagtacatagtggtgctaaaatagataatctggtgcagatagcacataatgatgaaataggttcacatactgtgatggctgcgcaagtcggtattgccggctctacaaaaattggtgaatggtgcatgttcggcggtcaggtcggtattgccggacacatcaaaataggggataaagtaggattgggcgcacaatccggtgttcccggagacatcaaatccggaagccagctgatcggaactccacctatggatcccaaacaatatttcaaagcgtccatcataagaaaaagcctgccgaatatgcagaaggagctacatgacctgcgcaaagaaatcgaagaattaaaacaactattaaataagtaaccaatgctgaaacaaaaaacgctgaaagatagcttttcactgagcgggaaaggtcttcacactggacttgatctcactgtaacattcaatccggctccggacaatcacggatataaaatccaacgtattgacgtagaaggacaaccaataatcgatgcagtagccgacaatgtggtggaaaccacacgtggtactgttttgtcgaagaatggagttaaagtaagcaccgtggaacatggtatggcagccctttacgcattgggcattgataactgtcttatccaggtaaacggcccggaatttccgatattggatggtagcgcacaatattatgtacaagaaatagaacgtgtaggaacagtagaacagaatgctgtcaaagacttttatattatcaaatctaaaatagagttccgggatgaaacgaccggttcatccatcatcgtattgccggatgagaattttagcctgaatgtattggtttcctacgattcaaccatcattccgaatcagtttgcaacactcgaagatatgcataaattcaaagacgaagtggctgccagccgtactttcgtctttgttcgcgaaatagaaccgttactttccgccggcctgattaaaggtggcgacttggataacgctatcgtaatctacgaacgtaagatgtcccaagaaagtttcgataagttggcagatgtgatgggagtaccccatatggacgccaatcagttaggctatattaatcacaagccattggtttggccgaacgaatgtgcccgtcacaaattgctggatgttatcggtgaccttgccttaatcggtaaaccgatcaaaggacgtatcatcgctacccgtcccggacatacgatcaacaacaaattcgcccgtcagatgcggaaagaaatccgtctgcacgaaatccaggcaccgagctatgactgcaatcgggaaccggtaatggatgtaaaccgtatccgtgagctactacctcaccgttatccgttccaattggtggacaaagtaattgaaattggtgccaactatattgtaggcgtcaagaatatcactgctaatgaacctttcttccaaggtcattttccacaagaacctgttatgccgggtgtacttcaggtagaggctatggcacaggtcggaggtttgcttgttctcaactctgttgatgaaccggaacgttattctacttatttcatgaagatagacggtgtcaaattccgccagaaagtagtgccgggagatacactgattttccgtgtggaattgttagcccccatccgtcgtggaatctctaccatgaaaggttatgcatttgttggagagaaagtggtttgcgaagctgaattcatggcacaaatagtaaaaaacaagtaattaacaattgaaaattcaaatgataagtcctttagcgtatatccatcccgaagctaaaataggggaaaatgtagaaattgcgccttttgtattcatagataaaaacgtggttatcggcgacaataataaaattatggctaatgccaatattttatacggctcgcgtatcggtaacggaaacactatatttccgggagccgtcatcggggccatcccgcaagaccttaaatttcgcggagaagaatcaaccgctgaaatcggagacaacaacctgattcgcgaaaacgtaacaatcaaccgtggtacagcagctaaagggcgcacgattgtgggaagcaacaacttactgatggagggtgtgcacgtagcgcacgatgcattagtgggaaacggatgtatcataggcaattctaccaaaatggcaggcgaaatcgtgattgacgacaatgcaatcgtcagtgctaacgtattgatgcaccaattctgtcatgtaggtagccatgtaatgattcaaggcggatgtcgtttcagcaaagacatccctccttacatcatcgcaggacgcgaacctatcgccttcagtggtatcaacatcatcggtctgcgccgtcgcggttttgccaatgaagtgatcgaaagcattcacaatgcctatcgtatcatctatcaaagtggtttgaatacgacagaagcattaaagaaaattgaagatgaatttgaaaagagtccggagattgactatattatcaacttcatccgtaactcagagcgtggcattattaaataaacagttcaaaatagtcatattatgatatacagatttactattatatctgatgaagttgacgattttgtcagagaaatacaaattgacccggaagctactttctttgacttccatgaggcaatactgaaatcagcagggtatacaaacgaccagatgacttctttctttatctgcgatgatgattgggaaaaagaaaaagaagtcactttggaagaaatggatgataatcccgaaatggatagctgggtgatgaaagaaaccacaatcagcgaattagtagaagatgaaaagcagaaattactctacgtattcgattacatgacagaacgttgtttcttcatcgaactatctgagattatcaccggaaagaatatgacaggtgccaaatgtaccaagaaatctggagaagctcccaaacagactgtggattttgaagaaatggctgctagcggcggttcgcttgatttagatgaaaacttctatggcgaccaagacttcgatatggaagacttcgaccaagaaggattcgatatcggtggcgatacaggtagcccttatgacgaagataaatattaatttaacgattagtgatttaatgataagtgtggtaaagattcgtttattcacagatcattaaatcactaatctgttaccattaaccacttatcccccttgcctactctcattgttcttataggtcctaccggtgtaggaaaaacagaattaagcctgcggatagcagagtcttttcaaacaagcattgtatctgctgattcaagacaactttacgccgaattaaagataggtacggcagctcctactcccgaccaactcaaacgtgtacctcattatttggtcggtacgcttcatttgacagattattacagtgccgcccaatacgaaacggaagcgttggaaatcctcgataagttatttacgcaacacgaggtcgtggttcttaccggtggctcaatgatgtatgtagacgctatctgtaaaggtatcgacgatattcctaccgttgatgcggaaacccgccaactcatgctacagaaatatgaggaggaaggacttgaacaactctgtgcagaacttcgcctgctggatccggaatattatcggatagtcgatctgaagaatcccaaacgggttattcatgcattggaaatttgttatatgaccggacgcacttatacctcttttcgcacccaacaaaaaaaagaacgtccgttccgcattattaaaataggattaacccgtgaccgggaagagttgtatgaccgtattaaccgtcgggtagatatgatgatggaagaaggattactggaagaagtacgctcggtacttccctatcgccacctcaattcgctcaacacagtaggttataaagaactgttcaagtatctggatggagaatgggaactctcctttgccatagataaaatcaagcaaaactcccgcatttattcgcgtaaacagatgacttggttcaaacgagatgaagaaatacaatggttccatccggaacaagaaacggagatactggcgtacctccgtcaacaaatagggtgacattgcaagcagtttcttctcgagtccacagcgacaatatttaaagtccttttcacaaagagattgaaacttcccaataatccttatcaaatctgcataaaaatccatcaggttttgtcgaatctaagtttattgttacttttgcaattacgaataaaaaccaaaaccgaattaaaaaagcagatgaaaaagatcagcatcactctattactctgccttctctgtctgacaggaatggcacaaggacaaaaggcactcgatttaaaagatatcacctcgggacatttccgtccggaaaacattcaaggcgtaattccgatgcctgatggagaacattacacacaaatgaatgatgacggcactcaaatcatcaaatattctttcaagacaggtgaaaaagtagaagtgatcttcgatgtaaagactgcccgcgaatgtgatttcaagcacttcgacagctatcagttctcacccgacggaaaaaaactactgattgccaccaagacgaccccgatttatcggcactcatatacagctgtacattatatctaccctttgaaacgaaatgataagggcgttacgacaaacaacatcattgaacggctgtctgacggcggacctcaacaggtccccgtcttttctccggacggaacaatgatagcttttgtccgcgataacaatatctttcttgtgaaactgctttatggcaatagtgaaagccaggttaccgaagacggtaaacagaactctattatcaacggcatcccggactgggtgtatgaagaagaattcagttttaaccgtgcgttggaattcagtgccgataatacgcaaatcgcttacatccgttttgacgaatcagcagtaccgtcctattcttttccggtatttgccggacaagcaccccacattaatgctttgaaggactatccgggtgaatatacctacaagtatccgaaagccggatatccgaattccaaagtcgaggtacgcacttatgatatcaaatcgcacgtcacccgcacaatgaaacttccgttggatccggatggatacattccccgcatccgctttaccaaagacgccaacaagctggccatcatgacactgaaccgtcatcaagaccgcttcgatctttattttgccgacccacgttcaacactttgcaaactggtgctacgtgatgaatcaccctattatatcaaggagaacatcttcgataatatcgaattctatcctgaatatttcagtttgctcagcgagcgtgacggatatagccacctctattggtacagtatgggaggcaatctgatcaaaaaggttacaaacggcaaatacgaagtaaaagacttcttgggatatgacgaagaggacggatctttctattacaccagcaatgaagaaagtcctttgcgtaaagcagtctacaagatagataagaaaggtaaaaagaccaagctgtctcaaaaaagcggaaccaataccccgctcttcagcaaatcaatgaagtactacatgaataagtttacgagtcttgatacccccatgttggttacgttgaacgacaattcgggtaagactctaaaaacattggttacgaatgacaagttgaaacagaccctgtccggatatgctgtgccgcagaaagaattctttactttccagactacggatggtgtaaccctgaacggatggatgatgaaacctgttaatttctccgcatcgaagaaatatccggtgttgatgtatcaatatagcggaccgggctcgcaacaagtattggatacatggggaatcagttgggaaacctatatggcgagtctcggctacatcgtagtatgcgtggatggtcggggaacaggaggacgcggagaagccttcgagaaatgtacctatctgaaaatcggagtaaaagaagccagagaccaagtggagaccgctctctatctcggtaaacaagcatacgtggataaagaccggatcggtatttggggatggagctacggcggatacatgactctaatgagcatgagcgaaggtactcccgttttcaaggcaggcgtagccgttgccgcaccgaccgactggcgtttttatgacactatttataccgaacgtttcatgcgtactcccaaagagaatgcagaaggatacaaggcctcatccgcttttacccgtgccgacaaactgcatggcaacttgttgctcgtacacggtatggcagatgacaacgttcatttccagaattgtgcagagtatgccgagcagctggtacaactcggaaaacagtttgatatgcagatttataccaatcgcaatcacggaatatacggtggaaatacccgtcagcacttatacacccggttgactaacttcttcttgaacaatttgtaatggctgacagagtacgtaagcctgaatggctgaaaattaatatcggtgccaacgaacgatacaccgaaaccaaacgaatagttgattcccactgcctgcacacaatctgcagcagtgggcgttgccccaatatgggagaatgctgggggaaaggaacggctactttcatgatcggcggtgacatctgcacccgcagttgtaagttctgcaacacacagaccggtcggccacatccgctggatagtaacgaacctactcatgtggcagagtccatcgcactaatgaaactcaaccatgctgtcatcacttccgtagaccgtgacgacctcccggacttgggggccgaacattgggcacataccatccgcgagataaagcgcctgaatcctcagactaccatcgaagtgctgatacccgattttcaaggaaaaacggaactggtagatctcgtgatagaggcccatcccgacattatttcacacaatatggaaaccgtacgccgcattagtccgctagtgcgcagtgctgccaactacgacacaagtctgcaagtaatcggccgcatctcttccaaaggaatgaaatcaaaaagcggcattatggtcggtttaggagaaactccagaagaagtggaaacattgatggatgacttattgactgtcggttgccagattcttactatcggacaatacctgcaacccagccaccgtcattatcccgttgcagaatacgtaactccccttcaatttgcaaaatacaaaacaatcggtttagaaaaaggatttaacattgtagagagcgctccccttgtccgttcatcctaccatgcagagaaacacatccgttaagcaaacaaaacacaggcactatttgttttataagcagaaccgacaaataaacattaagtagagatggagcataaaggaatactttcttctgcatttaacatgtcactgggttttgtccccgttattatttccattttattgtgtgaacttataacgcaagacacggctatttacatcggtacaggtataggtatcgtaggtatatatctttctcaccgacaaaaaggggtactactccctaactttatcctatacatagcaaccggagtattgtcattattatccttagccgcactcattccgggagattatgttccgccgggtgctctaccgcttaccctggaagtgggtattctcattcccatgttaagcctttatatgcataagagaaggtttatcaactattttttaaggcagataggcgcttgcaaaaaacgtttatatgcccaaggagccgaagccgccgtcgtatcggcacgtattgtcctgatcttcggtatacttcattttatcattatcagtattaccgttattctccagtctccgttgagcaagaccagcttgtttgtactttataagatactgcctcctacagtctttataatgagtatcttgttcaaccagatcgccatccgtttctttaatcacctgatagctcacacagagtacgtgcctattgtcaataccaaaggagacgtgattggaaagactcccgcgatagaagccatcaattataagaacacctatattaacccggtgatacgcatagctgtctccacacacggaatgctctttctttgtgacagaccgtccactgccattctggataaaaacaaagtggatgttccaatggaatgttatcttcgctatggagaatccttggcagaaggtgtcaaccgtctgatcagcaatgcaattccccaagaaaaagacatcaagccggaattcaatatcgtctatcactttgaaaatgaagtgacaaaccgtctcatttatctattcatcatcgatttggaggacgattccgttctgtgtactccccgcttcaagaacagcaagttatggaatttcaaacagatcgaagagaatctgggtaaaggcttcttcagttgttgtttcgaagatgaatacgaacacctgaaaaacgttatttatataagagaaaaatacaaggaatcttagacagatcgggcacatgccccttccagtctttcaccgtacgtgtttggatatactcaccttcgcaagtaatattggcggcaatgcacaacttcgtttgcggacggcagttttgtagaatgtcttccaccattttgtgattccgataaggcgtctcgataaacagttgtgtctgattctcagcatacacgcgctgctccaataccttcagtttcttgccacgttctcccggctcaatcggcagataaccatgaaacgcgaaactctgaccgttaaagcccgaacccatcaccgaaagaataatggaagaaggtccgaccagaggcaccaccttcaactttttacgctgtgcaatagccaccacatccgctcccggatcagcaacagccggacaccccgcctctgagataactcccatagaagcaccacctatcagaggtttcaagtaaccggaaatatcttcgggcgaagtatgtttattcaacggataaaacgtcaacgcatcaatatcaatctccttatctacctttttcagaaaacgacgggccgaacggatatcttcgactataaaataccggataccggaaatgatttccttattataagaaggcaatactttctcaataggcgtatcacctaaagtcacgggcagcaaataaagggcagtttccacttttaaatgaagaattaagaattaatctatctcaagaagccagatagtcggattcactcagcattgtatgatagtcggtaaactctaaaagatctttcagcttcatatctttatgctttttcatatacgaagcaacaatcctcgcaccgacccatattcctatcaatgccggagcctggcaacccaacatctcaacagccggagccggtttcatataataacggaataccatcggatcacgggcatgaagatgatcgttggaacagatataatcccagatagccttttcattctccctgcaccagtcgttttcctctttcgaataccccatcgcctcgcctatattatcataatccagcaagttctgcacaacgtaattaatctttccggagtgtatcatcaagtcaataaggcacgttccctcatgataatccatatcataacggctcagaagataaaacgaaaaacaatccggcacaatacgttccgggcgcatggagcggcactggtaatcgtaatagaaacgcttatacaaaggataatcttctcccatatacttatccagactgatacccaacagagaatctaccagaacgatagactcgttgaacgccgagatttgcgagtagacaagcggaacctccgtatcgggaacctccttcttcaacttccggaatcccttagtaagcccctcctctactgcatccaaattggggaactgagtttccacatcattcatcagacgaaccagcgtcgtatctgaatagaatttttgcaggcgttgcgaaatcgtatcatctttcaccgtgccgatagccagtacatcctcaatcagtatctttgtcggcatacggtaatccatcgtcaacttctgcatagcagaaaagctgttggagcgaacatattcgctcaacagcttatcatatctcagaacagaaatctctccttctttctgctccgtaccttttcctgtgcttatcccacaggaggcgagaagcatacttattataataagaagagaaatccgtaatttcataatttattatccgtaaatgatattaccattttcgtccttgtactcatcaagccccttctcgtatgtagccatagcacggagactcatacctacgctggagaatccaccgtcatggaacaagttctgcatagtcaccttacgggtgagatcggaaaacatcacgatacaataatcggcacattcgtcagcagtcgcatttcccagcggagacatacggttggcaaagtcgaacagcttatccatacctttcactcccgaacctgcagtagtgaatgtaggcgactgagagatcgtattcacacgcacactatgttcgcgtccgtagatataaccgaaactgcgggcgatagattccaacagcgcttttgcatccgccatatcgttgtagccgtagaaagtacgctgtgcagcaacataactcaatgcaacgattgagccgtaatcggcaatagcgttcagtttcttggccgactgaatcattttgtggaatgaaacggccgaaatatccaatgtcttatccaacattccatagtcaaggtcatcgtaagtacgtttcttgcgtacgttgggagacataccgatagagtggagcacaaaatctatttgtccgcccagtatatccatcgaggtcttgaatacattcgacaaatcctccacactggtcgcatctgccggaacgatctggcaattcagtttttccgccaaagcattgacttctcccatacggatagccatcggagtatttgataatgtaatagttgcaccttcttctacagcacgttcagccactttccaggcaatagactgatcattcagcgcgccgaagataatacctctttttcctttcaacaagttgtaactcatatcttttaatagttaaattttgtgcaaagataggatatttctgcataaaaacacgagaagtgtgcaaataatagacacaaatgacaaaaaatacacgtattctatcaattagtccacattcccttgaactttcactcctatctttgcaatcgttaattacgagttcttacagtgctcggcagaatgccaagaaaaacaataaaatgtataaccctatagaaaattagattactaaatgaacacattgacaaaaagattcctctggatggctatatgttgtttgccgtttatttcaggatgcaaacaaagtgagtgtgccgtagaagagaacttgataagtgatgctctttaccggaatttacctttcgaaatgcctaaagtacaacaaccggcttttcctgcttatgaagtgaacattgaaaaattcggagccaaaggagacggtttgttcctaaacacgaaagcaatcaacgatgctatcaaagacgtaaaccaacatggagggggaaaagtgattatcccggaaggtatctggctgacaggacctatcgaactgctaagtaacgtcaatctttatacggaaagaaacgcgctggtactcttcaccggtgactttgaagcataccccattatcgccacttcttttgaagggttggaaacccgccgttgccaatctcctatctcagcccgcaatgcggaaaatatcgctatcacaggatacggtacattcgacggaaacggtgactgctggcggccggtcaaaaaaggaaagctgaccgcatcacagtggaaaaagctggtcaattcaggcggtgtgctcgacgagaaacaggaaatatggtatcctacacccggttcactgaaaggagcaatggcttgcaaagatttcaatgtgcccgaaggtatcaatacggatgaggagtggaatgaaatccgtccttggttacgtcctgtactattaagcattgtcaaaagcaaaaaaatactgctcgaaggggtcaccttcaagaattcaccgagctggtgtctgcatccgctgtcttgcgaagactttacagtgaacaacatcatggtcatcaatccctggtattcacagaatggtgatgcaatcgacctggaatcttgtaagaatgcactaattatcaacagtgtgtttgatgcgggagatgacgcaatctgtatcaagtccggcaaggatgaagacggtcgccgtcgcggagaaccttgtcaaaatgtgattgtgaaaaacaacactgtattgcacggacacggcggattcgtggtaggtagcgaaatgtccggtggcgtgaagaatatctatgtggaagattgtacttttatgggaactgacgtaggcctgcgcttcaaaagtacacgtggacgtggcggtgtggtagaaaacatctacattaataacatcaacatgatcaatataccgaacgaaccgctgctcttcgacctgttttacggtggaaagggagctggtgaagaatcagaagaagatctattgaaccgcatgaaaaccgctattcccccggttacagaagaaactcccgcattccgcaacatccacatttcaaatattgtgtgcagaggttcgggaagggctatgttcttcaacggattacccgaaatgccgatcagcaatgtcactgttaaggatgtcgtgatgacagaagcaacagacggaattgtcatcagccaggtagacggggtgaccttggaaaatgtatatgtagaatcttccaaaggcaatcatgttttaaacgtgaaaaatgcaaagaatctgaccatagacggcaaggtttataaagaactaggagcaaaagaagaaattttaagtctcaaataaagttcatgatatagaaaaccacaatatcattatatagagtaaaaagctcaaatagcagactataatctctttaaaagatagacagtctgctattttttctgttacttttgcaaggagaaatacgacgtataatttcagcctttaaaatcatgaaaaagaatctttttattattgctttccttttaggagctttcagcctgtcggcccaagtgcagaaacaggagaaaaccattacagttgaagtgcaaaacaactggaaccaggcaaaaacagatgctccgatcgtcatccatctacatgaattacacgcaggtttcaaagtaaaatccgccattgtcatggaaggtacaaaggaaataccttcgcagttggacgatttgaaccgggatcgcaaaatggatgaattggctttcgttgccgatcttcctgccaatggcagaaaaacatttcaggttacactttcttcagaaaaaagtacaaagacttatccggaacgggtttatgccgatatgtttatcgtagacaacaagaaaggtaaacatcaacgggtacaggctatcaccgttcccggcaccagcaatatatacagcatggtacgccctcatggtccggttctggaatcggaactggtaggataccgcctctatttcaatgagaagcagacgccggatatttatggaaaattcaacaaagggctggaaatcaaagaatcgcagttctacccgacagatgagcaattagcaaaaggattcggagatgacgtgcttcgtgtattcgacagctgtggaccaggtgcattgaaaggttggaacggacaagaagcaacacacatcactccggtggagacccgcacggaacgcatcatctcttacggaccggtacgtgtaattgcagaaattgaagtaaccggctggaaatatcaagatatggagttgaatatgatgacacgctacacgctctatgccggacatcgtgatcttcatattgaagcattttttgacgagcccctcaataaagaagtattttgtacaggcgtacaagacattgtaggtgcttccaaatccttctcagaccacaaagggcttgtaggaagctgggggacagactggcccgtaaacgacactgtaaaatatgctaaagaaactgtcggactaggaacttgtattcctcaacgttatgtgaaatcagaagaaaaagataaagcaaacttcctttatacaattaccgcaccgggaaataaatatttccagtatcacaccactttcacttctatgaaagagacattcggatataaaacgccagaagcatggtttgcttatctccgcgaatggaaagaagagctggctcatccggtgacagtaagaataaaagataaccgcaccaataaatagggcagatacaaatacaactaaacaaaaattacgaggtatctaccaatttttctatgactctgcacaaatattcctccttgtgcagagtctttttttctacctttgccatcagataaaaccaacgaatcatttatataaaataatctatctataacatgaaacgattaacacagactttagccctttgcttattaacggtttttaccgcagtagcacagaagaactatgtatctgaagtatgggtttccgacttcggaaacggtaaatacaaaaatccggtgctttatgccgactactccgatccggacgcttgtcgcgtaggagatgatttctatatgacttcatcaagtttcaactgtttgccgggattgcaaatccttcattcgaaagacttagtcaactggacaatcatcggtgctgctgttcctaatgtcctccctcctattgaaactccggaacgaccggaacacggcaatcgggtttgggctccggctatccgtcatcacaatggtgagttctatatcttttggggagatcccgatcagggagcttttatggtgaaagccaaagatccgaaaggtccgtggagcgaaccggtcttggtgaaagcaggaaaaggcattattgatacttgtccattctgggatgaagacggtaaagtatatatggtacacgcatacgcaggaagccgcgccggactgaaaagtgtaatcactatctgcgaactgaatacggaagcaaatgcagcgatcactccttctcgtattatcttcgatggacacgaagcacatcagacttgcgaaggtcctaaaatgtacaagagaaacgactattattatatcttccatccggccggtggtgtaccgacaggctggcaggtcgttctacgttctaaaaacatctacggtccttatgaatggaaaacagtacttgcgcaaggcagttccccagtcaacggccctcaccagggtgcatgggtagatacccctactggagaagactggttcctccattttcaggatgttggcgcttacggacgtattatgcatctccaacccatgaaatgggtgagcgactggcctgttatcggtatcgataaagatggtgacggttgcggcgaacctgttttgacttataaaaagccgaatgtaggtaaaacatatcctatctgcactccacaagaaagtgacgaatttgatggatatacactttctccacaatggcaatggcacgctaacatcaatgagaaatgggcatactatgcaggtgataaaagttatgtaaggttatactcttatccggttttagaagagtacaagaatctatgggatgtagccaacctgcttttacagaaaactccttctgataatttcaccgcaacaatgaaactgacattcagccctaaccccaaaaataagggtgagcgcaccggacttgtggttatgggtagagattatgccggaatcgttctggaaaatacagataaaggtctggttctgtcgcaaattgaatgtaaaagagcagataagggaaaaccagaacaagcaaatgcttctgtcgatctttctcaaaatacggtttacctgaaagttcgtttcagttgtgacggaaagaagatcaaagccagcgaaggcggacatgacctcattgtgatgtgtaacttcagctacagtcttgatggaaagaagtatgaatcattgggcaatcctttccaagcaagagaaggacaatggatcggcgctaaggtcggcatgttctgcacacgtcccgctatcgttactaatgatggaggatgggcagatgtagactggttccgtattactaaaaaataagtagttttattcagaataagcatagttaatgaggctttcaaaagtctccaacaactatcttttaggcacagattacacggatttcacggttttaactaattaaagaaccgtgaaatccgtgtaatccgtgcctaaataatttcatatttatagattgtttttgctttcgagacgccctcgtttcattttaatccattttttatttctacctttgcatctaaaagatagtcaatataggataaacaatcaaccaaaaactcaatgaagaaactagttatattcgatctggacggaacattactcaatacgattgccgaccttgcccatagcacaaattacgctttaaacaaattaggataccctacacatgaaatagaaaaatacaacttcatggtaggtaatggtatcaataaactttttgagcgtgcattgcctgaaggagaaaagacggaagagaatgtgctccgtgttcgcaacgagtttattccttattatgatattcacaatgcggatgatagttgcccctatccgggtatttcagagttattgtcttatttgcagtccgaaggtattcaaattgccgtagcctccaacaaatatcaggccgccaccgaaaagctggttgcccactactttccggaaattcatttcactgcagttttcggccaacgggaaggaataaatgtcaagcccgacccaacaatcgtttttgatatattaaaacttgccaatgtacaaaaagaagatgttctttatgtaggcgattccggtgtagatatgcaaacagcaaccaatgcaggtgtaaccgcttgtggagtgacatggggatttcgaccacgcacggaactggaagaatttaacccggtatatataacagatgctgccgaaaagattaaaaaattggttctttaataactataaaagagactctccataatattgtggacagtgccaaaatggaggatttcatttgaaatgtatcccccattttatatatttattattttgtaaacacaatctctcctttacgtccgccaccacgaagaaagatttcataagtattattacctgattcttttatttccaacagatccaaatccgtattttttgtttgttccccgcgtataaccgtttttaatacccctcctgttttccgcccagttgaaagtcctcctttccaagtgagtatatattgttttccttctgttagattggttattgctactttttctgtagccaaagtcatgcaccagttattgggctgttcaagttcgatcgcaatatcccaggtgaaatgaggagttccggttataccagtttcttccgtaatagtatcttccttgctacatgatgcgataagaacacaaagtagcaggaaaagcattgctttcctaaatatatccaatggtctgtttattatcgtttctctattcatattctctttattttatgaatcggtttcataattctatatttctgcgtcacctgatctgtttcaatttagttacgccaccattatctgtcgtcgctttcaaatcaatttctcccttataggccgataaatccacttgtctatcagagaaagaaactgccttaccattaatatagaagtacacaaatgcttctgcgccatgacctactatctttgccacatctccctcaacaagtattgccgcatcttccagccaatcatagctagtatcttcactgcccccggcaagaaaacaacccattccggcattatataatttactattcgtcttcagccgcaaaaattctacataaggaagacttccgtctgacttacgaggcaaggcaagctgggaagcatccaaactaacaaaatcatcatccgtcacagccatatctaccggaagaaaagagttgtttgctatttcacattccgcttgattaacgtctatgatatgttttcccgaagatctcggtttatgcgacaagttattctttataatatgaccatatcccggcacgtcaaccgcttccgacgcagtcttcctgttcaacatacagaaattggacgggttctgataacccgtattattataccacgctatccctcctaaatgatgattggcataaaaccccttattcttattcatataagcaaggcagtactgaacaatgtgcataggaatcacacttggtgctttaggattatcactcattccatatcctccggacttaaatccggtgccgtcaccagctttgccaccgtctttcgtatatccattcaagaaagaccaacagttatcaatggtaaaaaccgcctggcagttaatcaaatcaaaaccatcatcactgttataccacgcacgacacccccggaatacattgcccgtatattggggagaagtgagatgtccaccgaatccatctacatttccacctttaccgccatcggatacaggatcataattattataggcatcgcaattcagcaccagattgttcttacccgtcactatatagaagccgatcgccataccgtcatgcatcgacagatgttcgtagatattatcacttcccccttcattgcgaaaacattcggactgggtatgtcccacaatagtaacttgtgttcccaccacctctatatttctgaaatgcaaataagagccgcttacataaaatacaataacacgttcattttccggctttaccaccgaaaggtcaaaaaccggacgctcttttttataaccggagtaacaaattcgtttgtccggtccagttccactctttgacattttaaatacccggctccaagtagtacttcccgcagtataatgttccattatctctgcttccgtcactcgatatgtaccttgccggatatatacagtatctcctgccatcacttttgattgtgctttacccaacgtggcaaaaggcttatcaatcgtcccactgtttgaatcgcttccattagtagccacaaaataattcgtagccgaaagagaaaagaggaaacatcctataaaaaaaagaagaaggctaatacgtttcattgtatattaagtattatgtagcagcaaagctactgttttttataccataggagctgtaatatcgtacgtaaagaatagaattttgtcttttctacttcaattatcagacaaattccagcattaacaatcatagttcataataacaatagtttgatataaggataaaaatgcatcctttatatacaaatttgcaggtgaatactctcccaatccacttcctttgtagaaagaaaatattcaatctttataacaatataattatgaaaaacttattttatgcgcttacattttttagttttgtcacagcttgtagtgataattcagtccaaaatccaacaccacctcccgtgtctgataatggtgataacaataatatgcaagttgttgagtttctaagaaatcgtgctatggtggcaagttataacactatctttcctaataaagaaacagaaagaatagaaagaaaaggcgtactactcagttggagatggctttccaccgatccggacgatattggttttgatatctaccgcaaagaaggtaactataaattccaaaagctaaacaaaactccgattatcaatagttctaattacaaagatttaacagcaaacattaataagattctcaaatacgaagttcgacaagcaaataccaataatattttatgttcatgtaactttactccggaaatggcacagaacttttaccggacggtcccattaaacaataataatctgccatatcccgatttagtatataaagcttcggatgcagctattggcgatttagacggcgacggagattatgaattggttctgaaacgtgaagtgtcacctcttgacaatggtagcacgggaattggaattactcccggaagttgcctgttagaagcatacaagctaacaaccgggacatttttatggcgtatcgatttaggctctaatatccggcaaggtattcattatactcccttcattgtatatgacctgaatggagatggcaaggcggagatcgcagtccgcacctccgaaggtaccgttttcggggacggaacgaaaataggcgatgtcaaccaagatggaataaccgactatgtagacagggctccccaaagtgccacttatggcagaattatcacagggccggaattcttatctatcattgaaggcagaaccggaaaggaagtagcccgaaccgactatatctaccgtggtgaaaaaaataaatgggtgacatattggggagataattgggcaaacaggatggatcgttttctgatgggagtcggacacttcagatctcaaaaaggaattccaagcctactcatgtgcagaggatattataagaactaccagattgtagctttagattttactgataacaaaataacagagcgatggcattttgatacagctgacaactattcggattatatagggcaaggtaatcataatttagcagtcggagatatagacgatgacggaaaagacgaagtcttatatggggcatgtgtcatagaccataacggtaaagggctatatagcacaaaattaggacatggtgatgccatgcatttgggcaaatttgatcctacacaggaagggtatcaagtagtagtctgccatgaagaacccaaggagtatggaaatattggaacagaattccgggatgccaaaacgggcaggatattacattatattcccggaaacggcaaggacgtaggacgttgtatggtcgcagatgttgatccggacagtcccggatgtgaatattggtcgtcagaaccggacggtgtcatgtattcctgcaaaggaaatgaactgacaggtaaaagggcacctatagccaaaggtggtgatacatcatacaatatgacaatctggtggagtggatcattaaacaggcaaatgcttgattacctcgttattcacagctataccgacggacgtttgttcaatggcagcgattggggtgtaaaaacagccagcggaaccaaaaacaatgcctgtttttatggcgatatttggggagactggcgggaagaagttatcttcgttgatgaaaatgatacagagctaagaatctttactactgattttgaaaccgactatcgtttccatcctctaatggacgaccatttatatcgtttaagcgctacacatcagaacataggttacaaccagcccactcatccgggttactatatcggttctgacttgaacaaataaaaaagaaaggcgtgtatgctttccgcaaagaacatacacgctttttataaaactaaccctattcaaaactctatcatttccttacctcaataaatatcagaaagcaaatacatatcgggagcttactccaggtctgtcatatttcaatccatcaactttggtacttccactgcttgtcaactgtactccaaatatacttgtattattacgctctgtagacgaccaataatacatgtcatttttcagtccgtcactacctgttatttttcccaactgcgtattcatcgtttcccaattagttaccattgccctcaaatcaccgacagaaggaataaaccaaccggaagaaatactcggagcaaccaaattatagttattcaaggaattcactaaaagtgacttattctttgcttccgcatattttttaattacttccgtgtgattataccctaatcgctgatccctcggcgtaccattcaatgttccggtagacgccgatccatcccatcccatcggacttaaatcaatataggaatttctttcggcaaactctgtacgataccaaactcttatttcatctttctccccaaaaacaatattggtattctctttcagccccaaaaccaatccatgggtacagcccggatgatcacgcaataatgcatcttgacgttcagaataagtaaattcattatcttctgtaaaaggatataacacagaaggcatcggattaccaacaaaataaacgactcctacacaatcatcgctaacaggagcattatcgtcaacagaagccaacgcgccattagaatatatcagatcacccactttcaactcatgatccacagtttgcagtcctccgtctatctcacaataaatatactctccggctttcaactttgtcgcatctatcgagtattttttaagcccgttgtctactgaactgataaaacttcctcctatttgctctactttttttgtcggatttaccaaaacacggtaagtcgttgtttccttatcataataaggaatgatcacctgctcaccaatagaaaatttcacctctctcaaagatacactgtaagatggcagttcaggagaaacctcattagtgaaattataagtaacagaaggcagttcggctaccatcaaggccatccgatgattcattacaaaagttattgtacttccgtctgctgaagcctcccctgtcattaaatcattatttgtatatctgtcaccactcagatctgtgtcaacagtccagttccccacaatcgtttcaaacggatcctccttcgtcatatctatagttatattttccttataaggataatacgcataaaaagtcacggtttccaaatcttccgtacacgaaagacgtcctccgtcaattccccatattccatcattatacgtcgcaaggacatttttaatgaaaacttccttatcactatttaccgcaaaaataccaatcgcatccccgtccgaaaaagttgtcttgtaagtcacatcagtgacagcacgacttacattgccattttgttgaatactggaatcaaccacctcaatctttaatatattactattgacggccagcttggcatcctcatcctgcgaacatgccaccatcagaaaagaaccgagcaatacataaattacaaaaatgaatttacaatatctcataatatttcttcttttaaatgtttaattatcatataactccatacttattgacctgccccctgactcacaatagtttgagtatttcccccatcccattgtacatctcctggttcaactcctgtaatagtattaccgtcacttgtattaatttcctgacgatctccttcaacccatccctgaacttctccagattcgacagttacataaatcgtttcatccctctcactgattattacagtgtacggatgtatgtgtccgggaaccaggtccatctcaccaatcttcttgataaaagatttcccgcccatttctatctcaaaagtaacctctgaaactttttgaggaaatacaatcaatgaagtccgcatattttcaccggccataaccttctgagataacgccaaagccggtgcatcttcgacaacagcggtcgtgccgtctattgtattgaaagttcctttaagtttcaagccaatcaacgtataagttatgtcatccaacgtcaaaccgtcttttccttcaaaagaaaaatcaatcctgctcatctgatgcgaaaaagcaaagttgacatccggattgttccgtccggcttccgtagtcgcataaagaaaatcaatggacatttgcttttcctgtgtttgtttatccgaagtcgtttccactgttatacaatcggcaaccataacggaagtctccgtaaatggataataggcggacaatacatgttcctgttttcccaggaaataaatagactgattctcgtcaaatgctgcaaacgaagataaatttcctgtatatttataggaaatatttacatcatcttcacaagttacccctatgcgatcaccgtcagtccacgtagtaccaacagtccgggacttctccacaacctccgtgattgttcccgaaattgccgctttcaccccgacgatatcatcgccggagtaatcatagctgctacatccccaacataagatagacaatgcagcaataaatggcatttttcttttcataatactataatttaacaagttatattttcggaataaaggctgttattgtaatgttacgctcatcaatccaatcactacatcattagcaacggtttccaatgtcagttcttccagagtcttattcttatccaacggaatatccagtatgacaccggcgccaccttcaaatctgcggtcggcagatccgcgaagtttcaaagcctttcccaaatcacgactcacaatccctgtttttaaatgaaaccgatacgggcgaggtctgggagcatcaaaagcaaaatcatccagataaaaatcctgctcaatcggacaccaattatcagggtttaccaattccagcatctctgaagttccatctgtataatatacacgtacaattccgttggctatccggcactgcatatgattggtgctccctgcaagcaacaaataagcatgggaagcttttccagagagaggaaccttcaccatatccggataattatcccataaagaagtgtaagcgatattgttaccttctttcattacacggaaaggaataccaagtgaagttttatacatattatccttcaccaagctacgtaagccggaatcatcaatttcagcagtcagcaatggatggcaccattctccaattccctgagtcggtaactgcaaagttgtataaggagaacgtggagataaatactcatttttaaaaatatccgctacagaagaattaaacagcttatccatgtttaccacacgacatttaccagtttcaatattttcaaatccattgtatacgacttgaggaacattgacatagacattgacaggttgccaccattccatactcccttgacgagtgtacacaaagaaagtatgatgtcctttcttatctttattcactttcgacgaaagtttggttgtgtttaccttcttcgttaccagaacattttgcgggtcatatactttaagaaacgaaataccctgaggagcgttcaagtctacctgtccttcctgtgtaataacaatttcatcatttgcaatctgttgtaagacattaccttcccattgaatctcgatttcagctttggtgacagccggtacagaaacaacaatcagaggatacccattcgcagcttcttccgtcttccatttcacagcttttccattcacctttaccaaacggatcttatccttcacagcattcacttgcaacgtcaaggccaatggttctttaaaacgttgtgtcacattataaatatccacatcacccttacgtaaaaattcataggctaaatcagccattgacatagacgccttatcccacgccataggaaatcccggccggatcaccagttttccattcagagcatctggcgaaacgccatacaagccctgtattaaagtgcgggatgttatacctatctggtctgcaaaatcacgataagtttcccgccgaacagcatcatacaaacttatctgtccgaaattgcccggacttttcccaaggtacatcccatccagaacagaacctttcaacaaattaaaaccatcatctccacgccctgcctgaaaaaaagcaagcgcagtatgcatcacctcagcaaatgccacattattcacactccacacataaggcatccagttcgtagtggataatgtttcataatcacgatccagcccatctgcaaataccggaatatgcggaatagaggtatcaacataccgggttgcctgataagcctggaaaggatcggctgtttcactatctatcgcgtgatagatagtccacaaaccagcgctttcatgtaaacgcttataccccatgaaatcttgatactcggcccaataccctttatcttttatccaaagcctttcattcatcgctttcaatatcttatccgcctctttttcatagggagtagcatcttcccctatcttttcagccagcatagcggccaatttattagcacgatagttatacgctgacgaatgagttacagctccactgttataataaagtgcatcactggcccaaatacagcaataagcatcatacagcccgtcattatcagggtcataattcaatttttcccatgccagatgactagtcaatacaggccacattttacgtacatagtccaaatcgccggtccagttgaaatgccagagcaactcatcaatgtagcaaagattcatatcataatgatgcatttgatcctttcggtaaggagtacggcaaatatacccgttactgtaatgcggggtaccccatttttttaccgaacgtgccaaatgtaaagcagtatcctgtgtaggatgaggtattgtcgcagggacatccgtaacctgacttgccgcatacgaatcgaaatgcgtacgagccctatcatgccagccaataaaatcaccgatataagcagcacgccagccatttaattgcgaacgccaaccaatagctccgtgaagccatattttgccatcccatattccatcagcggcagccgccaaagcccctcccaatggattaaaatagggatccggagtagaaatctgaagagaagactctatctccgaacgccacttttcagacttatcgtatagggaagttccttcaacaagagtcggtaaacgtaactcctgatcttccacaacaatataagcagtcgtttcatccaaactcaatttataatgcttctgttctttcggaagttggggagcatcaaaactatcagcacgatcagcacccatatcaccattgcggcttaaattcttcgctctaatctctgaaatatagcaatgtaaaagagcaccctccggcatatccttcattgtaaaccgccatattcctccttctgtgtcaggaaatgccagtacggagatatttaattcacctttgcccaacaaaggatctatcagacgataagtacgccttcccgccctatatctggcctcacaaaattttaaagaatcaagggctatactttgattaccacattgcaagcgaaaacagatatgcttactatccttcggcttataagcagcaaacacaggccggtcactcgtttcaatcctaaagtctgtaatacctccgtacaatgcacgagtatagcgattcttgccgttcacacaaacaaaatcattaccatccggacgatattgtatagtacgttttatcccttttttacgttcattttgggaaattgtctttgttatatgcgccccatctgtcgccgcttgtactacaagtgagaacgcagagcacatcagaaaaccaatcaaacaacttttattcatatttttctatcctatatttattacatttacttcaatttttaacgatacgcttcattttgtacatacagcccctctttcactttcatctgcgaatcgggaataggatagagataagttccatcctttatttgccggatatacaataacaaagtcggacgtatgacattaccattggcatccactgcatattcctgaaatttatcacgaacagcttgaagattattatgacgtaccaaatcatgccaacggattccttcacaagccaactctctccgtctctccttgtcaacacattcctggaatgcagccggttccttttcggcatttgttaataccggtattcctgcacgccgccgtatcctgtcgaccatatcaaccccttttgaagttggacctacaatctcggcatacatcaacatcacatcttccaaacgaatcaacgggaaattcagagggaaataagtacgatccactatctgcgcattaatatcatcataccccaatgcttctcttttcattttatgttccaggaatttgataaagaaatcctcacctgcatatttcgtcacactattaggattgtcatcattcacaaacttggtcgtatcaatagtagccagacaccgtacatcaagaaaatgtccttcttcatcttgttcctctttcaataaattatcaagccccttcgcacaagcaatactattaccggacatttcaagagtaacatatttcgaaggtaaacgaggcacggagtgaaataccatcggattaccataatctttagcgactatatattgaatttcaaagatgtgatatttattatcattctcatttatccacattctttgccattcacttgcatttttagcccaaaatttaccggttgcatccgcataatcaattacttcttcaagaagctccctagcgagttcctttttagtttcatcatacagaggaaatcccgccattgtcagataaactcttcctaacaatgcctttgccgcagtcaatgttgcacggccactggcggatttccttcctagataatccttcggttcctccgtcaggcttccgacagcatattccaaatcaggaataataaccttctcataaatttctacagcctccgactgcggagtcgacattgcttctgaaatagtctgaggaacaagcgtcaaaggaacacgcccgtaataacgaaccaaatcaaaataagctaatgctctcaaaaaacgcgcttctcctatttgttgttcctttattccttcaatagtataattcaccccatctaccttggacaaaaacaaattggcacgcgaaacaatctcaaacaagtcattccatgcatcccgaactgttgcaatggtcgatatattagggttaaaagaactaatgtccatatagtcacgctgtgccgtactcagttctccgcaccatgtattatccgaacgaacctctgacataagtaaagcataagtcgacaacggaagcagtccgttatatactcctatcaacgcttgctccatttgcgacggggtcgtataaaagttttcagtagtacgggtatctaccggagtgacatctagccagtcactacaagaagagaataacaatcccatactcatagctccacttagtatatattgatatagtttcatagtttcttttattagaatgttacatttacccctaaagtaatagttctagcctgcggatatgaaccgtaatcatagtcactattctttccgtcattatttacttccggagaataaccaccttcatatttatcccacatcagaagattttctcccgaaatataaacacgggcataattaattatcttcttatttttgatgggaatacgatagcccagcgttacgtttttaattttaataaaatcggtactatacaaccagcgggtatcgtacagtgaacctgtattagagttattaataccgggagttttcccatcacccggctgttcctcggaaacccacatatttttccaacgtgacaatacattgatagatgctcccatacccggacgatccatgccacgaccgagcagactatatatcattccccctgtctgtccagtcagtaatacagacaggtcgaaatctttatatttaaaggtatttgtcataccaaaagtataatcgggatccggtttaccaaccaacgtacgatcctggtcattaatcttaccgtcatcattcacatcacggtatctcacatcaccctggatagaattggacattgtaggatatttcctcaaatcttccttatactgatacactcctacagcatcatacatataatatgccctcaaaggttgtccaaccatcaatacctgtgtattcgatttatcccatccaatgaaaaccgtactattatcttctcccaaactcaacaccttattcttattataagctatattcaaagaagtagtccacttgaaccttcctgtcaagttttgggtagtcagttcaatctcaaaccctttattttttatactaccgatattcccccatgcttgtgtgaatcccattgtaccaggaacagaaacctgatataataaatctttagtcgttttatcataataatcggcagcaagagttatcctgttatcaaaaaatcccaaatccaaaccaacattccaactgtgtgtcttttcccatccaagttctttattatcaattgaactgggagcaaaaccattggtcaggcttccaccaattgaatagttggaactacccatcagcccgatagcagcgttagtagaaatagaattatttccattcataccccagctaccgcgtattttcatttgattgaccacaaacttttccggccaaaacttctcgttagagattcgataggcagcagaaactgcaggaaacatcccccaacgattattctttccgaaacgtgaagaaccgtcgcgacgaatacttgctgtcaacaggtaacggttatcatattcatactgggcacgcccgaaataggataataagcgattgggagttgacaaggtagctaacgcaacttttatagcctcatcactttggttgaaaacttcaagtgaattatccgggaactgttgcgcagacaagtttgtagtggctcccgaagaactttccattgaataacctgccatagcggcaatattatgcttgcctaatttcttatcataatttaatacagcctgcaacagatatttggatgaccgtatatctatacggttggcagaactatgatacccttcaccatccgtccagttcttaattaccgaactcggagtaaaagtgcgagtctgacggcttgtaaaatcatacgcacctttcacttccgccctcaatccgtcaataatattgactctgataaaagctgaagaattcaatcgggatgtttcgatatgattggtgacctgctccatataagcaatagggctgatttttgtactagaccataaataagaggcataaggttccgcaccggaatatatcccagcatctggctctgcaactggacacattgtcaaaacctgatttgcctgctgatctttgccatccacacgcccaccatctttccagtccattgacggagccatattaacgcctaaagtgatgcgatcatacaattttgtctccacattagcccgcagattcaaacgtttgtaagcactctctatagcaataccttgctggtctatatatcccagagaaagccggtattgagtattccctctaccatttgaaacagaaagctgataattctgcatcggagccaaacgataaaattcatcctgccagtcaatcagtcttaatccaccgtaaccgggctgtgtccatcgcgggtcattcatatactcatagtttacccgattaccattcaaggcataacgggtatcccaatcatcatctgccgtagctccttttcctcctaaagcagcaaggtatctactattgttataggcagttcggaaagtgatccactcttccgggcttagtacatctattttcttttccaattgttggatactgaatgcagcagaaaactgtacccggactttatcatccttattagccattttagttgtaatcaaaacaacaccattagcaccacgagaaccgtaaatagcagaagatgaagcgtctttcaaaacttcaatcgactgaatatcatttgggttgatacttcccaaatcatctatcggaattccatccactacatataaaggagtggcatccgcattaatggaagcagctccacgcacacgaatctgtaattctgatcccggtgcaccattagttgaccgtacttctactcccgccaactgcccctgcaatgaagaagcaagattgggtgccggacgatcttcaagtttcgctgcatcaactttggctatggccccggtcacattcccccttttggctgtaccataaccgattacaaccacttcgtccatttgcacgtcattttcgctcatcctgatggcaaaaacactctttcctttaatagaaatagtctgtgaagcatatcccaaataagacacctcaattgtcttagctttatcaggaactgcaagagtaaatttgccatccacattggtaattgtcattccagacttcccttctactacaatagttgccccgatcaacggttcatttcgttcatcaaccaccgtaccggatatggtacgtttttgtgcaaatactgtgaccgaatggagagccgaaatcatcatcaagaagaaaaatatatattttcttctccaacagctaatctcacaaacagtgcttttcatacattctagttttcatttaataatattagttttatacaatctcataaaccatggtaatacaaaatccagttatcaattcaacagcaaatatagcggcatacatgaagctgctcatgcatttttctccatataccatgcacatttgtccacctgaacattcttatatagtccctctttcttttttttcaggttattcaagaaattcaatgcaaaagtctgaatttaaactttaaaattacgtgctatttatctatctttaccgcaaatctaaaaaaacacaatcattattatcactatacaagtatgagattcttcattaaagctacaattttcttttttatatgtacatgtattatatatccggcaaacgcctccatagaaatacatgctaggaatctgactgccactgacggattagccaataattctatcaggcatatctatcaagacagcaaaggattcatttggttttctactttaaatggcctgagccgttatgatggaaattcatttgttactttccgtccccagagcggtgaagaactgtcattagcggatcatcgtatcagaagtgtacaggaagactccgacggattcctatggattacaacttccgcggaacaaatcagttgttatgatttgaaaaaagactgttttgtagatttcaccggcaaaggagaaatgaaagaccgttataatgaagtcacaatcctccctaataaggatatatggctttggggaagggtgcaaggctgccggaaaattacttataaaaacaacaaattcagttcggaaacatattctaccgacaaccataaactaaaatccgacaatatacgttttcttagtgtatttgattcaaattccatttggattggtacaggaaaagggctgtatttacttaaagataacacgctcgaatgtatagattcgactcactacttccttcaaagcgcagtcattgataatactatttatttcataacatcagagggatttatttggaaatacaaccagcagcacctcacgaaagttgccaatactgccacatcaactgattttttgctaacaggcaatattgtattacgtaacgaatggctgttatttaccaaacaaggcggaatcttattcaatcccaagaccaatacaaccagaattgctccggaagagctcaatatccgtaatggattggtagtgaaagataaccacaacaactactgggttcataatcagactggatacattaactatattcaaaaagaatccggtagtgtcaaaaagattgatgtaagatcgtcaaagcttccatatttcattgattacgaacgctatcatgtctatcatgactccagagacattatatggataacgacttatgggaacggactttttgcctataatcctactactgaagaactggaacattttaccgcaaccgccaatcatacaaatcccatcgcctcaaactatcttcaatatataatagaagatcactcgggcaatttatggacaagtagcgaatattccggtatatcccaaattgaaatcataaataaaggggctgcaaaagtatatcccgaaggtgaattaaatatcgacagggcaaatgccatccgcttcatatcccacatgcaagatgacgaagtatggataacaacgcgtgcaggcggattatatatctatgataataaactaacaaaacagaaaagcaaaaagtattatgatataaatatctattctgcatgtgaggatagtaaaggtaatatatggttgggaacacgcgggaaagggctccaagtcggagacgaccaacactatatacatcaggcaaccgatacaaattccttagctgccgatccagtattctgcattttgcaagaccgcaaacaacgtatgtggataggaacgtttggcggcggacttgatcttgctgttcctaaaaaagacaaatacatattccggcattttttcaataagacttatggccaaaaggaaatccgcactatctgcgaagaccgtaacggatggatatgggtaggaaccagtgaaggtgtttttgtattcgatcctgaccgtattataaaagacccgaacgatttttaccaatacaatctggataaccatgccctgaaaagcaatgaaataaaatcaattatacaagataagaaaggcaggatatggattgccgaatcaggtatcggattttgcgtagccaatataaagaatgattataaagatatatcctttactcactatacggtcaatgatggacttgtccacagtgtagtacaagctttcattgaagatgatgaaggaaatatctgggtatccaccgaatatgggatttcttgttttaacccggaaaacaaaatattcaacaattacttcttttctaatgatatattggggaatgtatatacagaaggatgtgccaaattaaaagatggtcgtttggctttcggcaccaaccacggacttataatactcaatactaagcaaattaaaaacaaagagaaaattccgtccgttacatttacagacttaaagttaaacggaatatcagtccgtcctgccgatatggactctccattgacagccgctctggcatatacagatgccatcagtctgaaatattaccaaagttcctttgtcatagacttctccacttttgactatcccatttcgactaatacaaggttcagctacaaacttgaaggatatgacgatgactggagtattccttctacattaaactttgcagcttataaaaacttaccggcaggtacctactatctacatgtcaaagcctgcagcgtatcaggtatatggagtgataacgaggagacacttgaaatcaaagtaactccccctttttgggcaaccggatgggctttctttgtttacatactcattgcaggcattatcatgtattttgtatatcgtactatcaggaatattaacaacttgcggaataaaattaaagtagaaaagcaattaacagaatacaagttagtatttttcaccaatatctcacatgaattcagaactccgcttacactaatacaaggggctttggacagaatccaccgtacccacaatatccccaaggagatacgttactctatcaaactaatggacaaaagtacccagcgtatgctgcgtctgatcaaccaattacttgaattccggaaaatgcagaacaacaaactcgccctttcacttgaagaaactgacgttatcgctttcttatatgaaatctacctaagctttcaggatacagccgaatccaagaatatggatttcaaatttataccatccgtcaattcatacaaaatgtatattgataaaggtaatatcgacaaaatcgcctacaatcttttatcaaatgctttcaaatatactccttccggtggaaagatagaattcagcatttatattgataaacagaaacagctattaatcatgaaagtaacggatacaggtgtaggcatacccaaagaaaaacgtaatgagctgtttaaacgtttcatgcaaagcagtttttctagcgacagtataggagtaggtttacatcttacccatgaactggttcatgttcacaaagggaacatctgctatgaagaaaatccgtcaggtggttctattttcattgtaactttacctactgattcttccatttatcaatctaacgacttccttattcctgaaaatgccatattaaaagaagaagcacaaaaccatccttcgctttctgctcttaatgaggaaaatgctcactctgaatcagaagaagaaatagataaagaagtagaaaatatagagaaagaactaaaaacagaactgaacgcatctgatcaagagggtcctctaaacaaacggaaaatacttattatcgaggatgacaatgacgtacgggaattcttgaaagaagaactgaccccatatttcgaggttgctgccgaagcggatggaaaaaatggtctggagtatgcccataataatgatatagacctcattatcagcgatgtcatgatgcctggatataatggtttcgagataacccgtaaactaaaaagtgactttagtaccagtcatattcctataatcctacttacagccctgaatgcagcggaaagccatctggaaggagtgaaaagcggtgcagactcttacataacaaaacctttcagtaccaaactgttactggcaagcatattcaaactgatagaacagcgtgacaaactaaaggagaagttttccaatgacttgtcagccaaacgtcctgtgatgtgtacatcggataaagacaaggagtttgtcgaaaatctgaccaagatagtggaagaacaactgactaaccctgaatttactgccgatgattttgcttctatgatgtcactgggtcgcaccatcttttaccgtaaagtgcgtggagtgaccggatatactcccaaagaatatcttcgtatcatgcgaatgaagaaagctgctgaattgttgtcaaccaagaaatataccgtatctgaagtaacttatatggtcggcatcaatgacccgttctatttcagcagatgttttaaggctcaatttggcatctctccttccagttatcagaaaagataccaagagggcataagagaaacagaaataaacgaagattaataaatatatttatgtgtttgtgaacatatgtacatgtttaatggaattttttcactagtcggaataaaaagttcagactaattttgtctcagaaaaaattatcaacacatttaattatagcattatgaaaagatcagtattaattttaagcctggcagcctttgtattatcaagcaacgcacaagtattaaaaagcaatctgctaaatggatataaacaaggtgataaattggaaaaagctacatataataaagctgatgctccgataaaaatagatacctggtgtgaagcattctcttcccaaactgacaagaatgccggtagtcccattaccggacaagagctcagttatgagggatatacggaaaaaggagtatctatcaaaataggagaactcccggaaaatgtgaaaggttcaagatttagcgtatattccatttctgaaaagaatgactattgcaggggaactttatacctttcatttttggcaaacttttcctccgtcgcttccagtcgcttaggcgatttcattgctctttcccctgttcatactggcggtaatctgcgtgccagagtatatgtcggtaagatagacgatgaacatatccgattcgggactaatctgttaagagttaatgcagaatccttcaaaagccatgcgcttaataagacgcatctattggttctcaaactggattataaaaagaacgaggtttcattatttgtagacccagccttaacagcagaagaacctcaacccgatgtggtagcgaagggggacgaagataataacaaattaaaaggggggattcgttctatttcatttaggaaccgcgatgatttgaccggaaatgtcggtaacttccgcttctcttccagttgggcaggtgtgatagctcaataaaaatctatttttattattgcattatgatgtaatatggagcattgaattgtgtacaatgctccattgtttttacaatcatgtcacttaaattcacttctgtcattttacatcataataagtattatcctcctccttcacataaagaaaaaaaatgacttatctttaatagacaagctttctgtttttaataaactattgaggagtttattaaaaacggtatccaagtttattataaattataaatttcgattttaaggttctccctgtactttttcataacaaaaaagactgcgaaccttataaagatttgcagcctttagcttatacggtaactctcacagcttaactattgtaaggagcttctgatatattgttataatattgtactattctattttcattcttttttaaattctttatccattaatctttccgcttgcaaatatacaaaattaaaaaggctttgtcaagagtgcgctactataagaaaaagtatttgtaacaaagttccatatctaataccttacaaccataatatcgctatttgtggataaaactacatacaaaatggaattttttcatcatagctatttgcagaatcaacctaattttgtcatacaggtctaaaagaattattaatcatatataaatatcacagaaattatgaaacacatccttttttatgcattattctttattttaaagattgcgtcggcacaagcccaaagtcttgaccagccgaagaactatccagcagatgctatttcttcttttgctgaacgtctggaacctatgggacgcatcttggaagacgataattattatgtgtggtgttgtgcaccaattatagatgaaaagaataaagtacatgtattttattcacgttgggaaaaaaagtatgaaatgaaaggatggctggggcattgtgaaatcgcacacgccgtagccgaccaaccggaaggcccatacaaatatgtatcaacagtactgtccccccgcccgggctattttgatggtaatacatgtcacaatccaagcatttataaaatagacggtcgttactggctattttacatgggagcaaccaatggtaaatttggaacgaaacgtatcggatacgctgtagcaaactctatttggggaccgtgggaaagatgcgaaaaaccattattaatgcctggaaatacaggtgaatgggatgattatattaccactaatccagctttcttaaaacatccggacggaaaatactggctttattataaatcttgtaatgaaaatgaatatgtgaaccaacatatcaatggtatttcaggtaaccggaaatatggggtagcttttgcagataaaatcacaggaccttatcgacgatatgaaaaaaatccgatcgtcgatttctccggtttcggagaaaacaggcaagtagaagatgcgtatatctggtatgaaaacggtatattcaaaatgttaatgagagatatggggttctacgaccatacagtggggctctatttcgaatccaaagacgggctgaactggcaaaaccctcaaattggttggtttggagcagagcattatatcaaacaaccacccgctcctaaacatctcaaacgttatggacgtttcgaacgcccgcaagtactaatgaaaaatggaaaaccggcttaccttttcacggcttcccaagggggaaaagcagaaacatcttcaggtttcgtctttaaaatcaagcccgaataaacgaacatagaacttaaagtacacttataaaaaactgttatgaaaaaaattatattgatattatttaccttgttgcaattcccggcaaacgcaaaagacttgcctcactcctcctattggcacggagaagaaagaactcttcgatataaacccgaaggagaagagtttgtaataaccaatggaaataaaagatttactagagctatttatggaactaataccggctttcgttttgaaaccagtgacttccccgaattcggactttacatgcctaacctcggtggaagtgtatatatggctatatctaccccctcaaatattacttggataaaagatatggaattcattgaatctcgttttaaatccgggcaacgcacctacattgtgagagacaggagacatctaggaaacggcagtctgacaattgatgctgtagctatgtccgatggcgatggattagtagtaagatacaaagccaaagacatccctgccggcactaaaatcttgtggatatatgggggagccaacaatcagaaattcggacgtgagggagacttgaattccgacccagccgattgttttttcattaaagccaacaattgttccggaaatatatatcaaattaatcaaaacaaatttacgatacaatacgggcaccacaccagcaacagagcttctcaacataaagtaatgtccatagcaggaacctttcctatcggaactgatataaaagaagtggatggaaaccttattgaccaattggacgaacttatcacatcccgcaaatcaaacaaaccggttatcatagcaaaatatccggttagtaccattcctttctatattgaactgcacaaccctaaaagtcatagtgagtttcaatataatgatctcagtaatgttttcaacaaaggtgttgagttcagaacccaaatagcttccagaatcaaaataaaaacacctgatccatttctgaacacattaggaggcaccttctctggagcggaagatgctgtatggcaatctccatcgtatctacatggagccatctgtttccgcgaattacttcttaccggttggagaggggcttatctcgcagacttgatgggattagaagatagggcaaaaactcactttaacggttatcttaattcgcaagttatagatgttcccgtcacattaccccatcttcaggacacagccctaaacctcgcacggtctgcaaaaatatggggaacccccatgtatagtaatggttatataggaagagttcctaatagaagagacgtcatgcatcattatgatatgaatctagtctttatagaccaactgttgtggcatctcaaatggaccggagatcttgattacgcacgagaaatatatcctgccctccaacgtcactttacatgggaaaaaaaactattcgaccccgataacgacgggttatatgatgcctatgcttgtatctgggcttcagacgcattacaatacaatggcggtaaagtgacacattctactgcatataactaccgggcaaataaaataatggcagaaatatccgaaaaattaggaaaagatccaagcatatacaaaaaagaagcagaacttatattatctgccataaacaaagaattatggataaaagacaaaggatggtgggcggagtttaaagataatatgggaaaccggatacgacatgacaacgctgccatatggactatttatcatgcaatagattctgatatacatgatcccttcaaggcatatcaggcaacccgatatatagatacggaaatcccccacatccccgtcatgggaaaaggtttgaaggatactgccaattatgtgatttcaacaacaaactggcaaccttatatgtggtctatcaacaatgtcgctttcggagaaatctcacataccgcccttgcttattggcaaacaggacgttatgaagaggctttcaaaatgttcaaaggagctgttctggatgcgatgtaccttggttcaggtccgggaaatgtcacacaattgtcattctatgacgcagcccgcagagagacatatcgtgattttgccgatggaatagcgacaggggtacgtgctcttgtacagggtatgtacggtatcatgccagatcttattaataatagactaacgataagacccggattccccgatgattggaattttgcagaaattgaaactcaaaatatggcatatacttttgaaaggaaaggcaatatagaaaggtattctataactcctaatttactcaaaaaagatgtcagcttgtcaatggaaataaaagctataagaaacaaaattaaatctatcaaagtaaatggaaaagatacaccctatactttacttacaaccactattttatctccagaaattaagtttgaggcaggaatagctgacaaatacgatatcacgatagaatgggacggagaaaaaataaacagagacatgatatctgtcaatgtagccaatggcagccagttcagactaaatattccttataaatcaggaaaaatatatgacccgcaaaacgttctgcgtcatgcaaacttaaagaatgacatactaaccggcactataaccgctcaaaacggacatcgcactgtatttgtcaatatcaccaatggaaatatgaattattggcttcccatagatataaatgtcaacaatccgcttgatatcgtttgtgattctgaatcttcttctcttatttttaccttgaaaaacaatatggataaagtgataaaaggtgatttgtatatcaatggtaaaaaggtgaatgaaaacatcaatatagaagctcatggaaaaaacaactatgaatttgatattcccattgcatcttcaggaactaatagaataaaagtcaaatccggaaaagacacttactcttttcgagccatcaattggaatatctctgtaccggaaaaatcagtttataagacggtagacatgaagaaaatatttaatgacaaagtaagtaatatattcgcttatggaaaatatatgttcccaagatggaaatacaccacattacaagttccgacccaaggtatgggacaatggtgtcatcctcaaagtatttctgttattgatgaccgtggaataagaaataaggcttcaagaaataacaatagattcattatgccacaaggaatacctttcagtactccaggagaaaaagaatataataatattgcattcaccacattatgggataactacccgacttccattaatataccactaaacggtaaagcttctaaagcctatttcctcattgcagcttccacttattatatgcaatctcatatagtaaatggcgaaatcaaaatagaatatacagatggacaaaaagaagtactgaaacttatattaccagataatttaattcctttagatcaggatatattcgtagatggatatgctttcaacactaaagatccacgtccgtggagagtacgccttaaaacaggtgatgtaagcaaatatcatgcaggcgaacttggaaaaacaatatcgaacaacccgatatctattgatggtggtatggctacaatgcttgatctgccactcaatccagttaaagaattaaaatcattatctttggagacgacagccaatgaagtcgtgataggattgatgggagtaacgctagtcaaatagccacaggaggttgtgtcaaaacgttggtacaacctcttttatattttacagttctgctatattttcttttggctatgctgctttttccctcatgcatttggcaacaagttgctatattccaattatatcgggttataaatagtcccataaacatatatttgacaactgtaatgagcccctttccttcttttatcagtttagcacacatttttttgatattaaaggctatagcaaagaaagcaaagtccattgtaaccttgtcttctcccacatgccggaatcttctgtatgccatgttgtattttatgtgtccaaacacagcctctggttctatacccctcctgcctctatgcttgatcccttcttctgagagcagcctttcccgtgcctgccgtttgtattgatttaatcggtggttgacttctataatacggttcccccgggctttaaaacaactgccacgcaaagggcaaccttcgcatctttttgctttataccgggcactttcggtgatgtatccgctcgctgtcttgtcacgtttggttcctataaggttcatgtgctgtcccataggacaaacgtaataatcctcttgggcattgtaatggagactttcggcatggaacgggttgggagtataacagggacgctgttctttatggaagtaattgtacttgatgaaggcttctatcccattctcctgcatgaaccggtaattttcttccgaaccgtaaccggagtccgccacacagatattcggtaaacggttatagcggtactggaaagagtggaaaaaagatatgagggtcagtgtatcggtagggttgggaaacagacggaagtctgtgatgaattggttttcagtacctatttgcagattatatccgggtttggtctgcccgttcttcatggcatcttctttcatgcgcatgaatgtggcaccaggatcggtcttggaataggagttacgttctccaagggtatcaaggtgattgtcgtattctatcagcttgtcacgatacccttcaagttccatgacctgcttcttctttttgcgcagggctttcttttcttccttatcctttgttgcaggctggcgttccagggcttctttaagttcatccactatgtcagagagcctgcagggagtaaactccacggatgtgtcttttatagagttctcccgtgcaatggcttcatccacctgcgccaagagaatacggattttatccattagtctcgtacggttccgttcgactgtcttgcgccagacaaaagtatatttgttggctttggattcaatcttggtgccgtcgatatactccacatcaaggctgatgaaacctttatcggcaaggacaagaaccaactgggtaaatacattatttatttcctcctttacacggttacgaaaacggttgatcgtgataaaatccggatgctcattaccggcaagccaaatataatgaatgtcacgaaggaggtgcttctctattttacggcaagaatagatattatttatgtaagcgtagattatcaccttaagcatcattttaggatgataaagacaacggcccgtttccttataaagcttcttgaaactctcaagattgagattgtctataacagcattcacgatgcggaccgggtcgtttgcagctatgttttcatcaattctttgtggaaaaagaacggtttggttgggaatgtaaggacgaaaatgtaactttgccataacgaaaaactttatacctaaagatacgaaaactttggggaataacaaaacctgggcttgagaaagtctgggctttgcgcataaaaaaaagctgtgtcagcgttttgacacaacctcctatatatttctggacactatccataatattcctactgataactgatttctattttactatcaatattgtattcttgtcttacttgactcttatcttccacttccaaataaatttcacttaatcgaactttttttccatacactatctttcccgctgttttcacttgtgctcgcatattaaatagatagaagttctcaatacgtaaactatcattccaccccgaagctgtaatgaaacatttagatcttttcgctcttacatgagaaaaataaacattgcgaaagtgtggataccccttttctttaggttctactggagtcagcattattttccaatgtgcaggaatctccctactttcatattctacaggtaatttcgaataactatattttggatgccagttcaaatccacctccaatacattagatacactatcagcctcaactcctgtgacataaatattctctactgtcccaccacgattcatagacgatttaagccgtaatacagatcctgtgccataggctatcagatcatgagccagtacattacggatagaaccggaagtctcacttccgcaagtcagtaaccctgcacctttacgggcgatacagttacgaaccaccacattctccgtcggacgattcacacgcagtccgtcggcatcacgcccagccttgatacagatattatcgtcattgcaatccacctcacagttctcaactagaatattggtcgaagagtctatatcaattccgtccgtactcggtccgtgtcctcccacattattattaatggtaacgccatccaccgaacaatgatcggaatacaaaatctggcaagcccaaaaaccggtacgtacaagggtgaaatcttttaaagtgatatgtttgctgtttgagacaaggattccccgcacccgtttgcagtcgtaatccacaatccaacggagtttcttcttctcatattccttgcgcatctcccaatatttatcccaaaacacctttccacggcaatcaatgaatccttctcctgtcaacgcagcattctccgcatccatgatattgacaacggccgaaggccatgtcatttcaatgccggcaatacgcgaaggaaattccggatagtcacggatatcctcacttgctatcaacgttgtgcctttgctcagatgaaggttcactccgcttttaatgaataaggcgcctatacggtaaacgcccgaaggaatgataaccgtccctccccccctttcatggcaagcgtcaatagccgattgaataaaacgggtactaagaacggaagtatcacttttcagtccgaagtccgttgcatggatacagtcggacttaggaacccgttgcgcacctacctgttccgcccacgacaaatcgggttgtacggggacattcccccagtcatgcgcggaaacggtaatggttctttccggactcgtaaagccaatcaatgccaatagtacaatagataaaagatacttcatattcactcctttttattcacattgcaaaattaccgcattccgtagaaggcgaaatagacgaatgtacataaaagatagaaatttatatggaatggataatcctatatacacaggtggacaattctatattgtctttgtacatatttccatgtacaggcattcaaaaaaggactaaatttgccacatgaaataaaaagaattatctaatactcaaaataatagagtgacatgaaaagaagtacaagctggttactgttatgtatgcttacattggttactataccgactgtaatggcacagcccaattacaactattccaaactccaacgggagaagctcggacgcggagtaatcgctatccgtgagaacccttcggaagttgtcgtctcctggagatatttatcttccgacccgataaaaaccggattcaatgtttaccgggacggcaagaaactgaatgaccaacccgttatcaccggtacgatgtttcgcgacaagaacggaagtccggcagcggcagtttatgaagtacgccctgtgataaaaggcaaagagacccaccatacgggtggcaagtataccttaccagagaactctcctctcggctatctgcaaataccattgaaaagaccggaaggcggagtaactcccgcaggagacagctatacgtatagtcccaacgacgcttccatcggtgatgtggacggtgacggagaatatgaaatcatcttgaaatgggatccaagcaattcacgggataattcgcatgacggatataccggagaagtgcttatcgattgttaccgactgaacggtgaacagttatggcgcattaatctaggtaaaaatatacgggcaggggcacactatacacaatttatggtatatgacctggacggtgacgggaaagcggaagtcgtgacgcgcacagcagacggaagtgttgacgcaaaagggaatgtcatagggaacactcaagccgattatcgtgaacccggtactttcagcaagaaaagaaacgcgattgtcaatcaaggacgggtatggaaaggcaaggagtatttaaccgtattttccggactgacgggagaagcattgcacacgattgactatatccctcagcgcggtgatccttccgattggggagatgaacgtgccaaccgcggcgaccgttttctggcttgtgtagcctatctggatggaattcatccaagtgtagtgatgtgccgggggtattacacccgcaccgtcctggctgccttcggctggaacgggaaagagctgaaaaaacactgggtattcgatagtaatgaccccggttgcgaagattatgccgggcaagggaatcacaacctgcgtgtaggagatgtggacggtgacggttgcgatgaaattatttacggttcttgcgccatcgaccataatggcaaaggactctactctaccaagatgggacacggagacgctatccatcttacccattttgacccttcacgcaagggactgcaagtgtgggactgtcatgagaacaaacgtgacggcagtacttatcgcgacgcggcaacgggagagatcattctccaagtgaaaagcaacaaggatgtaggccgctgtatggcagccgacatcgacccgacccagcccggagtggaaatgtggtcgtgggaagcaggaatgcgcaatgcaaaaggagaagctattgcaggcaggataaaaggattgcccaccaacatggctgtgtggtgggatggtgacttgctacgcgagttattggataagaacattatcagcaagtatgattggaaagcacaaaaggtaaacagaatcgtaacattcgaaggggctctctccaataacggaacgaaagccgtaccctgtctgcaaggtgacatcgtgggtgactggcgtgaagaagtgctgttacgctcggaagacaactgttccctgcgcctgtatgtatcgactattcctactgaataccgcttccataccttcctggaagatcctatatacagaatcagtatcgcaacccagaatgtaggctacaaccaaccaacgcaaccgggattctatttcggtccggatcttactaagaagaaagggactttcagaggatatcagttcaagtgaaatgttatactaagggcaaatttatacggaatccaaagaaataactatctttgcccttagataaaacacataaattcactatgaagaagaatacgttacttatattctccctcctgttattctacttgtacccggcattcgcctccgtagaggtacgttccaataaactgactaccggagacggattagccaataactccatccggtatatgtcgcaagacagtaaggggtttatctggctgggtacgctcaacggattaagttattatgacggcaattcttttgtcaacatctaccctgacatccacaatccgctttcactggccgattcacgcatccggagtatagaagaagatccgaacggcttcctatggatttcaacgatgtcctcttttatcagttgttatgacctgcgtcacggccgttttgtggatttcaccggatgcaacgaatatagagaaaactattctaaattcttcattacctccgataattccgtctggctatggcataatcaaaacggatgcaggagaatcgtttatcaggatgggaagttctcgtcacagacttataagaaagagttgggaaatctaccttccgacagagtgcagtttgtattggaaagcgccaaaggagaagtctggatcggaacccgtaaagggctattgaaataccggaacgggcaaactgacaatctagacccgcagagccaaagttgggaacatatcatcgcttatgaccaatatacctgcatcatcaccgacaagaatgaaatctaccgtcacacctactctaccgacaaactggaaaaagtaggttcacttgccgcaagctttgacgacaacaatcgtgtcacgggcaacttcctcctggcagacaaatgggtattgtttaccgccaacggcagttatctgctagatatccctaccggaaaactttcccgctactccgacctgaatatcaaaaacggtgcggtcaccaaagacaataaaaagaatgtatgggtgcacaactataccggacatttatggtacgtcaacgttacaacgggcaatatcaaaccttttcagttcctttcttccgaacatatcggctatatagatgtggagcgatatagtatcgtacacgattcacgggatatcatctggattacaacttacggaaacggactttacgcatacgagctggctacgggagacctgcagcatttcacctttgacatcggccaatccagccatattaactctaattatctccaatatgtaatggaagaccgttccggcggtatctgggtaagctccgaattttccggtttatctcatctggagattctgaacaaaggcacacaacgtctccatcccagcggcgagaacagttccgaccgctccaataccatccgtatgcttttccaaaaccgaaacggaaatatctatatggcaaaccgcatgggcagcctgtacgaatacgaccccggtctgaccaagacaatacgccgcgaggatttcacccacaatgtgtacagtatgaacgaggactcggaaggtaacctatggctgggtatgagaggaaccggtcttcgtatcggagcggacaaatggtacaagaacaacagcaaagatcccaattcgctctccaacgaccaagtgttctccatctaccgtgaccggaaaggccgaatgtggctgggaacgttcggcggaggactgaacttagccgtaaagacgaaggacggctatcaattccggcacttcttgcaggacaactatggagagaaacgtatccgtgtcatcgaagaagacaagaacggacggatgtgggtaggcaccaataacggtatttatatcttccatccggattccctcatcgcttcgcccgagaattatatcatatacaatcatgtcaacggcacattccccaacaatgagatacgttgcctgatgaatgaccatgaaggcaatatgtggatcggaaccgccggagccggatttgccgtctgccatccggaaggcgattatcagcatctgaccttcaactgttacgacatcaaagacgggttgtccaatgccgtagtgcagtccattgttcaggataaggataataagatgtggatagctaccgaatatggcatttcacgcttcactcctgcaaccaagcaaattgagaattattttttctcttcctacactttgggaaatgtatatagtgagaacaccgcttgtgtaagcaacgacggcaaactactgttcggtaccaactatggcttagttgtattgaatgccgacaaaatagagaatctggacaaaccgacttccgtagtctttaccggacttcagatcaacggagccaatatgcttcccggtgtagaagattctcctttgcaggaagcaatgccatacatcaacgagctgaacttgaaatattatcaacaatcatttgtcatctccttctctacattcaactatctgaatggggtatccaaatattcctattgcctgcccccttatgacacggaatggagttcgccttccagcctgaacttcgccacttaccggaacttgcctccaggcaagtacaaactccacgtgaaagcttgcaacgccgcaggtatctggggagaagagaatgtgatggagattgtgatagcccctccgttctggaaaacgacttgggcttacctgttatatgccctgttaatcgcagtagccggttatttcagtttccatatcatccggaatttcaacgcattgcgcaaccgcatcgcagtagaaaaccagttgacggaatacaaactggaattcttcaccaatatatctcatgagttccgcactccattaaccctgattcaaggagctttggaaagaatcgtcaatatgggaaaccactccagagatatgcaacattccctaaaaatcatggataagagtaccaagcggatgttgcggcttatcaaccaattgctggaattccggaagatgcagaagaataaacttgccctttcattagaagaaacggacattatcgctttctgctatgagatattcctaagtttcaaggatgtaagcgaatccaaaaacatggatttccgcttcgagccatcacatacctcttacaaaatgcctgtcgataaaggaaatctcgacaaggtgatttacaatctactttcaaatgcattcaaatacactccgtccaatgggaaaatcatattcaaggtagacatttcggaacaaaagcaacaactttgtatccaagtgacggacacaggagtaggcatcccgaaagaaaaaagaaacgaattgttcaaccgcttcatgcaaagcagcttctcacacagcagcgtaggtgtagggcttcacctcacctatggtctggtcaatatacataaaggaacgatttcttataaggaaaatgaaggaggcggctctatcttcaccgtagaactaccggcaaatgccgacgtttacgaggaaaaagacttcctcatccctaaccaaatactgattgaggaagaagaacaacgccataaagaatttattgcgagtgacaagacagaagaaccggcagcaccttccgttccattgaataaacggaaagtattaatcatagaagacgacaacgatgtccgtgaattcttaaaagaggaaatcggtcaatacttcgaagtggtggccgaagcggacgggatcagtggctttgaacgcgcacagacctatgacgccgatttgattatctgtgatgtgttaatgccgggaatgaccggatttgaagtgactaagaaactaaagaatgagttcgcaacaagtcatatccccatcatcctgctgactgcccttaatatggatgaaaaatacctggaaggtatagaggccggagcggatgcctatatcaccaaaccattcagtgtatctttgctgctcgccagagtatccagactgatagagcaacgggacaaactccgtgagaagttctccaatgaaccgggaatcgtccattcagcaatctgcaccaacaataaagacagcaagttcctggcaaagctgaacgaaatactgaacgagcacatggtagaagccgaattctcggtagacgactatgccaaccttatgggattgggacgtaccgtattctataagaaagtacgtggagtgacaggatactctccgaatgaatacttacgtgttatccgtatgaagaaagcagcggaattgttattgaccgaagacctgaccgttgccgagatttcctataaagtgggtatcaatgatccttattatttcagtaaatgtttcaagaaccaatttggaatcgctccttcgatttatcagaagaataaaggacagcatggttcgagttcaccacagattaacacagattaatttaatgcattaataatcaagatctattatctgtgttaatctgtggtgagaagaagccccagtgtactatcttacggatttgcgtacaaatctccattactgttttttcatcaaaagataaaatttacatcctttccgtacgggagtataggcgtattttccattaatgcgcttcctttgcagcaaaacattttaattgatcatcatgaaacacaacttatttcttttcgtatttttgctggtcgcattgcccgccgtcaagggacaggcaagtgaacgtaaaaagtacaatttcaacagcgaatggaaactgcaaacaggagattttcctaaagccaaagatgcaacattcgatgacagcaagtggaaacaagtcactttgcctcatgccttcaatgaagatgaagcattcaaagtttctatcgaacaactgacagacacggtggtgtggtatcgtaaaagtttccgcattcccgatttaaaaagtaatcagaaagtatttatcgaatttgaaggagtacgccagcgtggagacttctacctcaacggacacaatctgggaagacatgaaaacggggtgatggcagtaggtttcgacctgactccttatatcaaacaaggcgaaaacgtgattaccgtgcggacggacaacgactggatgtacagggaagaaggaaccaagtccaaatttcaatggaacgaccgtaacttcaacgccaattatggcggtattcccaaaaacgtattcctctacgttactgacaatgtatatcagacacttcccctgtatagtaatctgaaaacgacgggagtatatacgtacgctaaggacatcgacatcaaaggtagaaaagctacgatctgtgcagaatcggaagtcagaaatgacagtaaagagcctcgccagttcacctatcaggtgactatattagatgccgacggcaaacaagtgaagacttttcaaggcgacaaagtgactttgaaagcaggagaaactaaaacagtaaaagcttctgcccctgtcggtggtcttcatttctggagttggggatatggctatctgtatacggtaaagacagctctgaaagacagtaacaaccgcatattcgacgaagtaagcactcgtaccggattccgtaagacacgttttgcagaaggaaaagtttggctgaacgaccgggtgatccagatgaaaggatacgcccaacgtaccagcaatgaatggcctgctgtcggactttccgttccggcttggctgagtgattattcaaacgacctgatggtgaagagtaatgccaacctggttcgctggatgcacgtcaccccttggaaacaggatgtggaatcttgcgaccgtgtaggtttgatacaagcaatgcctgccggtgattcggaaaaagaccgtgaaggacgccaatgggaacaacgggtggagctgatgcgtgacgctatcatttataatcgcaacaatcccagtatcttgttctatgaatgtggaaacaaagcgatcagccggcctcacatgattgagatgaaagctgttcgtgataaatatgatccgttcggcggacgtgccatcggttcccgcgagatgttggatatccgtgaagcggaatatggcggcgaaatgctgtatatcaacaaaagcgaacatcatccgatgtgggcaaccgaatattgccgcgacgaaggtttaagaaaatattgggatgaatacagttaccctttccataaagaaggagacggacctcttcacaaaggacaaccggctaccgattacaaccacaatcaagaccagcttgccattactatgattaaccgttggtatgactattggcgtgaacgtcccggaacaggcaacagagtcagttccggtggaaccaagattattttctccgataccaatactcattatcgcggtgaagagaactaccgcagaagcggggtgacggatgccatgcgcattgagaaagacgcattctacgctcatcaggtcatgtggaacggctgggtggacacggaagcagaccagacctacatcatcggtcattggaactacccggagaatacagtaaaaccggtacatgtagtatccaccggcgaggatgtggaactcttcctgaatggtaaatcgttaggaaaaggtaaacggcagtacaacttcctcttttctttcgacaaggtcactttcaaaccgggcaagctggaagctgtcagctacaacaagagcggaaaggaaatcagccgttacgccgtaaacacggtaggtgagccagccaaactgaaacttaccgccattcagaatccggaaggcttccacgcagacggtgccgacatggctctgatacaggtagagatagtagataaagacggcaaacgttgtccattggataaccgcactgtccagttcactttaaagggaaatgccgaatggcgcggaggtatcgcacaaggtgaaaacaaccatatcctcgataccaatctaccggtagaatgtggtatcaaccgtgcacttatccgcagtacgacaactgctggaaaaataacactgaccgcacaagccaaagggttacctgcagccactcttacattggaaacggttccggtgaaagtaaacaatggattaagttcctatctgcctcaagctagtttgaaaggtagattggacagaggtgagactccttccactccttcttataaagataccaaaagaggaatccgggttgtatcggcaaaggccggagccaacagcggagatgttgccaagagctacgatgatatagaactgtctgaatggaaaaacgacggcaagctcagcactgcatggattacttatacattggaaaaagaagcaatgatagatgacgtttgtctgaaactgcacggatggcgttcgcgcagctacccgctggaagtatatgcaggcaaagagctgatatggagcggcaacacagagaagagcctgggatatgtccacctgaacatagaaaagccggtacgtgccaataccattacgatccgtctgaaaggcaatacaagtgacaaggacgctttcgggcagttgatagaagtagaagcgaaagccgccaacaaaatggaactggaaaagagcagcagtaagaatcagctgcgaatcatcgaggcagagttcctcgagacaatcaaatagattcgttttcaacaggtacatagaacccacataagattgttagtttgattaaaaagtcctcttttacgtttctatcgtttgggaggactttttattattcagtttgtatttaaaatcataaaccatcatttcatcatgaaaaatttagttatcattttaatgcttgcattctgttgcaattgcctggcagataataaccaacctgcccatgtcattatcactgccggacagtcaaacaccgacggacgcgtgcccaacgaccgtctgccggattacatcaaagctatgtccacagacacggccttcaccacaggagcctacaaatactgtaaaatagcccagaaccgcacagacgggaagttccgtcctttctggccgaagagcaaaagaagagccaagccccacacatggggatatgacgccatcacctactattggttggagcaattatggcaagagcctttttacgttatcaaatgggctatcggaggcacttctatcgaaccgtccgccagttcggacaaatcggttcactggtcggcaaatcccgaatggctatccggcaacgtggcaaccagccaaaagggacgttccttattgctttcttttatcaatgacatagacggttgcatcgacaacaccttatcgaaattaaagaacggttaccggattgacgcattcctgtggcatcaaggagaaagcgaccgtgcatacggcgacaaatactacgagaacctgaaagcagtcgtcgcttatgtgcgcaaccatctgagtgaaaagacaggagaagactactccaagcttccgtttatcttcggtacggtagccaagaagaacaagcaatacggcagtgaggttgaagaagcgatgaaacgcctggcgaaagaagacaagaatgcctatctgatagatatgtcggatgcggaattgatgggagaccgccttcatttcaatcagaattcagccgaatatctgggcaaacagatgtacgagcagataaaaaaactgcgatgaaaaggctatatttgtacttttataaggggttgcgtacaaatatcaggagtattttttagccattagtataatattacatctttttcgtacgaatacttgcgcataatttcttccgatacgcttcctttgcaacggaagtcggacagaccgtcaggctctgtttgtttctttcgttatttactaatttaatcacttagatatatcaacatgaaaaacattctgcatggaaatggtagtctgggaaggaagatgcaatctctctttttgatgactctgttcgtattacaatctaccctgtcgctcgcacagaaccgaaccgtgacgggagtggtagtagatgagaaagatgaaccaattatcggtgcaaacgtcacagtgaaaggtacttccaaaggaacgattacagacttggacggtaaatttgtgatttccgctcccacgaatgccaaacttctggaagtatcttttatcgggtacaacacccagactgttacaatcaccggtaaaactctccaaatcaagctgaccgaatctgccattgcactagatgaggttgttgctatcggttatggtagcgcaaagaaaggaaatgtgaccggcgctatcgctaaagtcaatgctgagaaactggaagaccgggcaacaaccaacattgcctcttcactgcaaggacagttagccggtgtggaagtacgcagcactaccggagaaccgggttcggaacttcagattcgcgtacgtggagccgcttcgatcaatgcggatgctaccccattatatgtggtggacggcattcccgtagacgatctaggcagtctcaatccgggtgacatacaatctatcgaggtattgaaggacgcttcttcatcggcaatctatggttcgcgcggtgccaacggagttgttttgatcacaaccaagcaagcgagcgccgatgataaagtaaaagtacagtttcaagcttctttcggtatccaatcattggaaaggaaagtggatgtcctgtcaccggaagagtggattgagttccgcaccgcatacaataataaccggtatatttcccaatacggaagtaaaggagctactattgaagacgactacgccacccgtctggcaatgataggaggcaaagaaagctattatttcctgaatgacccgcgctggacagaacccggctacggcaacttgcagctgattgactggcaagatgaattcttccgcctggcaccgatacaaaattaccaattgtcactttcaagcggtcgcggcaataccaaataccgtgtatctttgggctataccgaccagaaaggtatcgctatcgaaagcagttacaaacgtctgaacttccgtgccaatgtagagtctaaactattcaaccggattaccgtcggagtgaatctggcgccttctgccaactggagtgacggcggacgggtagacggcaaagaccgccaggcaaccaacgttcttactatggtgcccgttgcagaaccggaagacggtatatataccggttcaggctccaaaggttattatcgctggaccagttcaagcaaggtaagtcccatcgcatatatggaggaagtgaccaatcatggtgaaagtgtccgttttaattccgctgcctatgtgaaagcggatatatgggatgggctgaaagcggaagttaccggttcctacaatttcagcagtacgcaaagccgctcattcattccgagcagcgtcaccaaatacagaacagacagcgaagggtacaaaacgactgcaagccgttcggaagcacgcagcaataaattccttctccaaacgatcctgcattataacaaaacgttcggcaggcatactgtcggagcgatggcaggttattcgatggaaagctccggaggctcttccagcaaattaagcgctacgcagttccctgataattctctggaagtgttcgacatggcagatgtagtgctgacagcagccgcagcttctttgtccaccccttcccgactgatgtcctacttcggacgtgtgcaatacgaatatgatgaccgttacctgctgacagccagtatccgtcgcgacggttcttcacgtttcggtaaggaaaaccgttggggagtcttcccagccgtttctgccgcttaccgcatctcaaacgagaaattctggccgaaagacttctttatgaactctcttaaaatacgcggaagttggggagccaacggtaacaactcaatccctaccaacaccgcccttgccaaactaagcagcgccaattactcgtccggaaacatcattaacggttttgcaccgacatcgcttgccaatccggatcttggctgggaaaagacggaaagctggaatatcgcattcgatatgggaatgttcaacaaccgtatctttctatctgccgactattatgtaaaaacaaccaaagacctgctgtatcaagttactgttcccgccttgctcggtttcacccaagcttggggaaatatcggttcgatccgcaataaaggttttgaactggagctgactactcagaacctgacgggaaaactgaaatggacaacttctctgaatgtatcttacaacaagaataaagttctcagtctgggagatgacaacagcaccgtattcaccggatacgacaagacgacacaagtgttcatggtaggccagcctttaagatcattctatatgtatgatgcggtcggtgtgtatcagacgcaagccgacttacagaaataccctgtcatgcagaacaccaaagtcggtgatgtacgctatcgggatgcaaacggtgacggagtgatcagcgacagtgaccgtacattgatggggaaacctgatccggattatactttcggtatgaccaatactttcaaatacaagaacttcgatctttccatcctgatcacaggacagacaggcggacatatttacggagtattgggacgtgcaatggaccgcccgggtatgggcgccaatatcaacgtgcttgcacattggaaaaatatgtggaaatcggaagcagaacccggtgacggcaagactcccggtatcgacaatgccaacaccggacaattctacgacagccgctggctgtacagcaccgatttcatcaaaatcaagaatattacattgggctatcgtcttccgttcaaaaagaaatttattcagaacgcacgcgtctatctgtcgggagaaaacctgctgatgtgggataagtacgacggcggattctcgccggaagccaacaacgccggttcaagcggagactacgactacggttcgtacccgcaggcaagagtcattactttgggcgttaatgttacattctaaaaaagcaataaactatgaaactatataaatatatcatttgcggaggactggcgctgacattgactctgtcctcttgtgaaagttggttggaagtagaacccaacgatacacgtaccactgattatttctacaccactcccaacgaaatggagcaggcattgatcggtatctacaacggtctgctgccgattgccaattattcatggatgttgtcggaagttcgttcggacaatgcttgggtagataaaaccaccgacaaacagcgcgactatatcgacataggtacgtttaatcccaatatatccaccatcagcaccctttcgtctgcatggaatgatttgtatgaaatcgtagcgcgtgccaatatgttcctcagcaaaacggacggtgttactttctccgacgaaaagataaagaatcagtttatcggtgaagccaaattcctccgggcattggcttacttcgacctggttcgttacttcggacatatccccatcgtattggaacctgtatcggtgaatgaagcaatgaccatcaaacagtcaaaacaagtcgatgtttacgagaccgcaattgtccccgatctggaagatgcagtgagaaagctggtagacactcccttgaattatcagggaaacaatgcttctgccggacgcgccaccttagccgctgccaaatcgttgctgggacgtgtttatctgacaatggcaggatatcccgtgcaagacgaatccaagaaagcattggcggaacagctattcagtgaggtgatagactatgcccgcgccaataataaatattgggcacaaacgggtgacgaatggcaaaaagtgtggatcagcgacaatgataacaaataccatatttttgaaattcaatacatagcttccaaaaactatggtaatccgatggtgttcaactcggttccgcaagtgaatgattcgtatacaaaactagaaatgtccggtaatagaatatggtgtgaagccagactggcaggacgtttcaaattaatggatacggaaggggtgtctttggatatacgttgtccgagcacgatttacacggatgatttcgtggatgacgacggtgtgccttatacgggcggtcctttcttccagaagttctttgaacataagatgaaacgcaagatgctaggttacgaagatattgatgcacagattgcagaccgtacctatttccctatcaattatccgataatccgtcttgaagatgtaatgttgatgtatgccgaaattgtaggacctaccgataaagcaaaatcattggtcgatgatatttgcgaacgtgccggtgtcccaaccgtacccgatcatgttactcccgaagaatttgccgaaattgtagactggcaacgccgtcttgaactggcttccgaaggcattcgctggcatgacctcgtacgccaaaaccgttatgtagaggtattgcaggaaatgtttaagtttaatggctcggacgagaacggtgtgattagcaaaccggaaacatacgaactatataaattggttacaaaagactcatatatctatccgatacccgactcgcaaatgaaggtaaaagaagggctatatgaacaaaataaaggatataattagacgatacaataccggcattcatttattaaaaggttgataagaaaagtcctccggtctggttctacggatcggaggacttttctttattattatatttttctttattatataaggtttacttgtatcaattccccttagctttggaacgtaaagaccgtatgctttatcggaaacatatagacgaggtaagcacttctcccgcacaaactaatcattgcataccgtaatactaataaagtctcctaatagaattaagatattacacttgagcaacctcaataatacacaagtgtaaccattaagtcagacttgtgcatcatcacggttgcccaacagcaacagactaatcgtaaacaggcagaataatatagaagtaacaggctgatgaacagactgttatccagaaagtgcaattttatttccaaaaagagcgaaaacgaccttatgttttctgtaaacttactttaatttaggggcattttcatcattaagtatctgattataagcgatgtgacatttttgtttttccccgtataaaacttaaaataaagacaattttgttgcactgaagaaataagaaatgaatcttcttttattttcctatggcaccagcccagtctttggcaaagcggaaattaccgatatttcctttaaacccattacggtttctgagtgcgacagacttcagacctgctttcaaagcaccttcttcaccagtaactactatatcagcttttggctcgctctgtcccaattccggatctacaaataatgaaacttcattcttcgtatagtctaccttcaagaccaataaatgagttttattataatcataagccatcggagcttcagcacgttctttcaacaatcctactgcaaatttgattttatcatttccttcgcgtctcacatatacctgaccgcgatttccaccacctacataactggcactggcagccaagaagtcggccaagtttgttccgactttagagaaattcgccagacaggcaatataatatgtacctttagaatatacttttccggattcaaccaatgaatatacgctgacacgagagcctttcacaccttgcggaaaacccaaagtgatagatggccccgcttcactatatccctcataagtcaacgcctttcctatcgtagggcttaccgatccttcaaccggtttagaagtaaaaccaccacaccaagtatctacgttgataggcgctcttttatcattataaactgttttctccaaaacatcaccttctttataacctttcaataggtcattcttaacgatttgagcctgactgcctaatgctacagcagctaaagctattgatacaaatacctttttcatcattttcttatattaattcattcaaaaagcaaaagtaaaacgaagatatgccgttctagtagacttataggctctagcttccttgatacttttttctgttactttactattgtatgcatacatcatttggttgttaaattcagtacttgaccaataacctagttgtttatcattaagtacaaaatccatttccttttgctgcattatttctagcttctgattcactatatccttatttttataaagtatagccaattcctgaatagaaggaataaaccagtttgtcgtcatttcaggtagtaaacaattatcacgatatccctgtaaacttccaatattaatatattcagatccaggtgcttgttttactatagtttctattacctttgtgttattatatccaagcattttttcaaacttacttggaattccataatctgctatttgcacattgaaaaaagaactctgcaaagataatgtttcaaaccatttaccaaactctatacttttcttttccgtctcccaataaatacgttcatcttctccatcagtcaaagcaacaacaaaagcatgattacatgcaggatagtcacgtttcaatgcatctttagtcacatctccatattcaccctcatataattcagaaggaaaagtttttcccacataataaaccacaccaatacatcctttgaccggaggattttcatctgtcacagagacaatgttaccatctgcataataaaaatcacccacctgcaaatgatgtttcttttcctgatgaccaccatcaacaacgaagcgtttatatttgccttgttccattttaccttctgtcactagtgaacatttctttccattataataccctgtaatcgtttctgcagacaacggttttctcaacaagcgatactcatccttagctgcatcataataaggcaatattttctcttctcctatctcaaacgaaatactcgccggattcggtttcgcaatataaggagtttcttccggaagtaccgttccctctgcatccgtaaatagataatgtgtagaaggcaacttcaccacaaccagactcatacgatgcgataattgaaaactcaatgaataatttccattttcaccaattagctccgtcttacccgaagtcattaaatcctgttttgcgtactctttctggtcactttgtgcattagtcaaattccaactatctacaagaggagcaaagaaatcctctccctgcaaatcagttttacccgtcatatctgcttgataaggataatacgcataaaatactacgccttccaagctttcatcatataatatcggcttacccgaccaactagaaccattgtaagtgagcagcatattatttatttcatccataatcacaccatccttcactgcgaacagtcctaattgatcaccctgcgtgaaggtagtcacaaatccgtcgtcaaccgtgcgcgtctgcgattcactacttaccaaccctgtatcagccacattcaatacaaccagattttgctgatttacttgtgtttcttcatcctgtgagcagcttgcacaacccaatgccaacactgccaacaacagcttttgtataaatttatattgtttcatatccgattcttagttttgaatattactctgcatcatcagttccttccactgattcatcatcaccatcccatgacgctgaattcttctctacttccaccacgagtcccggttttcctactcctacattatatgtatactggtgtccgctttccaaaattccttcaccattgcccggtgtatgggcaaactttctcccatctttcaactctacctgaaaaaacaatttacctgacatatcctgaggaaccgtcaacatctgataagaagcgacataatcttttctaacctccgatacaaacggatgcatcacggaagtctccacaccctctgcagggctgatcttcccttcggaaacagttgcttttgtcacggttcttacagtaaataccgcaccttccaaatctgtctctgataccgtatcgtcatctccttttacattaataatcaacttaaccgttccatgacggaaagtaagtttccgatcgctacggaatttcatcttttcatacgcataaaggaaatccgcctgattgtacgcctcttcagtagtctgatcttccggtacagtccatccggtcagcaatgtctccgaagccggataccaggcaaataaagtctcttcctccgtagttgtgtaccaataaagaggatcgttattcttggctgtcatttccttggaagccgaaacctcatataatttctgcgtaacgccatcataaagagatatttcctccccaccattccaagaggtcttttctccgatagcacgggtaaaggtcatatccgccttttctgccatcaattctaccggatacttattattctgaaagtcatcttctgccatatcggtacacgctccgaagaaacctgttaccatcaataagcaagaaagggctaatttatttcttttcataccgttcttttttttgaatccttatcatgctttattcactctgtcactgacgctgtcacatccttttcatcttcctcaacccaatcggctatttcagcagtcttaatagtcatggcgggattttcaaatgtcacattgtaaggatatgcatgaccggccaacagattttgtgcaggaacatattcagtataagtctcattgttcattctgacttccaacaacacactttcagtcatttcttgcgggaacaggatgatggaaacattcatttccccttccgacggtttggctacatccactgtcaactcagaatcaggagtagctccttctttagcaaccgcctctccggtattcacatcaaatgtaccttccagttgcagacttttcagatgtacagtcatatcattcaatgtagcaccattctttgctgcgaaacgaagaatgattttagccatccgatgtgtaaaattaaatgttacgggagaatccgcatatacttcggtagcctctgcgaaaaggaagtcaatctgaggttgtttatcggcagactggtccgctccgcttattttctttgttatcactccttcttctcccggcaaagcaccgttctctccctgataaggataatacgccgccaatgtgtatgcgccatcacccttcaaacggatattgttatccacagaaccttcgttcacaacacggaatgcattgccattgtctttacgatactgaatattgatataagtatcgactgcattaccactcgtcggtccgtccacagtgactccgatacggtcgtcaactccccagtttgagccgacagcacgggtattctgaacatcagtcgcatcattgatagttcccaaaatctcgattggattataagcacggtccgcttttcccgattcatcatcactacaagctgtaaaagccaatgatactgccatagcggcagccagatacatgtttttcattgatgtcttcatttttaagttattattttccgattgttttttgcaaatgtaagcctacttatcgaagtgtacaatggacgattgtacgcaaatgacttgataatcatccattgcttcccctttaattgccgtccggtttttctatctccgtaaatggacataaattccatttgaaggtttcaaatttatccggttgggcagggttgaatcctttataatctgctctcaaataattggcaatatccaattttgcctttttcattccttccaccacacacttcgcagtctcataagcgccatacgtgctgaaatgagaattatccttgaactctctcgtttgtccgggaaaagttcctgccggatagtgaacatataatttcatggagccgtcaactcctaaagcatcacaaagcatggttgtcatcccattaagctctatcaaaggaacattctccttttgtgctacccaacgaatagcgtccggatattccccatgtgtatttacagattttccttctttgtcaaaacgacggcgacaagtaggagtgaccagcaccggattggctcccttagcacgggcctcatcaataaatattttcagattatagacaaaagaaaaataagcccctgttcccggttgcttctgcttttgatcattatgaccgaattcaacgagaagataatctccttttttaatctgggacatgatttttttcaaacggttaccactgataaaagtattagcggacaaaccggattcggcatgattggctatacacactttatccgtgaagaaacggggaatcatttgtccccaagctccccaaggttcattgtcgtagtctacaaccgttgaattgccacaaagataaacggtcggaacattctccacaggttctattattaaagagttcaaacggggagattctccgttaaattccagtgtcagtttatcatcccaattaagtttattcttctcacgggatttgatacgtactctctctttcccggatattttaatattacgcttattaattgtaaacgtctctgttttcaattcccctttcttggtagacaggttctctataaacaaacggcgcgactcaccacgtaccgtagtgctggagggttcattcttactgcctatgaccactgtcactttataatttccatcaggaacattcaccgaaaagaagaaaggtttgttacttttgccatcccatgcgggttgcaaatcatacccatagccttgttcattgttaaacaaagtctgaggcgtaaccttcaaatacccctcctttactttcttatccgaactaaaatcgaacttataggtctgcttttgggcaacacatatcgttgcaaccagtaaaacatttagcaataatgcaatctttttcattatatctgaattatttaaagttgaacatttcatcgcgttctctcaattatcgcaaagatagcgggaatcaagtaatcggataatggaaaattatacgttaatgcagggaggattatccattcacggcttttcctgtccccaaaaagcctggttcttctacatatatacaaaaacggttgaaagccaatgcatcttttccgatgaattgttttcaaccgtttcaataaaatacagttggtttctttattacttaaagaatgcttatttcagtttatacacttccgttccggcaagcaggaaacaacctacaccgtaatcttcaaaatcaggcacactcttataagtcaccggttgtccgtctttcggctctttacccgtcccttgaacataacccaagaatccgttcggatgaacagcgtcttttaccatagcattccatgctttcaagagaatgggcagatattcactacggtccaacaagccattacgcactccccaagccattccatatacaaaaagagccgttccggaagtttcttttccaccgaagttggtaggatcatgcaggctgacattccagaaaccatcttcacgctgacatttcttcaatgccttactcatggtaaggaaatcatttatataatcctgacgatgcagctcgtctgacggaatttcgttcagcacacgtaccaaagcggcatatacccatccgttgccacgactccaatagcagtcttcaccgttcggttccttataaggagggttaaaatcctgatcgcgccaccacaagccatccttctgattgaacatacctgtttcgtcatgctggctgcgtgtatagtaatacatatcccacatcttatcataatatttctgctctccggtcatttttccgaatttggcaaaaataggcattgccatctgtacggcgtcaatccaccaccagtcattgacttgcggagtatttaccatcatatcaatggatagtttgatattcttaatcatctccggttggggacagatattatataaatcgatataggtttgtccgcagcaatggtcatcggcattgcgggtagtgttgccattacgcattccccatttatggaaagctgcccaatcataagcatattcataataatcctcgcgcggatagatagaatggagcgacatcagtccttcataataaacacctcgtgtccagatattgctcggacgtacacggccgtaaaaactgggaatcgtgtaatcggcatactttttcataaagtaaccgttcacttttttcatgacttccagcgtttccttccggtcgggcaaagattgggcactgacagaaaccgtcaacgcaaaaaagaataagagcactaaattatttttcatgtgtattcaaaatgattaattaaacttcatgccgcaaaagtagatggattaatcgtacgaaacaatgtacatttgtacataattctatgtattagtacaaatatgcatttttttaaggaaagaatgccgtaatttagcaacgtgaaaagaaacagcctcacaaagctaatgatacatatataaaaacatgaagaaaaatacactattgataggtctcctgcttgtcagcggaaccttagcggcacaagattggccgacagtccaaacagaagcgcgtcccggcagcagatggtggtggatgggaaacacagtcgatattcccaatctgacttacaacatcgatgaatatgctaaagccgggttgggaacattggaagtgactccaatctacggggtacaaggaatggacgacaaagaactgaaattcctgtcacccgaatggacggctatgttaaagcatacccaggcagaagcaaatagaaacggtatgcagattgatatgaataccggaaccggctggcctttcggaggaccggaagttacgttggaggacgctgccaccaaagccatatttcaggaatacaagatagaaggaggggaagaaaacattctcaatctggaggtaaaagaccctaagcaagcaaaggttgcaaaattgaataaagttatggcctacaatgcacagggacagaaactggatattacctcaaaagtaaaagattaccggctcacatggaaagctcccaaaggagaatggcgaatcattgcattatatataggaaagacacagcaaaaagtaaagcgtgccgctcccggaggagaaggttatgtaatgaaccacttggataagggaagcgttaaacgttatcttgacaaattcgacagggcttttcaaagagataaggtcacttaccccaaaacattcttcaatgattcgtatgaagtgtaccaagccgattggacacctgccctattggaagagttcgcccgccgaagaggatacaaattagaaaattacttccccgagtttctggatgaaaaacgaccggaaataacgacacgcatcataacggattaccgggaaacgatctccgacttactgattgagaactttacccggcaatggactgcatgggcacataagcatggaagtatcacgcgtaatcaagggcatggttcacccgccaatctgattgatgtatatgcctccgtagatattccggaatgtgaaggtttcggactttcccaattccatatcaaaggattacgccaggattcacttacccgcaagaacgattcggacatttcaatgctgaaatatgcctcttccgctgcccatatcacaggaaagccatatacatccagtgagacgtttacctggttgacggaacatttccggacttcactgtctcaatgtaaaccggatatggatctgatgtttgtctccggagtgaaccatatgttttttcacggcaccccctattctcccaaagaggcggaatggccgggctggttattttacgccactatcaatatgtcgccgtccaatagcatctggcgtgacgccccggcttttttccaatacatcacccgttgccagagtttcctgcaaatgggtaagcctgataatgacttccttgtttatcttccggtatatgatatgtgggaagaacaaccgggacggcttctcttattcgacatccaccaaatggccaagcgtgctccgaagtttataaaaaccatccaccagataacctccaatggttacgatgtagactatatttcggacaagtacctccagaatacccgctacgagggaggaaatctccgtacagaaggaggcagtaactataaagcaattatcgtgcccgctgtaaaatatatgccggagaaagtattggcacatctagtctcattggcaaaacaaggagcaacaattgtattcatggagaattatcctaaagatgttcccggattcggtaatctggaaagtcgcagaaatgctttcacaaaagttcaaaaacaacttcccgacatcagcgattttaaccaaagcattagcagttcattcggaaaaggacatatcataaccggtacggattatgctgcgacattaggtaaatgtaaggtaatgcctgaagagatgaagacgaactttggtctgcaatatatccgccgccaacacagcaccggacaccattatttcatctcttctttgcaagacaaaggagtggacaattggattactctcagtgttaatgaaccaacagccatgctgtttgatccgatgaccggagaaaaaggaaaagcgcaaacccggataaaggacggaaagttacaagtatatctgcaattacagtccggcgaaagtgtgattattcaaacattcgatcatccggttgagactcaagcatggaaatatatccaagagcaacctgtcagcctcagcctcgaccatgactggacgttgcgttttgtacaaagtacccccgctatcgaaggaactttcgctatcgatagcccgacttcatggacggaaatcaaccatccgaacgcaaaaatcaatatgggcacagggttatacagtcttgagacagttctgcctgcgctgaacgctgatgattggattctcgatctgggagatttgcgggaaagtgcccgcatacgcattaacggtaaagaagcgggaactgtctgggccgcacctttccggttaaaggtcggcaaatatctgcaaccgggcaagaatctgattgagattgaggtgaccaatcttcccgctaaccgtattgcagaattggacagacaaaacgttccctggcgcaagtttaaagaaatcaactttgtaggactcaactacaaaaagaataaatacgacagttgggaagtccttccttcaggcctcaatggaggtgtgaaactgattccgataactactttgtaaccaacttctttactgcatccttcaatcctttggaggatgcagttattactacctcgccaccggaacggtccgaacgtaagatcgccatgatgaatcctttatgcaacttcttcgtatttccggtaaataactcatctgtaaaatgatccccattgtccacagcaatcagccttgcagcccccgaaaccttaaaagtaacctcgtctttagtatcaggtactacccttcctttattatccaccgcatatacctttacatattgtaagtccatcccattcgctttccaatcctccggattctctaccaccattttcaaagcagtcgccttaccggtcgtttccaacctatgacgtgccacctcttttccgttattccgggcaactgctatgatatttcctcctttaccgtatggtatgttttcccaataaatgatattgcgccgggtgatatccgtccggtcattcttacgtatccccatagatttgccattaaccagcaattccacttcatcagcgttggtatatgtatataagttctgcatactgcccgttgcccagttccaatgagaagccaaagataaacttcccaccataatatcattccattcaatggcttccttaccattatccatcactccgatatgcaccaaaggctcttcgcagaaagcactctttatcagataggcttgcggataaggttccagacaatgattgaagaaagaaaaattccagcctttcttcggccatccgttcgattccccccaatactcgatagctccccaataggcgagtcccaccatcttatcatgatccatgccaaagaaaggagcagcaagctcattcgttgtagcttcgctctgatatacggtcatgtgcggacacttttccagatattgggcatagttcagataacgataattgaaacttgacacttctgttacagttgccagctcgggaggatatactttggtgttaaattccggttcattctttccgatagctccggcacgtgccggaaacatagccacagtcgttttacgagtcttatcataacgtttgacaagcacatcgaagatacggtaagtggtgacaccccaatcaccggtaggaaatccggctaagtcttcccgcatctgcaattcatttcccaaactccataatataacagacggatgattgcggtcgcgtttgatccattcgggaatcatctgataccatagttgtgtgaaaggcactctaccaccccaatagctattgtcgctccatttatcaatcagctcatccactaccaaaataccatatttatcagccagtttcaagaacgactcggaataagggttgtgagacgaacgaatgtgattataaccgaaccgcttcattagctgaaactgccgctcgatagctctgtcaaaagcggcaactcctacagctcccaaatcatgatggttggaaataccttttaggaacaattttttgccgttcagtttaaatccgaaatcaggagagaactctaacgtacgaatgccgaatgtctccgtcacacaatcaataactttaccatcctgcaccaaagaaacttcagcagtataaagattaggggtctcacaagaccataacccgggactgtctaccgttactatcggaagagaaacctcaactgtttgtaatttcgatttttgaggagccttccctctcgtaccggcaaccgtttttccgtcaggagccaatattcgggcattgatttcaatatccagacttttattgcgaattccttccaactctacttgtacactgacttccgccctttgctccgtgattttaggagttgagacaaatacgccatgtcttgcaatggcaatgggattcttgatgaccaaatgaacatcccgaaacaaaccaccgcccgtataccaacgcgatccgtcttttttgcccgttgaggcccagacagccactacattatcctcatcatatttaagcaaatcagtaatatccgtttcaaaaccaagataaccataatcggtacttcctaccttcctgccatttacccaaacatctccaacaagcataatgccttcaaagtcaagcaagacacgtttacccttccatgcaggatttgccttaaaatgtttacgataccaacctgtccccatagctttaaagccacgtgcccctccggcggactcatcccacgtttgctctatctggaaatcatgaggcaaatccagcacacgccaatcatcatcatcataagttaccaattgagcttctttcaaatcaccggcccgaaacttccagtcaaaattaaataattgcgatacacgcggctgttcttgcgcaaagactaacactgattgcagtactaaaaaggataatagaataaaatttttcatcttagattgttttcttagtattattcttaaataattgtacggatgatccatataattatcattcacccaacaaagataaaccggaaaatcatctatccctatataaattctaccgaatacatataaaataatacacttacaacttcctcatgtactatttttcatgaaatccgcacatatatccatagaaatgctaaatcatattccctacttttgcatagttaatataataaactcaaatatcatgaagaaatttcttttttacctttttactttaggactcttttcaaactatgctttcagttcagatagcatttacgtcgcccgatataaaggagacaaagcttgtgccatcagttatacctttgatgacggattagcagaacaatatacattggctgctccccaattggagaaacggggatttcggggaactttctgtgtgaatggcgccaaagtcaacaaagacaacaaacacatcacagataccacacgagtgacctggacacagttaaaagaaatgtccgacaaaggtcatgaaatcacaaatcacggatgggcacataagaatttctcccgttttcccttagaggaaatccgggaagatatagtaaagaatgatagtgccatattagccaataccggcgtcatgccccgtactttcttttatcccaataataacaaaaaagaagaaggcaaacgaattgccgtacagaaccgggtaggaacaaggaccaaacaacgttccataggaagaaaatccactccacgagacttggaaaaatgggtggcgacattaattgccacaaatgattggggagtgggtatgacacatggtttgacgtatggttacgatgccttcccgaatccacaatgtttatgggatcattgggacaaagtaaaagctatggaagataagatctgggtaggtactttccgggaagtggcagcttataccgaagaacagaaacatacgcgcctgggcattcgccaacaaaagaaagtactcatcataaccccgcaactggatctggataaagagattttcacagaaccgcttacaatggtcattcaaaaagaaggtgtcagaaagatgacagccagacaaggaaagaaaaaactggcagttcataaaattggcgataaattcatattcgattttaatcctttcggagaagcaatcaaagtttattttaaataaacaagaaggagggtgataaaaaaacgcaggattaacgcaaattatcgtattatttcagttattaatcaacgacttataacattatttctgcgataatttgcgttaatcagcgttttacttttgaatttccatccactccgttagcgtacctcttgcgaattgacctttacattcttaactacaaaacggtcaacaatatccttatcaaactggcctttcttcgcccggatattcagatcctcaaaacaaaaatcggacaaccgatattggtcagactttttcacattgaagaaagtagtacaatccagatcgatattacgcatagtaatattattagaatatgagatagggatatctttccggtctcctaaattatagaactgagtccacggcgccacatagataaaatctccagcatttccttttatatcttccaccaagatatattcatatttctgcggagtatcgggacgcatctttaaatgcagaagaatacgtgcctgatccatcgtactgcgacggaatattacattgcggttatgtattgactcactcccgcaggtcaaagcactgtgacaataaccatatcggcaatcttcaataacaatatcatagttgccgccattattgacatctttgtccgcccaaggacctttgcctccctttaatgccaccgcatcatcgcacactgacatataacaattctttatcaacacattgttacagacatccagatcaacagcgtccgtactcggggcctccatcggcttgcggggagatgttatatgaagattcaatagtttcacgtaactgcatttatagtaatgagtagtccaaaacggagaattggcaatactgattccttctatctgaacattcttgcagttagacaaataaatgatacggggacgctgctcatccatattcgtacagttcggattccactccctacgcaaccaaaacgctttccaataacggaaaccattgccattgagcataccttttccagagatagtaaaaccgtcaatgccgtctgcattaatcaaagctgtataatactttaccgtttgtccttccatgcgggtaagctgaattcggaaatcacccgcatcatcacttcctttcaatacggcattttcttcaagatacaaatgcgtcttcggtttaaagaaaagcgaaccgcttagaaaagtccctttaggaattacaatgactcccccaccattcttcgccgcccggtcaatcacattctgtatctgttcggtttgtagttttgcactgtcattaactaccccataatctgttatcctatactgcttaccgagcgaatttatattcacgctctcattattcctgaaccagtcaggaatcagtttaccatcagggaacttatcttgtcccaaaacctgcaagcagcagcaaagtgtgataaatgcaacaatcaatttcatcttcgatattacttttttgattaaacttgtacattgcaaagttatcacatccaccgtaaataggaatggactaaaataacagaagaatgcacttttgtacattcttctttaataattcatataaaatcgttcattcctattagttttccggtctattttcttcttgttcaccggatttctcttctggtagctcttcctccggtacagcatctccgtctactccgcgctgatacacagaaggcgctacaccaaaatgctccttaaaacatttactgaaatagaacggactattaatccctacccgataagccacttccgaaaccgtcaaccgttcatccgacgataatagctcggcagctttcttcatacgtactacacgtagatattcattaggggaataacctgtcaagccacgtaattttctataaaataccgtccgccccaatttcataaattgcgcaaactcatccacagagaactccggtcgggacagattacgctccatcacaatatccaaccttttggcaaactctttatcccggtcggtagcacaaatcgtagtgcgcactcccttctcactggagaatttctctttcagtttatcacgctgttctatcaaacggaatacccgtgccaacaatagtttgatgctgaaaggtttcgcaatgtatgcatcggcaccggcctcaataccttccaagtgtttttccgcagaattcaatgccgtcaacaaaattatcggtatatgactggttgcaaaatccgttttcagcttctttgtcaactcaaatcctgtcattcccggcattagcacatcacagattatcaagtccgcatcatacgtagtcgctttttcgaatccggaaattccatcggcagccacttccatctcaaaatacacgccaatctcttcctgcaggaattgacggatatcattatcatcctcaataatcaagattttccgtttattcaaaggagtcgtcattttatcctgttcgggcagttcttccggcaattgttccaaatggtgattccagctatccgcttcttgcaacagcacattaccggcaaccagaaaatctttctcttcataaactgtcttatctgtcggaatacacaccgtaaacacagaaccgccaccttcgttatctctatactcaatagtccccttatgtacctgtaccagttcatggctcaaatgcaaacctactccaatactgtcaccggagaaattactttgcataaaacgtttgaataactcattctgcttctctttcggaataccgactcccgtatctgaaacctgaatctgcaaaatcttcttcacctcatccacatttacagacaggataataatacccttagaaggagtatatttaaatgcgttggaaagcaaattataagtcaccttatccaagttgcccttatcaataaacattttgtaagaagggacggaaggctggaatcgaaaatccatcgctttttgttccgccacatcaccgaaactcagaaatatctcgtagaggaaagaaattacatccgtctcttcaagggaaagagccagtttattattctgcattttccggaactcaagcaactgattaataaggcgcagcatacgctgagtactcttatccattgtctttaacggatgtaccaactcacgcggaatatcagtcacacgctgtatcttttccaaagccccgtgaatcaatgtcagaggggtacggaactcatgagatatgtttgtaaaaaacacaagcttgtattccgtcagttgcttttctatattgatacggttgcgtaagctattgaaattatggataatacggaaggcaagatacagggctataaccaataccagaatataaccgaataccgcccaattagtcttccaaaacggaggaaccacaacaatcttcaaagtagtctcattttcattccatattcccgagccattgcaagattttacatgcaacagataggttcccggattgagatacttaaaagatgcgaaattaagagaagacggagcactccatcctttatcataattctccagccaatacatatatttcgtacgtccgctatccgaatagtccagtgttgagaagtctatcagaatggagctttgataatatttcaaagaaatctcgtccgaataagccagtgactgttgcaaaggcgaatcctccatttcgggattcatctggattccattcacatacaaattagtgaaaacaaccggagaaaaagaatcattgttttgtatcttctccggatcaatgacaatcattccatagtttgttccaaaaagcaacttgccgtcttttcccacacaagcactgttctcactatatacatttcctaaagtataagaagagaaataataattatcagaagaatgagtaaccggattaaacttcgaaataccatactcggtagccacccataagtcaccgtttttatctccgagaatggattggataacatcgtttaccaacccttcgtctgttccgtaattctcatatttcagcaaatcatagttttcttgtggttcacaaagattcaatcccgaccccgacgtaccaatccacatacgccccttatcgtcccgatagatacatttaatctcattactacagaatttaccgttcgtgtagctgaacaaatgataattatcggcatcggcaatcaatgagtcaggatggaaaatgcatattccctcgctggttcccacccaaaccataccgttctcgtcttcttctatcacacgaaccatccgcaggcccaacctttcctgaaaaaagtgcctgaatttatatcccccgtccgcagtcggttcagccaaatcaagtcctcccccgaaagtacctacccacatccggtctttccggtcacgatagatcgaaaagacatcattagcggataatgtagtcggattcgaaggatcattgacataccatgaatccgctatctttaatccgtttccacgagtccccatccacattttcccttctttatcctcagtaatggcataaatgttggaatgaaaatactgatttgttatcttcgaatggaaatccgagtcaatggtatacagtcctcccctacgcgtaccaaaccagatatctccgtcggatgtcttagtcagcatacgaatggtattcgaacggtcgaacaaatcgggagattccggataaatacgagaagtaccttcgttcaaaacagagatatgggataatccggaatactcagaacttacccagattccaccggaacgatcctccatcacataaagcaggaaatctgaagcgatatgacttttatcgtttatattagccagaaaatgttccaatttatcctcagccgtatcataggcaaagagaccattaccatacgtagatatccagataatgccacgcgaatcgtgcacaatatgataacgctcaaaatcgatatagctcaacttatcttggggaatcaaccggaattcctttatttttccactatcggctgtgatataggtaagacaccctgtgtgattaaaaatccagtaatcaccacgattgtccattgttaatttgccatgtttgatattcaggcgagaatccgcagctatttctccggtactgaaatcatacgtatacactccggtagtagtaaggatcacccattggtccttcaacagaaaattcccggtaggtgatgtttttcccgcaatagaagcaatagaagcacattttttcatcttttgcgtagtagcctgatagcaatagacatctccctcttccgtcagaaaatacatatcattcttataggactgagaaaaagcaaaatgaatcaaccggtcttcaatcctgtactgaccgttagaaacggatactaatccgctctgtgtcccaatccatatccgtccatccgcaccctcactgacaaaccgcactctattgtccggcatattaccccgttctgttttaaacacagtcgatgtcatctctccgttatccttatgaacgattctccgacaaccatttccggaatgccataaccacacatcaccattgttcgctacgaatatagtcgaatagttctgcctcaaatctccgcaacctgtataatcaacgaaacgtgcacgctgcaggtcatagcaactgatcaattccggtgtcgtagaaatccatagaaagccatccttgtcttctgtaaggtcaaaaatacggttatcagacaacgatactttatctccggcttgcgggcggaatgtcagaaacgaattaccatcataacggctcagtccattcaaggttgccagccataagaatcctttagtatcctgatatatatagcgaatagaattgttgggcaaaccatcacttgttctcatttgtgtagagcgaagttcagtcgccccgtaaatgttcagcacaagaccgatagataagatgaagaataagatatgtctgtttatcataatagattttcagattaataatgaattagacaggcaaaagtactaaaaaaacaacacacaaaggtacaggccatagctttttattaaaatagaatattgtacgtaattatatagaaattgtgatataacctcattcagactgtactatgcacaatattgaataaatatgaatgaatttatattgaaaagaagaagaacacatcgtacttttgcaccaattatctataaaaaataaatcatgagaaacaagttattttattatctatgttggctgacagccgtcacaggcagtttgcaggcgcaagcgcaaaataaagtggttgctccgatgaaagatgtcaatcaagtaatcgacaacacattggatagtctgaacaaggcacgtacagccagaccgatagccggttccagccggaaaggcgataatccggtattattcctggtcggtaactccaccatgcgtacaggcacattgggaaacggaaacaacggacaatggggatggggattttatgcgggcgactacttcgatccggacaagatcacagtagagaatcacgcattgggaggaaccagcagccgtactttttataaccgtctttggccggatgtcatcaaaggggtacgtcccggagactgggttatcatagaacttggccataacgacaatggtccttatgacagcggtcgtgcccgtgcctctattccgggagtaggcacagacagcctgaacgtgacaatcaaagaaaccggagtgaaagaaactgtatatacatacggagaatatatgcgtcgtttcatccgtgatgtcaaagccaaaggcggacatcccattttgttctcccttactccacgttacgcctatgaagataaagacagtactatcatcaaacgtgtcaataaaacattcggtctatgggcaaagcaaatagcagaagaacagaacgtaccttttattgatctgaatgacatttcagcccgcaaatttgaaaagttcggtaaaaacaaagtgaagtatatgttctatatcgaccgtattcataccagtgcattcggagcaaaggtcaatgccgaatctgccgctgacggtatacgagcctacgagggactggaacttgccaattacctaaagcctgtctcgcaagacacaaagaccggttccagccggaaaaaaggacgaccggtattattcaccatcggcgacagcacggtgaaaaataaagataacgacaaaaatggtatgtggggatggggcagcgtaatagccgatgagttcaaccttgacaaaatatccgtcgagaactgtgctatggcaggacgtagcgcccgcactttcttggatgaaggacgttgggataaagtatacgaagctttgcagcccggtgattttgtactcattcagttcggacacaacgacgcaggagctatcaatacaggaaaagcccgtgcagaactacgtggttccggagaggaaagtaaagtctttctgatggaaaagaccggcaaatatcaggtagtatatacttttggctggtatcttcgcaaattcatcatggatgctcaggaaaaaggagcaataccaatcgtattgagccacactccacgcaacaaatggaaagacggaaagatagaacgcaacaccgattcttttggaaaatggacacgtgaagcagcagaagctaccggagcctattttattgatttgaataaaatcagtgccgacaaactggaaaaaaaaggtatcgaaaagacagccgcttattacaatcacgaccatacgcatacttctttaaaaggagcacacatgaatgccgaaagtattgcggaaggattgaaaatggttaattgtccgttgaaggattatttgaagaaataaaacataaaaatccctcgatatacgtaagagccacattatatcgagggatttttttatgttttatttcattgtttctgcaccgacataatatcctaggttagtaccttgattatatcccatattctgcatagcttgagacatatcataattatgatctgtcatcagatggcgaagacggtgagtagtcggatgatttgtagagaaaatataaatagaacgataatcactagagcctaagataacctcttcacgataatctcccaagaaatctccgtaataacaaggattgtatttcgttccatgattaccttgattacttccatatagatcgaaagaaaccaaacggttcttatttgttttatttacatccggattctctttatagctcacaatacaggcacggtcatacatttcccgcgtcccttgaccactccaataaatagcggcattgtacatcactccgctaccaatacctgttggatatgaaccggaaaccaatttaccgccattacaactcaacataccttgttgtgcagaagaccaatattcaaagtcaggactattcggttcaacgtctgccactatacaacggccaacatcactttcttttggtggtaatcctttcccatgtccagtaatcagactaccatctctcgcatcaatcacttggcaggcataaccgtgtccttgtccctcataattgacagactcttcaaaacttgcgacaatttgtaatccactacggttttgaatgaatttacctacatacagacagtcaccatgtccgtttcccgtacaccacaattcgcctccattatcatcaatggcagccgacccatataagatctcatcttttccatcaccatccaaatccgccacacggaagcagtgtgaacacattgccaaccatttttcgctatgatcagcagtatcaaatttccaacgattcactaattggttactttgcaaatcaagtgcccagacttgccagtttttataaatacctcgagaaataatcaggcttggattgctttttcttacaccagtcttctcatcaggtataccatccagataggctgctccgataaagaaacggtccatacgatttccataatcatctccccaataagaatcccaatattgggcacgtgctacttttgactcatcctcacggccacgaggtatattgggagttcgggtaatttcacaaccgtcaaagccacgacagatagaaatatactcaggaccttccaacactagtccggcagtagaatacaaactttttccggaataccatcccacaccgttcgtatctcttaaacgataatcattcacgaacccattggcatcagtaataattcttccgttagggaatttagtaccttcagatgaacggaatgcaatttcacacaaaccatctccatcgaaatcatataaaatataagaggtataatgtgaaccggaacgaatgtttagtcctaaatctatacgccataaaaaggtaccatccattttgtaagcctccaaaagagtggtcccattgtgccatcctccttgattagctccatcatacggttctctcttgactacaatttccaattctccgtctccatccaattcacctagttggatatcatcaggagcataggttaatgcaacatcgggcacatcacttcttaagacaatttccctataaaatttagtagccatttcagaagtgaacgtataatcgcacaatgtttcctcttggttagccaatgtcacccgataataatttacctttgccggatcgatatcctcatctacccaacaagtagtcttcgttatcggctcttcgttcagtttgacttcctcttccccgtcttctgatttataaatatcgaaacctatattatccggatcggtcagcaataaccgccagctaatcaatgcgaatgaaatccccgttgcgttatgttgatcaacgtttgccatagggtcatagctcacccacattgcacggcttccggtaataacctctgtaggcaagtctttcaatggttcttccgtaatgttattattaaaatccggttcttcgtccactatcggctcagcgtccgagcatgcactcaacgtcaatagcccaaacagtcccagtgtatataatatcttcatcatattctgcttttaatattaaacaatcatttttcaattccggggtaacctctaccaccccggattctgtgtcaaattaggattctttgctttctcactttgcggaataggaaagaaatacatcttatcatcccattgtctattcacagtaacacgcctatatgaatacgaatccccactcttatatattttcatttcatcaatactgctgaaatgtttgtctccttccttccaacggcgcacatcccaaaaacgatgtccctcgaatgctaactctaccatacgctcattctggtatttctcccaccataacttattatccagacctgcgggaaatttaggcatatttacctttgtacgccgacgagttttgctcaccatctcattggcaggaatagggaactcattattggtagcataagcagtacctaaatatttgaataacgcttctgcgtaattcaggtagaactcacccaaacgatatataatccatgtatgattatccgtcgtaggtttcgctgtcgtagtattaatacttgtttggcaatattttttcaaataataacctgtaggtgtccctccgctcaggggttccgcatttgcacctccctgataggtttccaacgcagtttcattccaattcggccattttgtatcaccattcttagcaatagttttctcaaatcgaggatcacgtccttcgtaataaggtttatttttatcataatccgcttttttatcaggcctttcaccactgtccttcaactcataggcatccaccaatgtctgtgtagggcagtttccacctcgacagttctccagtccgacaggaaaattatatttctcaaaagaattggtagcacgtatggcacgacaaccgaaaatgagttcatcgattgcaatactataactttttgcatcccataaattctcgtagtcatctatcagtctcataccggcatcttcgcaagtctcgatcaattccttattggccttggctgcgcgataccacaactccttgtacccttgactcccttcctgatgagaattgaataacggacttgcagcatacagagccgtacgcgctttcaatgccagtacagtacgcttgttggcacgccctgtttccgccgattcaccggaaggtaccaaagcccccaggttattataatccggtattatcagatcttttatctcgtcacattctttaataatccagtcgaatacctcttgggcaggtttacgtgttagcgtattcacctcagtggttgacaatacatggtcggtaaatggtacatccccatattgtcttaccaaattaaagtagaaatacgcccgcaggaaacggacctcatactgatagttattatagcgatacatttcagcttcatagtcagaaatttgttcatactccgagaatgtcagtccggtaaattcctccagataattgttacaattagcaattgctttataacaggaagtccacatactgctttgtgcatttaccggactccatgccccattgtaaaaagtctcaatagcattacctgtataggaatattgtgattcatccgtagcagaaccaagaatagcaccactataatttccgaaatcagagtcgagcgactggtaaatgttagataccaatcctcctacatcataaaaagtacgctttacataacccgcatcataaggattgtattccaaatattccatctggtccgcacaagaagaaaaagcgaagatggtcagaacgccatatatcaatttattcagtttcattctttacctcgtttttaatgattaaaatcctatcttaacacctactaccacactcttggtcaatggatttgtcgcaccgtaagattccggatccgccacgtcgatatgatcaaaacaaagcaaatccactccccgtacatacaatttggcactacctaatatttttgtccgcttcatcagacgttgagggaatttataataaacctccacattgcgcaatttcaagaatgaacggtcggcaagccagatcgtattagtctgataattattggcattactctgcgaactcagacgcggatattttgcattcaagttctccggagtccagcgattttcataatagtgcgtggaaagtgatgtattgttaatcaacggccaaaacatactctttgtattcaagacggcagaatagtttcctgttccctgaaacatagcatctaatccaatccccttccattctgctcccaaatggaaagaataataaatctccggagcagccgtactatatccaatagcggtcacatcgtttgcatcaatcacttcatctccatttacattcttatatttgatatcaccgggaactactgtactgaagttctgtgccgggctactcgcgatctctgcctcatctctgaaaattccttccgctaccaagccatatacttgattcaaccggtgtcctgtccgtttcaaattatcatataaacgcggttcttctctctgttccttaatttcgttccggttaaaagcaaagtttcctccggcattaacagtccagtcaccccatcgcttcgtataatccaaaccgaactcagtgccccaactatctacaataccagcattttcataaggagaatccataccaagtactgttgagtattgaccgctagggtctacccaaatatcttttcgacgttgataatatccttctaccgtcaaattcaatcctttgaacagtgtcgcatccacccccacattatatttataagctttctcatgtgtcgaatttattgtagccaaccgattcatgtaagtagttccaaaattggatccataaccgacatcaaacagatagcgtgtacccgttgtcgtatagatttgttcccaatagttatacactgagttgtcaccgtctttcggtagataatcagcattaataacaccaaacgaagcacgtaactttaaaagatcaacccaagaaacctctttcataaagtcttcttccgaaagcacccaagctgcagaaacagttggtgagaaagcccatttatgtcccggagccaatagatttgaggccgatccgaccaatgccagatctacataataacgcttattgaagccatagtgagtataccacgatatattttgacgatatatactggtattcactccataagtgtcacgaaattcatactcccatttcaactgcgaataaacatcatgtttgccgaacgaacgattataatcaaaacctccggagaaattgaactgacgcgcccaatcgtttgtatcggcaccggttgccatctcactgggttttccacctgtaacaactgtgtacaacggaccaccggcgcttgaatcctgccagctaggtatatatcccctataagcatacgtcttgctatgatcttcccagatggaagagtagttgtcatacgccaaacgaaaactcacacctagccccttcactaatccggacaaatcttgggataaagtcaaatctgccagcaagctacgtgtatgtcccttactataagctgctccttgcgattgcgccaccggattcatcgtacctgaccaagtggaacttcctccccacgaaccatcatctgatagtataggaaaggctgcggaaggaatcgaataaaccatatcccacaaatccgtactagaggttcccggacgacttgattcagacaatgagccgagaagatttaatttgagtttggtagtactcgtcaagtcaatatccaaatttgtgcgtaagttagcactagaatatttgtcttgtgtagaataaccgtcattcatattagcattggcaacaaaccctttgtctgtcatcaaccccaacatagcatagtaacggaatttactgccacctcctgtaaactcaatattatatttattagaaactcccatatcacgaaatgtttcatcaatccaatccacattcggataaaaataaggcaattgcacattgatacgatcacttagtcccttcactcttccataacggaacgcatgaatttcgagaggagtataacgtacgtctaatccttcgtaacctcgtgcctcgttcacagcttcggcataagtagccgcatttacaaaatcaggacgacgtgattggaaattgattacatgatcgtaagtaaactttatttccctcgaatgatattttccccgtttggttgttatcagaatagctccattaatacctttataaccatataacgccactgcagcggcatctttcaatatagagaccgattctacctcttccggtgacacaaggctcatatcacgttccaacccgtctaccaaaactaacggtgaactgctagataggctttgtaaaccacgtacgtaaaaagtaggttccgtactggaaaagttacccgcattctgtaaggctgttaatcctagtccctgtccgaaaagagagttagagatattctttgacgcccttttatcaaattcttcattataaacggtagagactgccgcagtcgattcatgacgactgaacgtccggttagcccctacatctacagtgacggaatctccagacactcttcctttattatccatattctgtgctcctatcggcatacccaaagatgccaacagagccagtaccagcattttattatttttcatatcactgttctaaaatcaattttactcatgtttctcatcaccagccgggattttgaatcaaaccgtatcctttgttgatttcattctgaggaaacggagacagataccatttcggatcgaatccctgcgtccaccaaacacgtgctctgttatgcaattcaaatttctgatattcgaatctcgtaggctgcatggcatttttaccaaacgcatctgttccatctctccaaggtttctctatacggttacccgcctcatccaagcgataaattaatagcccatgcagtttcttttcaaagcgatctgcacgtttgtaacgaatcaagtcaaaatatcgactgtcttccatacctaattcacaggcacgttcgcgaagtatttcctccaataaagcatctttatcactcgtcagatttttattcgggaggcaatcttccagtttacctaaaccaacgcgcttacgtacttcattcacccaataaagagcatctgtgaaattattatcggcttgtaataaagcctctgcatacgtcaaaaagagatcagacaaacgaagatatacccaatgaataggttggcgttcataatcactatcgctcaaataatatttcatattatcatatccggtagcaaaacgcatattttccaatgcaggagccgtctttgcatctgtacctcccacccacaattcccatgggtaatcactcattttaggagaagaccatcccaaatttcgaggtatattgttcacaataacagattcgtataaccgtggatcacgagtcagtatgagattggaaagagtattttctccattaacaaactcgccagtcaaaaacatatcgttcaacttaccttctgtatctgccttattccagtcaaaaggtgttccatccgcccaaggaaacatttcaacatactcttgggtgggagtataagagttacgtccattattacaccaagtacgccatatataagtagaggacccgcccggacgttcatagcccgctacacgtacagaatgcaagacctcaggactatccagaaggatatatcccatccggtaagcataccgatattcagtaggagtaggattgtcacctgctgctttccgcaactcatagaagccatttgcctctatggcgttgaaaaactgcctgcaatattcaagacatttattccacaaatcggggcgtttacttccataccacaccaaatgttgttgctccgcctcactacgtccaccggcatatccttgagtatcattgaacaaaggagaagcagcaaactgccatagcttacatctcaatgccatagcccctgctaatgtccaatgaccaccatcggaattaaaatcagctccttcatacgaccatttcaggccaccggagccaatagcctcctccagcattttatccatatagttcacggtttcttccaccgtggcgcgcggaaattggtagtttgtctctgttcccgtaaacgatgaataaatgagcggtaacccgccatagtggcggaacatatcaaaatagcgagcagcaataaggcattttgcttctgctttcatctgcactttttcatcttctcccataccaggtactctgtctacgttctccaacagtaaccagcaccaccgcacagtctgccaaacaccttcacgagtatatccgaaaatatccccacgaacaccgtaattagcagtatgtgtaccactataataactgttataaattgtagttcccgaatagtgaagttgccaacaatcagtcaatgcatcaaactttcctgtataaggattagaagaatccggaaagtcgtcaacagaagaatttacgtaaggtaaaccataatattggcggctataacaggtgttcagaaactgccgggtataagtgacactattaaatatagtatcttgagtagcagatccacccggtgctttttcgagaaagctgttaccgaatttaatctcgtctacgcaagaagtcgctcccataccaagcactcctgctatcattgctccgataaaccatttatatttttgtttcataataatcaatctttaaatctgtttttagaatcccagtttcagccccaatgtatatgtctttgtcaatgggtacgaaggtgcattactagctcttgcttccgggtctccccataaataaggtgtaagagtccacaaattataaccgctaaacgatagctgacaagtactcatccccaacttcttcatcagagggaactgaaaattataagcaatagtaagggtcttgagacgcaaatatttggaatcctgttcgtaaagggttgattccgcatagttgttatcagcgttctcccatgtagcacgtggatatttcgcatcttgcgacggattctcttttgtccatgtattcgtcaagtgataggcaagcaaaccacccgcaacattaccggaactagataaaaaaggccgacggaatacatccgaaatcattcgactcacattccatgcaccggtccattgcgtattcacttccagattcttccaagaaaatccgagattcatacctaccatgtattccggatcatccgtaaatccgtaatcatagcccatatcattttcatcgatttttcgatcaccattcaaatcgacatacacagcatccccatcttgcagaacaaccgaatgagcaggaaacggacgatggaatgtttgttcatacagtgccggtgtctgttcatcataataacgccagaaagcatattgcttacgtgaaccgatacgatgtcctttctggtacagatagtcgtactcctgaggagcttctttacgctcgatgatttcattttgattataagaaaggtttatacccgcccaataacggaaatcttttccaatcttatcgttccatttcaacgaaagttcccatccccagttatttacctcacctaaattggagaaaggttgagcaaaacctaacatactcggagctgttccgtcttgcagaagaatgtcccaccggtgttccttatagtattctattgtagcagataaacgatcgtttaaaaagttgatatcaacaccatagttctgtttaaacgctttttcccatgtcacattcgcattgttaatcgcccactcatgtgctcctaaactcacagtagaagtctgtcctccctgaccgaaaagatatccataggcagcctgtaattgagcaagattaccagttccataaccagagttacttacatatccgttcaaattaacatgataaggattagcagtatacataaaacgagagccaccgattttatcgttacctactaaaccgaaactggcgcgtagtttcagaaagcttattaccggtttgacagattcccaaaacttttcttcactcgctacccatcctacggaagctgccggaaagagagcaaaacgattgcccgcagcaaagttctccgaaccattataacccatgttagcttctaccatataacggtttttccagtcataagttacacgtcctaccaaaccgacatatcctcgcggaacatctgaatattctttaggataatattctttagactgattataaagcaccaatgcccctatattatgatcaccaaacgaatgattataattcaatgcggcttccatataccagttacgtgattttccccgagtaattccatagctcacattagtatacttactaccgtctatcggtcgtagtcctacacttccatcactctgcaataccggtgtataagtcatttccgtaccacccgacaaattcttattaatggtaaatgagctattgtatgaacctttcaatttgaatgaaagtcctttagtgataaaatccaatttctgattcaaaataaggtcggcgttcaacgagttgttgatactatgtgctaccccacccccataataagtgaatggatctgcatcaccgacaaaaggcaagttcaacccatcggactgtgagtcagtagtagtatataccaatttatcatttacaaagccggcactcctaaacggagtagaataatagatatttttaaccattccggatgacccttgactagtgcgtggcttctcagaagaattaacgtttcctgccacattgaacgagatagtagtggttttcgttacatctatatctaaattactccggtaattgaaacggcgatattgataactgataccataaggcaaactaaactcattgaaaagtccgccttgcgtataagcacctgctgagataaaataacgtaccttatccgtacctccggaaatattcagattatgctggctctgcagagtagcgtctcccatgatataatcaatccaattgatacttggaaaacggataggatcagaaccatcccggaatttctgaataactccatccgagaatgtcttgacaggtttttcccccgcaggtgtatcattggctatcatttgattataaaacatagcatattcataagaattagcagtttccaccattttagtaggcatttgtatagaagcagaagtgctgaaagagatatgtgcctttccttccctaccgcgcttggtagtaatcagaataactccattggctccacgtaccccaaacacagcagtggcggaagcgtctttcaaaatggatatagactctatttcattgggatctatgtcattcatgctacgttctacaccatccacctgaatcaatggagacgcatctccccatgtcgctttaccacggataaaaacctctgcggcatctgcacccggttcaccggatgtttgaatggtagtcagacctgccatctgccctcctaatacattagagacagaaccaatggaagtacgtgtcagggcttcggtcttaacacttgccacagcacctgtcatcgttactttcttctgcacaccatacgccacgatttccacctcttgtaaagtggtagcgtcttcagataaaaccactcgcatattattctgggctactaccacttgttcggtatacccgataaaggtgattttcagcttcgcccctgctttcgcattgatcttaaacacaccgtcgatatcagtaatagtaccgacagaagtacctacaacaaggacattggccccaattaccggctcgcctttatcgtccaccacagttcccttaatactgccttgttgctgaacgatgtcaacagcagctacagcctgtccttgattgccgaaagtcggtatcagggcgaaagagaaaaacagggcaacaggtaaagttgttccttttattaagtttttcttattcatatatttctattttcatgatagaggagttgtgaggcggcgaagtacgccgcccttatttactttgaaaaaacattgtatgggtttaaaatgcaagcatcaaacggaaataaccggcagcagtacttccatacgagtttactatattataacttccaccattcatagcgtgtacccattgtgtatatccatttcgcaaagtactactccaataaaaaccaaattttgcacttgcttcgactgattccaattgtgtagcggcctctactttccctaagctaccgttcactgcactcagatttttagcaacctgttccaaacaagcaatagatggaagataccatggagtagtattcgcaggaacagatacattgtcacgataagaggtaatttgcttgtaagcatcatcacacatagttggctgtcctttcccttcatagcacatcgtcaacaacattgtattgttataccccataaaagcaggatattgctccacccatttatctttagtcgcactattattacccgtattacagtcaacgaacttacccatccattcttcatctttgctaaaccaatcacaatatgcttcaccaacagttctccaactactaaatttattcgtattatctaatgtattatttaacgccaataccaacccatgtttacaattcggataatcgcgttttagagcatcattgtcttcggtattaccactttggggatgcgttatagatggctgaggattacctatataacatacaataccaattacattattaggaatatctttatcatctacccccttgcttacaattgaaccatctgcacaataataatctcctattgacaacgtatattcttttttattcgtatcgctaactgtatacactttagcagttccttcatttaacttagcagtagcagtgtacgtcatttcctttactcctgtataagagccttctattttaaactcctctcccggttttaccaaaaaacgatatgcacctgtactcttttgataatacggagttacttctttattattcagtttgaaagaagcattcgttatcggtaactcataatcatctatcgttacatccgaattaataaagttatagactaggttaggcatcttcaatacagctaaagccatacaatgctgcatcttaaagttgatttcccctttaaaacgattgtctaccacagcactgcttgaacttgtcatcaaatcatatttcgtatatttctcaccgctttgatcattaccaagtgtccactcactaatatactcagcaaaaggatccccctccgtaacattaaatttcacattgacatcgtatggataatatgcataaaacttcatttgtttgaattcagctccgttgtatttgatttgttcaccgtctattttccaattaccgtctgccgtcatcatacatttccgattattgatattctctactattccattagcgtccactccaaaaataccaatctcgtctccttcggtaaactcggtagcatatcctttctctatagcacgtgtacctggagttgtatcaaaatatccaccatcagatacactgatttgtaaaccactagaagagttgtctccgttcatttcctttacatcttcctcttgtgaacaagaagagaaacttgcaatacctgcaattaaaagtgctgatatataactatatattttcatattcgtatttcttttttattgaataattaatgtatatataaataggtttaaaagatagactattgtttttcagtagcagtaatctccccttcttctacattccaattaggattctctgtcgtagctcctgtatcaggggcggtggattcggcttcaatatcttcttcttccgtagtccaatcatttatttgcgtaccctctttcgtgatactaaatacatactctttttgatccaccgacatatttgccgtaattgtataattataagaaacgcccatatccaacttcgttaatttgggaaattctacttcatacaaacgaccttccattcgtgcttgaatactcactttgttatctacagtttgcggtaataaaatagcctgcatcttatattcatctaccgctcccacattaccccaataaatgtcagtaggctttgcagtttcgttaacagttgttgcccccgtcattgtattgaatgtaccttcgagtttcaaaccgatgagatagcaatcaatatccgaaagctcaactccatcaccagctttaaactccactttcaggcggctcatcttatgattaaatgacaactgcacatttggctgagtagcacttgcttttgctgtagcataaagaaagtcaaggtatttcctctttgcttccgtagcttgattttcactatcagtcaaaacctgcactaccccttgactgataccggatgtaccaacaaatggacaataggcagccacatcatattcttgtgtacctaacacccaaatttcttctgctactccacctttcgctacaaacatattatttgcatcaccggtgtatttgtagtgaatgttctgttgattatttccacaagagatccctatagaatctccaacttcccattgggtatcagttgctctagtcggtgccaacgtacttcctgttgagttattgatcactgcactaaaagagactttcacccccgtctctcccgcaaatttgatgtcagattccttaacatcagtactacatcctgctaagaataacagaataatagcaatcattacatagtttttcttcataccatgcattttaaagtttttataaatatatattgttgattaaatccattataatatggaatgaaaagaaattgccgacaaaattcattttgcatcgcaactaaagtagaaaatgcttgtttttcattgtgtatcatttttattatacttaagttaaacaaaagttagattaagttttaatcaggcatcattatttatattatatacctaaaaactgatgcaaacttagagaacaatacagttattaacaatacaatattgtacataagcataaaaaatactgccttttgtacaaatgaacatgggatgaataggacatatatggaataaacaggccaaaagaacatctcatatccgttctattacatattttgataaattcagaaaacccggatcagaaaaaacaagtcgaatctatccgtaatacagtccaagtttcatgtccgactattgctttttactaattatttttgtatcttagaagtttccatcttctcaaaaacaaatggtcaccttataaagtgccatttgtcattctataaagtgccatttgtcccgttataagatgactattgtcccattataaggtgacaactacccgaatgcataaactatactagttttatgcactgaaaatctttaatcttcgcactgaaaacccttgaaaacaacgatgaaatgatggaaaccttattgtatcatatcaagaataactgaagcatccaccgcaaaggccgttccatgacggattcctttcggaaaagagacttgatcggaaacgtcttcccacgtttctccatgatcgagggaacggacagccccataacgatggtcacgatacttatcaaaatacacataaagagtatcacctacaaaaagaggagcaggcccctccgcccaatagttgcctgtgatgggagccgatactttggttgggaatcccctccttatattctccgtacgtgtcacacgcaggtttttctccggcggattagagttctcattcttaactaccataatcagatcgttcctctttggatctttcacaatagcagcatcgataacgctgaaatccggattgaaaaacatggcagtcttcgagaaagatttgaaatccttagtcgttacataatagatacggtggttcagtcccttttcacttttactggtaggcacttccttatgacggccggggatcgtagttgcccagaagatataataggtttgtgacgattcatcataaaacagttcgggagcccagcagttatgtgcggcaggttcattcatcatcacaggaatagccttttgctcactccaatgaatcaagtcacgggaagaagcataaccaataatccggtccgtccaactagaagtccagaccatgtgaaaagttccgtcgggagcttgacaaatactaggatcgcgcatcaatttatctttgcccacagtaggagttaaaaaggaacgaccaccattcaaagccgtccaggtcagtccatcataactataagccagatacaagccatctttactgttatttatgaaataggaaaagagataaacggtatctccggcggtaacgttcattatagaccagacggtcaaaatcatccagacaattacatttttcatggttcattctaagattaaccttaattccgcaacactattacaaatataactttttaagtacctgagcaacaaaaagttgctcaggaatttgccatgtcagatttttcacctatcttagtgttgcaaatcaaaatatgtatcaaacccgacagacatggcaaaggtagcaattaaatccgagaaactcactccttttggaggaatattttcaataatggagcaatttgactccagactctcatctgtaatcgactcaaccctcggtatgagatgcaggctgtatggttatcaatacagcgaaatcatccgttcgcttatgagcgtttatttttgtggcggctcatgcatcgaggatgtcaccactcatctgatgtaccacctttcgcttcatccgacacttcgcacatgcagtgccgacacgattcttagagccataaaggaactgacccaggataacatttcctacacatccgacactggcaagacctacgacttcaacacggcagacaagctgaatacactgctcctcaattgcctattgtccacagggcagctgaaagagggcgaggggtatgacgttgacttcgaccaccagttcatagaggctgagaagtttgatgcgaagcctacatacaagaagttccttggttatcgccctggcgtggcggttattggcaacttgattgtcggcattgagaacagcgacggcaacacaaatgtccgtttccaccagaaggacacgctgaagaggttctttgaaaggtttgaacaaaacaagcttattatcaaccgtttcagagctgattgcggctcgtgttctgaagagatagtggaagagattgctaaacactgcaagaccttctatatccgtgctaaccgatgcagttcgctctacaatgacatctttgccctcagaggttggaagaaagtggaattgggcggcattgagtttgagctggcctccattctcatcgagaaatggaaagggaaggcataccgtcttgtgattcaaagacagaagcggatagacggcgaactcgacctgtgggaaggagaatacacctaccgctgcatccttacaaatgactacgagtcttccgagaaagagattgtcgaattctataacctccgtggagggaaggaacgcatcttcgatgatatgaataacggattcggctggaacaggcttccaaaatcctttatgggagaaaacacggtgtttcttctgcttatggcactcatacgcaacttctataaattcatcatggcgaggcttgacgtgaagaggttcggactcaaagcaacaagccgcatcaagacgtttgtctttaagttcatctctgtgccagccaaatgggtcaggacatcaaggaagtatgtgctgaatatctattcatgcaacaatgcttatgccaatgtgttccagaatgactttggataacaccgacaacttatagtcgtgattttgcgtattgcctcaagtcgcatggtggggtaaggggcatttatatgtctttatggtgacattcgatgcactgtgccccctttttactaacgatgcagattcttttcgcttctgtatcatattaggcgcgtagttgcggatttgaggattaatagattcagctcgcaaagataccgtatcttccaaagataccgaaaagcaaagggatagattaattggtatattcatacaattttgtacacatacatctatacatcccatttttgatacgattgtttatgtttctgtacatctttatatttcaagaagttcgaaaaagccctactttagcaccagaatttaaaagataacgaaaatatatcaatcttacgtatcatgataaaacattttctaggcagtattattcttgcatttctttcgatatcgaccgttacaggtcaaagcaatgctcttgatctatccggtaagtggaatttccaaatagaccgggaagatacaggcgtaaaagagcaatggtttcgaaaaatattggaagaccacatcaatctgcccggttccatgcccgagaagttaaaaggcgacgaagtgaccgtacacacgcaatggacaggaagtttatacgacagttcctactattttaatccttatatggagaaatacagaatggaagggcaagtaaaactaccattcttcctgactccggacaaacattatgtaggtgtggcctggtatcagaaaaacgtaaccataccatccgattggaaaggtgacaggatcattttatttttagaacgtcctcatatagaaaccaccgtttgggtaaataaccgggagataggaatgcagaatagcctctgtgtgccgcacgtttatgacctaactgccgccgttgctccgggaaaatcttgtcggattaccatccgcattgataaccgtatcaaggatatcaacgtaggaccggattctcatagtattaccgaccagactcagggcaattggaatggtatcgtaggacgcatagagttacagaccactcctaaagttcattttagcgacatacagatatatccggacttgaaagaacggaaagccacagtgcgaatcagtctgtacgcaccagcctctgccaaagcaacgttacaattatccgctgaaagtttcaactcggataaaaaacattccgtccctactgtacaacagaatatctcagtacgttccggagataacaaaatcaaaatggaactaccgatgggagaaggttttctgacttgggacgaatttgatccggcactctataaactgacagcgacactgacctgtggcaaagagagagaagtcaaagaagtacaattcggtatgcgcgaatttaccatcaaaggtaaatggttctatgtgaacggtcggaaaacaatgcttcgcggcacagtagagaattgcgattttccgcttaccggctacgctcctatggatgtagcttcatgggaacgggtattccgcatttgccgcaactacgggctgaatcatatgcgtttccactctttctgtccgccggaagccgcatttattgctgcggaccttgtcggtttttatttgcagccggaaggtccaagctggcctaatcacggtccgagactaggcaacggccagcctatcgacaagtatctgatggacgaaacgattgccttgaccaagcagtatggaaactatgcctcttattgcatgttggcgtgtggaaatgagccttccggacgctgggtgccatgggtaagcaaattcgttgattattggaaagcaaccgacccacgccacgtatatacaggagcttccgtaggcaacagctggcaatggcagccccataaccaatatcatgtaaaagccggtgcgcgcggactcagctggaccggtgcgcagccggaaagcacatcggactaccgtaaccgaattgatacggtaaaacagccgtatgtttcccatgaaaccggacaatggtgtgcattcccgaacttcaacgagatacgtaaatataccggagtaaacaaagccaagaactttgaaatctttcgggatatattgaatgataaccacatgggaggtatgggacacgattttatgatggcttccggcaagctgcaagcgatctgttacaagcatgagatagaaaagacattgcgtactcccgactatgcgggattccaattattagctctcaatgattattcgggtcagggaacggcactggtaggattgctggatgtattctttgaagagaaaggatacattaatgccgcagagttccgccgtttttgcagtccgaccgttctattggcacgtatccccaagttcacatacaccaataacgaaacgttccatgcagatatcgaaatatcccacttcggaaaagaagctttgcaaaaagcaaatacagtctattgcgtaaaagataaatatggcaagatatatgctcgcggagtggttagtacacgggatattcctatcggcaatctattctcgttgggcagcatagacatgaaactgaacgatatccgtactccccaaaaactgaatctggaagtacgtttggaaaacagtgatattgtcaacgattgggacttttgggtatatcctgacaaagtgaaacttacacaaggaaacgtatacacaacggacacattggacgagaaagcgatatccatcttgcaggaaggtggaaacgtattgataacagcagccgggaaaataaaatacggcagggaggtcaagcaatatttcacacccgttttttggaatacatcttggttcaagatgcgcccgccacatacgacaggtatttttctgaatgattatcacccgcttttccgtgattttccgactgaatatcacagtaacctgcaatggtgggaactattgaacaaagcgcaagttatgcagtttacgcatttccccgctgagttccaaccgactattcaaagcatagacacttggtttatcagtcgtaaaataggaatgctgttcgaggctaatgtattgaacggcaaactgataatgaccagcatggacatcacttcccaaccggagaaaaggattgttgcccgtcagatgcataaagcgattcttgattatatgaattcggatgctttccgcccgaatacagtcataagtcccgaacagattcagacattatttactaaaatagccggagatgtgaaatcttatacgaaagattcaccggacgagctaaaaccgaaaattaattaagcagactgatatgaaaactactttcatagggcttctgtttctggtagccccttatataaacgcacaggagaaaatccgaacttttcaactgtcggatgcaccgcgttacagcgaagaaactggatacggatatgatcttaccgatacaccggaaaaaggcagtaaggcacccttcttcttttctgtccgtgtaccggacggtaactaccaagtaaccgttcgtctgggaaacaagaaacaggcaggagtgacaacagtaagaggcgagtcacgccgactgttcattgataaccttgcgacccaaaagggacaattcgtagatgaaacatttatcatcaacaaacgcaatccccgcatttccgagaaagaatccgtacgaatcaaaccccgcgaaaaggccaaactgaactgggacgataaactgacgctggaatttaacggtgatgcacccgtatgccagagtatcagtatcaagcctgccgatccgtcggtgattaccgtctttctatgcggtaacagtaccgtagtcgaccaggacaacgagccatgggccagctggggacaaatgatacctcattttttcggtacggacgtttgtatcgccaattatgcggaatcgggggaatcagccaatacgtttattgccgcaggacgtttgaaaaaagcattgagccagataaagaaaggagattatcttttcatggaattcgggcataacgaccaaaagcaaaaaggaccaggcaaaggagcttattactcttttatgaccagcctgaaaacatttattgatgaagcccgtgcgcggggagcatatcccgtactggtcactcccacccaacgccggagttttgacgccaccggacatatccgtgacacacacgaagattatccagaagccatgcgctggctggctgctaaagaaaatgttccgttaatcgacctcaacgaaatgacccgtacgctttatgaagctttgggaacagaaacgtcaaagcgtgctttcgtacactatccggcaggggcttatccgggacaaaaacaagattttgccgataatacccattttaatccttacggtgcctatcagatagcccaatgtgtgattgaaggaatgaagaaagccgtacctaacctagcgaagcacctaaaaatagatccggcatacaatccggcatacccggacaatccggatactttccactggaacaattcaccttttacagagatagagaagccggatggtaactgatatgtatataaactgatatagtatatgaaaaataaaaacatacttgccctatgtgtagcagtacctctgtttatcgcatgcactcctgccaaacaaaccggaaaagacttccaatggggagaacttccgcaacagcctgatttatcatgggctgacagtgtcggtagtcggcaagaacctatcaatcatataaccctatctgccaattctttaggtgcggtagcagacagtactgtactcagtacaacagctatacaaaaagcaatcgacagttgtgccgtctccggcgggggaaccgtcactcttcaaccggggtattaccagacaggggcactctttatcaaaagcggagtaaacctccatttggacaagggtgtgactttactggccagtcctcaaattcaccattatccggaattccgttcaagagttgcaggaatcgaaatgacatggccatcggcagttatcaatatcatagatgagaaaaacgcatctatcagcggagaagggacactggactgtcggggaaaggtattttgggataaatattgggaaatgaggaaagaatatgaggcgaaaggactgcgttggattgtcgactatgactgcaaacgtgtacggggaatcctcgttgaacgcagctcggatatcacattaagcggattcactttaatgcgtaccggtttctggggatgtcagattctttattccgaccattgcaccatcaacggattaacaatcaataataatatcggaggacacggtcccagtacggatggcatcgacatcgactcatccacccatgtattagttgaaaattgcgacatagattgcaatgacgataatatctgcatcaaatccggacgagacgcagatggcctgcgggtgaaccgtcctaccgaaaaaattgtgatacgtaactgtatagcccgcaaaggcgccggcctcatcacttgcggaagtgagacttcaggaagtatccgtaatatattaggatacaatctggatgcagaaggaacttctacggtactgagactgaaaagtgccatgaatcgcggaggaacagtcgaaaacatctacatgacccgaatcaatgctaagaatgtgcaacaggttctggcggcggatctaaactggaatcccaattacagctacagcatcctgcccaaagaatatgaaggcaaagaaattcccgagcattggaaagtaatgctgactcccgttaatccgccggaaaaaggatatccacatttccggaacgtgtatctgtctgatgtaaaagcagaaaacgtaaatgaatttatctctgcttccggatggaacgattccttacgcctggagaatttctatctccatgccatcaaggcaacgacaaacagtcccggaaaaatatgttatacgagaaactttaatttatccgacattacattgtatgccaaaaacagaaacgatatggaactgaaagaaaatgaacaaagcaatatccagttcagttacgccaatccgacaaattctgacgacagaaccgccgaacacctgtaatggacaagggcagtcaaatatccgataaagttcttattcattattgactgctcgttccaattgctttaatgcctgttccaatgtagcacgcgggcaggcaacatttaaccgcatgaagccttcgccctccttgccgaatgttgttccgtcattcagtgccagatgcgctctttctacaaacaggcgattcaaactctcttgattcaatcccagttcccggcaatccaaaaagataagataggaagcctgcggacgaatcatcttgacggcaggaatatgttcccgcaaatagttttcggtaaagtctacattgcctttgatatatgctatcacctgatccagccattccgtaccatggctataagccgccgccacactcagataggcaaacagatggccttcacaaaactcactcgcttccatgtaggtacggaaacgttgaagaagttcctcattttcgatgattacataagagcttgccagtcccggcatattgaaagccttgctcggagacataaagacaagtgagttcatccgtgctttttctgaagtcaaagcaaaagtgggatgtttataaggtggcaaagtcaggtctgcatgaatctcgtcggagataaccaaagtaccggtttcctgacaaatatcagcaatctgcgaaagctcttctttcgtccatactcgtccgcccggattatgaggattacttaaaatcagtattttacaaccttgtacatcccggcggaaacggtcgaaatcaatgtaatactgtccgttcctcaacactaacgggctgaatacaacttcgcgttcatttttctgcgccacaaggaaaaaaggatgatagacaggcggcattaccatcactttatctcctttttccgtgaaacagtggatagcaaaagccaacccgcgaacaatgccgggagtaaacgtcagcatttcttcggtgaccgaccatccgtgacgttctttcaaccaatggataatggaagccgcccattccttacaggcgaatgtatatcccagcacttcatgctccaaccgctttttcaaagcctctatcacaaatggagccgtacggaaatccatatcggctacccacataggaatcaggtcattgcgtccccaacggccttccactccatcccattttacggaatccgtaccgttacggtttattatttcatcaaaattatagttcatactgcatgatgtttttatgttatatgagacaaaagtagtacttttgtcttcaattcaaaaaggaatctatgacgaaagctttattttttgatatagacggtacactggtcagcttccatactcaccgtatcccgtcttccactatcgaggctctggaagccgcccatacgaaaggacataaaatatttatcgctaccggacgtccgaaagccattatcaacaatctctccgagctacagaagcggaatctcattgatggatacatcacgatgaacggagcctattgttttgtcggagaacaagttatttataagaacgccatcccccaggaagaggtaaaagcaatgggagatttctgcgaaaagaaaggagtaccctgcatttttgtagaggaacatcatatttccgtttgccagcccaacgagatggtaaagaagattttttatgatttcctacacgtgggtgttatccctaccgtctcttttgcagaagcgaccgacaaggagattatacaaatgactcctttcattacggaggaagaagaaagagaaatccgcccgtcaatcccaacttgcgagataggccgctggtatcccgcctttgccgatataaccgccaaaggagataccaaacaaaaaggaatagacgaaataatccgttattttgatatcagactggaagacacgatggcattcggagatgggggaaacgacatcagcatgctccgtcatgctgctatcggcgtggctatggggcaagctgaaaaggacgtaaaagctgccgccgattacgtaacggctccgatcgacgaggatggtatcagcaaagcgatgaaacatttcggaattatttaacaagggggatttactctatttatcaacatgagcgtagacactaacaacgcagagtttcaagatgccttgaacctgattcaatatacacgccaatctgtttttctaaccggaaaggcgggtacaggaaaatctacattcttgcgttacgtctgcgaaaacaccaagaagaaatatgttgtacttgctccgacgggtattgccgccatcaatgccggaggaagtacgatgcatagtttcttcaaactgccttttcatccactgccaccggatgacccgaatctcagtctccaacggggacgcatccacgaattctttaaatatacgaaaccgcatcgaaagttactggaacagatagaactggtgattatcgacgaaatttcaatggtacgggcggatattattgatgctatcgaccgtattctgcgtgtatattcccataacttacgcgaacctttcggtggaaagcagctgttattggtgggtgatgtttttcaattagaaccggtcgtaaagaacgatgaacgggatatattgaaccgcttctatcctactccctatttcttctccgcacgagtattcggtcagatagacttggtatccatcgagcttcagaaagtatacagacagaccgatcctgtttttgtcagcgttctcgaccatatccgtacgaatacggccggagcagccgatctgcaactgctgaatacccgatacgggagccagattgaggaatcggaggccgatatgtacatcactcttgctacaagacgggatacagtagactctatcaatgagaaaaagttggcggaactgccgggaaatccaatcactttcgagggagttatcgaaggagactttcccgaaagcagcctgcctacctcgcaagaacttgtactcaaacccggtgcccagattatctttatcaaaaacgatttcgaccgccgatgggtgaatggaacgatcggtgtcatatccggaattgatgaggaagaagaaacgatatacgttatcaccgatgacggaaaagaatgtgatgtaaaacgggaatcatggcggaacatccgctaccgttacaatgaaaagaccaaagaaatagaagaagaggtattgggcagctttactcaatatcctattcggctggcttgggcgataactgttcataagagtcaggggctcactttcagccgggtagtcatcgatttcacaggtggtgtatttgccggagggcaagcatacgtggcactcagccggtgcacttctctggaggggattcaacttaaaaagcccatcagccgggcagatgttttcgtccggcccgagattgtgaactttgccggacggtttaataatcgtcaggctattgacaaggctttgaaacaagcacaggccgacgtacaatatgttgccgctgcacgtgctttcgacaaaggagacatggaggaatgcctggaacaattcttccgtgctattcattcccgttatgatatagaaaaacctgctccccgtcggctgatccgtcgcaaactgggtatcatcaatacgctgaaggaacagaataggagactcaaggaacaattacaggaacagcaggagcgtctgcggcaatatgctcatgaatatttattgatgggtaacgaatgtattacccaagcccacgatgcacgagccgccattgccaattatgacaaagcgctcagcctcgatcccaattatgtggacgcctggatacgaaaagggattaccctctttaataataaagaatattttgacgcggaaaactgcttcaatactgccgtaagcctccatcccgccaacttcaaagctgtatataaccggggaaaactccgtctaaaacttgaaaatatggaaggggctattgccgatttggataaagccaccagtctgaaaccggaacatgcaggcgcacacgaacttttcggagatgcactgataaaagcaggaaaagaaggagaagctgcactgcaatggagaattgcggaagaactaaggaaaaagaaatcataaaactccccttttatcctttattatcaaaaagttttattagttttgtctcttgtatattcgtcaaactcttaaaataaaagtaaatgaaaaaaggtttgaaaatcgcagctatcactgtaggagttattatcatcctcatgctccttctccctttcgccttccaaggtaagatagccgatatcgtaaagacagaaggcaacaaaatgcttaatgcacaatttgattttgagagacttaacattagcctgttccgcaactttccacaggcttctgtcacactcgaagatttctggctgaaaggtgcaggagaattcgctaacgatactctcgtacaagccggagaggttaccgcagctatcaatctattttcacttttcggagatagtggctatgatatttctaaaatcttcattgaagatacccggctgcacgctattgtattgccggacgggcaagtgaactgggatatcatgaagccggacaccacagcaacagaggaaacacctacggcagaagaggaatcttctcctttcaaggtgaagctacaacagtttgtcatcaaaaacatgaacttggtttatgacgatcagcaaggaaaaatgtatgctgacatccgcgacttcaatgccgtttgttccggcgatttgggaagtgaccgtaccacattgcaactggaagcggaaacccaatctttgacttacaagatgaacggcattcctttcttggcagatgccaatatttccgctaaaatggatatagacgccgacttagccaataataaatatacattgaaggataatactatccgccttaatgccattcaggcaggtattgacggctgggttgccctacaagatcccgctatcgacatggatttgaaacttaatacgaatgatatcgggtttaaagaaattctttcgttgattccggccatctatgctactgagttctcaagtctgaaaactgacgggactgctactctgactgctgctgccaaaggcgttctgcagggagataccgtacccgcattcaatatcgatatgcaggtcaagaatgccatgttccgctatccggctctaccggctggtgtagatcaaatcaacatcagcgccaatgttcagaatccgggaggaaacattgacttgactaccgttaccatcaatccgttcagcttccgtctggcaggaaatccgttcagtctgactgccaacgtgaaaactccaatcagcgacccggactttaaagcggaagcaaagggcatccttaatttaggtatgatcaaacaagtgtatccactcggtgatatggagctgaatggaacgatcaatgccgatatgcagatgtccggccgtctttcttatatagaaaaggaacaatatgaacatatacaggctgccggtacgatcggattgacaggcatgaaacttcagatgaaggatatgccggatgtagaaatccagaaatcccttttcacttttactccgaagtatcttcagttgagcgaaacgaccgtcaatatcggaaagaatgatatcacagccgatagccgcttcgagaactatatcggatatgtactgaaaggaactaccttgaaaggaaatctgaacattcgctccaatcattttaatttgaatgatttcatgggtgattccgccgaaggaacagccgcaacaccgaataccgccactacagactcggttgctacttcaaccggaatctttgaagtcccccgtaacattgacttccaaatggacgctaatctgaaagaagtattgttcgataagatggtcttcaacaacatgaatggcaaactcattgtgaaagacggtaaggtagacatgaaaaacctttccatgaatacaatgggaggaaatgtagtaatgaatggatattattctaccgccaacgtgaagaaaccggagatgaaagccggattcaaactgtcgaatatcgttttcgcacaggcttacaaagaactggatatgatacagaagatggctcctatctttgaaaacctgaaaggtaatttctccggcagtatcaatgtattgactgatctggacgcaactatgagccctgtattggacacaatgcaaggagacggcagcctctccacccgcgatctcagtctgagtggagtaaaagcgattgaccagattgccgacgctgtgaaacagccgagtctgaaggaaatgaaagtgaaagatatgacactggagttcactatcaaagacggacgtgtggaaacaaaaccgtttgatatcaagatgggtgactacaacttgaatctttcaggtagtacgggactcgaccaaaccatcgattatacaggaaagatcaagctgcccgcttctgccggtaacatttccaagctgatgactcttgacttgaagatcggaggctcgtttacctctcctaaagtcagtgttgatacaaagagcatggcaagtcaggctgttgaggccgtagccgacgaggctatcagcaaactgggacaaaaactaggtctggattcagccgctaccgccaataaagattctgtcaagcagaaagtgacggaaaaggcggcagagaaagcactggatttcttaaagaagaaactcaaataaaaaaggagaaaaaggttatgcttctgaagctatatgataaaaataataacccgcaggatttacaacgaatcattgatatcctgaatgatggcggacttattatctatcccaccgacacgatgtatgctatcggttgtcatggtttgaaagaacgtgcgatagaacggatatgtcgcattaaggagatagatccgcgcaagaataatttgtcaattatctgctatgacctgagcagtatcagcgaatatgccaaagtcgacaataatgtatttaagcttatgaagcataaccttccgggaccattcacctttattctgaacggaacaaatcggttgcctaagattttccgtaaccgaaaggaagtaggtatccgtatgccggacaatcatattatccgagagatagcacggctgctggacgctcccatcatgactaccaccctgcctcatgaggaaaacgaggacttggagtatataaccgatccggaacttatagacgaaaagttcggagatatcgtggatcttgttattgatggaggtatcggaggcatagaaccgtcaactgtcgtaaaatgcacagaaaacgaaccggaaatcgtgcgtcagggaaaaggctggctagaagagaattgaaccatttataattgttcatactctgattgttcatatagaaaacgggctgcatcaacattgaattgattgcagcccgtttttatagagtatattccacttcttactaaatcaaagactcaggatccagatgagcggattcaatgtctttaaagtaacgataggtacctactttcagttctaccgtagcagcatcgtcacaaacgatgatacccttttcgtgcatctgcagagcactgatagtccacatctgagtgatagcgccttctaccgcatgatacaaagcacgtgccttgttatgaccattaacgataatcatcacttcctttgcagaaagcacagtaccgactcccactgtcaatgaggtcttaggcactttattgatatcattgtcaaagaaacgggagttagcgataattgtatccattgtcaatgttttctgacgagtgcgtgaagtcagtgaggatcccggttcgttgaaagcaatatgcccgtcagggccgataccacccataaacaggtctatgccaccgtatgatttaattttctcttcataacgtgcacattccgcatccaaatcaggagcgttaccgttcaaaatatttgtattctccggcttaatgtcaatatggctgaagaagttattccacataaaagaatagtagctttccggatgttccttcggtaaacctacatactcatccatattgaacgttacgacattctggaaagaaacaatacccttcttattcaggtcgatcaaagccttatacattccaagtggggaagaaccggtaggacatcctaatacaaatggtttttcaggagttgggttagcagcttttatttttgcagcaacataatgtgcagcccactgagatacagactgatagtccggttgaataattaatctcataagtcgattgttttataggttagttaataaataatatctcattcactgttttatcggtctttcttcaagcggtccgccattgctcgtgccagattttcgcactgagtataagtgatatccctcatcgcctgcttcatctccacaggatcgccaactaactcgaatttgctcttttccgcaaattcagccagacgtttcacagcagcacctgcccatgtaaaggaaccgaagtaacctaaatagcgacctttcacctcacgcaacagaatctttgaaagcaacgcatctacttcggggaatagctgattgctgtaagtaggcgaaccgatgattaatcctttataacggaaaatatctgctatgatataagaaggatggctcttcgtcacattgtgcatgactatatttttgattccttgtgccgaaagctctgcagcgatagcctcagccatttgttccgtatttccatacatacttccgtacacaatcaccacaccttcatccgcatcataacggctcagtctgtcatagataccaatcactttggcaatattctctgtccatacgggtccgtgagtagagcagatagcagaaataggaagtccgcccagtttttgcaaagccttttgtacagggcttccatatttacctacaatatttgaataataacgtaccatttctccccaatatctgtctacattcatgccagtatccagaaagccgccatccaatgtaccaaagcagccgaatccgtcaccggagaaaagaattccttccgtttcatcaaaggtcatcatcgtttcaggccaatgcaccatcggagtcatataaaatcgcagtttgtgatgtcctaaagctaagaaatccccatccttcaccagatactgttcgccagtcactccgtagaagccttcaatcataccaaaggtctgcttattacccacaataataatttccgggtaatgttgctttatcaatcggatagagccggaatgatccggttccatgtgatttataatcaaataattgatgggacgttcgccaatcacctgctttattttacgcaagtagacttcaaaataacagatatctaccgtatccaccaatgccaccatttcatcatcaatcagataagagttatatgaaactccatagggcaatggccacatcgcttcaaatcggtgtttgttacggtcatttactcccacatagtggacatttcctttaattcttgttttatgttccattcttcagttattaagtggtaaacttatcatctgcaaaaataatccttttttccgaatccttatacttcttgccttgataagcatctctttctttcattcttttttgtaaacgtgccacaaattcataatttttcaatccccaatccggtgctattaataattctttaggagattgagaaacaaaacgttccaccaccatatcaggtcggaggtgttctatataatcgattaccagatcaatatattcgtccacttccgtaaacagatggaaatcgtccggaacctcagcatactcatgcgccattcgagtaccccgaattaactgtaactgatgaattttaagggtagatagaggcaatcgggaaaggattccggcttgctccaccatcgtttcatgcgtttctcccggaagtccaagaataatatgcccacctgtcaaaataccacaggcagccgttcgttctacagcctccactgtttccgcatacgtatgcccacggttgatacgttgcaaagttttatcacaagtactttctataccatattctaccatgaggaaagcatgtttattcagttcttccagataatgcaacagtccttccggcatacaatccggccgggttccaatcactagccctacaacaccgtcaacctttaaagcttcttcatatttgcgttttagcccctccaactccgcatacgtatttgtgtatgcttgaaaataggctaaatacttcatctccggatatttgtgtgcaaaaaagtattttccttcctgcaactgagtagtaatggacttctccgtccgacagtaatcgggattaaaagtttgattgttacaatatgtacagcctccccaccctttcgttccatcccggttaggacacgtaaacccggcatttaatgatatcttttgtactttataagaaaagtatttcctcaaaaacgttggaaagtcattatataatataggtgtggacatatttactcccttcttttagtatttaatcggcaaacataagaaaaatcagtgagttacagaaagttagtgcaaaatatcttcaatatattaaatatttcataattaccataagataaattaataaatattgcgattcaaaaaattatttaattagttttgccatgattttaggcattgacgggaggatacttgtgaaagtcttgtgcaatttattccccaattatgatttcatctcaccataccccatgcaactctcgtcaataaaattatcctctctatattccaaataagaatatggagaggatttttaattcatcaatagaaaacaaatggcaaaggaacaaagaatagaaagaagaaaattactaatctgcattttggtcttgaacgataccatgcaccaaactattcatgtacatttccaaattagtatatttgccatttacatcaatcattttcttatttccatccgagctatcattgggatctaagccatactctatttcccattcatccggtataccatcaccatcagagtctatcacacaacgtttagtatccaatgataattccggccatgaattacttcctaattctattatatcgttcggtgtattgatatacccatctaaattgccggaagcagtgtaagatgccccccgatttttcacatcctttataaccagattatctactttatccctataatcacaacacccaacatatttcattactttattataagcaacttctgccgtatgagtagtcactgtcccgtaatccaatggcttagataatttcaacccagcttgagcagcccttgtccacatattatccactttgtcatcattcgtttgttgggcatacactccattcgtccaattatctacagtcactccactattaccctccatcacatttccatcaatgtaaaaggttccccatttttgtgcatacggtgcaaaagaagggttcttctgaacatattcctgtgtatagattcctattttagcaatacgatactgtactttagaagaagccttgtccgtagcaggtcctggtttataataattattcacgagattgacatgttggtcttcccctccatagcaaccttcacctgcccaattataaaaaacgttattacgaatatccacacattctgtcagagctaacgtagtaggacgaggtcccaaacgtgggacacggctctcgcaatgtgcaatcatattatgatgataggaagcataatgaccaccccagtttcctccaaacccatgcggtttatctttcgaaggagtatcacgtaacgcctgagcagccaaacaccattgcactgtcgagttttccattccatatacagataggcattcatccgtgcaccaactgatagaacaatggtctactataatattctttttatccatcccacctaatccatccgagtctaaatttacatttccaggacgaaaacgcataaaacgaataattacattattagaattgattacaaagtcataatcagcaatgcaaataccacctggagaagtttgtccagctattgtcaaattatcatttgttgtttttaactgagcttttagtttaattgtacctgccacatcaaaaacgattgtccttgctcctttttgagtaagcgcccaacggaaagaacctttttgaggattagtaggattatcctccaatgtagtaacatgatacacactccctcctcgcccccctgtagtacttcgtccatgtccttctgcaccggggaaagctaataattgtccataatccaacttctttattgcagtaggaatattctctccttgattaccaaattcatcatgagactccgtgttttcattagaacaagcccaaacgccacaaagaggtagaatggtaatacataaaaaataaaaatactttttcatcattcaaattacatattattagattaatgttttctttcagacggcacaaaggtaaaagagtaatggaaagaagatgttgaaatattgttttttctagagatactactctcaaagtactaaataacaaaaaatacgaagcgaaaaacaaatattacacatagctatatttacattcatatacttttgtagcgataaataaacacagaaaaagaaagtgatacagctaaatcaaattaataactatttataaacatgcaaagaatgtctaacaaagtggaaaacatgcgtaccttgctgttaatgctatttgcagcaatatcgctcagcgtatctgcacaaacaattactgtaaaaggtaatgtgaaagataccagtggagagcctgttattggcgcttccgttgttgaaaaaggtaatacgaccaacggtacgattacagatctggatggcaacttttccatcaagattgatgggaagaaaacattggttatttcatacataggtatgaaaactcaagaaattgcaattcaaggtaaaaaagtaattaacgtacagatgaccgatgattctaaagcattggatgaagtagtcgtaatcggttatggaacagttaacaaaagagatttaacaggatcggtagcttctgtcaattccaaggacctggcagttgttccggtatccagtgccaccgaagcccttactggaaaacttgcaggggtaagtattacaacaaccgaaggagctcctgatgcagacgtaaaaattcgtgttcgcggtggtggttctttatcccaagataattcacctttatatattgtagacggttttccggtttcaagtatcagtgacattgccccatccgaaatacaaagtattgatgttttaaaagatgcatcatccactgctatttatggtgcccgtggtgcaaacggtgttattatcattactacaaaaagtggcaaagaagggaaagtacaagttgatttcggtgcctcctatggtttcaaaaaggttactaaactcaataaagttatgagcccatacgactatgtggcttatcaatatgaaaccggaagaacggaagaatacggtctttttgaagatatggatatttggaaaacaatggaaggtactgattatcaggatgagatattcggacgtaccggcaaccaagcccaatataacctgaatgtcagtggcggcagcaagcaattaaaatataacatcagctatgctcacaatgacgaaaagagtataatgttagggtcaggtttcaataaagacaatgtgaatgctaagatcaattcagaattaaacaagtggctttctttagatttcaacgtacgtatgagctacagtacactagatggtctgagtggaggtgctgacacgaacgaatcaaatgcggctaattccattgtagccaatgccacccgtttccgcccggtcaatccaatgacgtatgacgcaagtgatgatgaagcaaataatgcctataccacaaagaatccattagaacgcctattaggagtatataagaaaaagactactttcaatcagaattataatgcaggcgtcaactggaaaccattcaaaaacttcacattccgttctgaattcggttacggatggaagtatgaagatactgatcaggtttggaatgccgatggtgcacaaaattcaaagttaggctataacggacaaccgcaagctgtattcactagagttactactaaaaactggcgtaatgcaaatacattgacatacgataacaaaaagctgtttggaggacgtgatagaatcaatgtacttttaggacacgaagtaagtagtaacgaaaaaaagacattggagaatacttctgtcgcatttcctaccagcatgagcattgaagaagttttgtctactgccggtgcaggaacagcattacccaatcaaacaacacttgctgccaaagaaaatctgctttcttttttcggtcgagccaactatacattaatggacaaataccttctcaccgtaaccgttcgtgcagatggttccagtaaattcgccaaaggcaatcaatggggagtattcccatcagctgcattggcatggcgtatatctgatgaacaattcatgcaaaacacgcgcaattggctttctagtctgaaattacgtttaagctatggtactgcaggtaataaccgtatcaattcaggactgacatatacagcatattcactgtcaagcaatactgcccgtgctcctttcttcaatggtgatcgcaccagcatgatggaattgggcagttatctatacaatccgaaattaaaatgggaaacaaccgtcacaagaaactttggtatcgactacggattctggaataatcgtttatccggttctattgacctttattggaatacaaccaacgacttgctcatgaaaacggaaataccggctaatgccggctataactaccaataccaaaatttcggaagtacctccaataaaggtgtagaactatctatgaatgcgatcattgctgacaagaagaagtttggactgaattttaatttcaatatttcctacaaccgtaacaggattgagaaactaaatacggacaatccgtggcaaagtagcggttggggcggaagtaccatcgcaaaatatgaggatttccgtgtagaagaaggcggacgacttggagaaatttggggatacaaaaccaacgggttctatacagcctatgaccctgtaacaaatccggaaggcgaactaatcctaaacggaacaaactgggtattgaaggacggtctgaaagacaatagcgtaaacattacaggcggaagttatttccccggaggattaaaagtagaatgtgatgagaatggagaaccgatcaaacaaaagctaggtaacacagtagctccggtttatggtggttttggcttcaatggtcgcgccggtaactttgatttcactctcttcttcaatttctctattggaaataagattgttaatgccaccaaactagctacctcattctttgccggaacttcatacggttacaacctgaatgaagacttctgttctggaaaacgctacacttggattgatccgacaaccggctataatttaggcaaatctataagttcagacgcacttgcttactatggtggtgaagcaggaatcatatcacgtttgaatcaaatcaatgcaaatgccagcatttacaatccggtagccgtcactcaaatgcagttgacagactatgctgttgaaaatgcctcttttttacgtgtgaacaacattaccatcggttattcacttcctaagtcatggattcgcaaatgttatatgcaaaacgtacgaatctacgtaaccgggtataatcttttctgcctgactaactactccggtaccgatccggaagttgataccagcagcaaacgaaatccgatgactccaggtattgactatgctgcttatccgaaaagccgttcatttgtcggtggtattaacgtaacattctaattctaacacaaaggagattattttatgaaaaagatagcaaagatattatttctgtccgccagccttttctgtactacggcttgttcggacttcctagaccagacagcaccatccgaacaacccggagaaaatgtatttgaatctactttcttcacagaactggcagtcaataagctttatggacttatgacacaagatgccacatactctcgtgacatacctatcgttctgagtacaaattcagattgtgaactggttgatggtctaggaactgatgccaacaatacaactcacgaacgtggtgcaatgaattacaatgtaagtccgggatggtcaaaactgtccaatgtatgggatgctatgtattcaattattgaaaatgcaaatctgattgttgaaggaattaataagagctccttattaacgtcaggtgacagtgaccaacgggcgatggaacgtttcaaaggtgaagcgttgacaatacgtgctatggcctactttgacttaatccgcctttttggcgatataccttataaaagcgagtcttccaacccggatttgagcaatgtttacttagggaaaagtgatcgggatgttatcatggatgagctgattaaagatttggaaacagcaattaccctattaccatgggcaggagaagtttctgcatacactacagaacgggtgactaaaggatatgcccattccttattggcaaatatcgctttgtcaagagccggatggagtattcgtgaagaacagaagaacggctatgttaccgcagacaaaaactcggatccggtctatcctacccaacgttgcgatgacgctacccgcaccaagatgtatgaattggcactgaaacatctggcaactgtcatagataatggcacccaccagttaaatccatcattcaccaatgaatggtatttgatcaaccaacgccaattggatgaaacttatcgtgaaaacatcttcgaaataccgatgggattaggagtcagtggcgaactaggctacacagtcggcgtacgaatgaacggttttagtactttatacggtgaacaaggaaactcctccggtaaacttaagatgacagctccatacttttggtctttccaggatggcgaccaacgtcgtgacattacttgctgtaacctgcaattaaaaacagagaacaatgttctaaaagaaaaaatgctcggtaatacaccattcgccatttactgtggaaaatgggacattcgccaaatgaatgaagaatggcgtcaagttgccatcgctacaggtaaagccaaatggatgtccggtattaactgcgtccggatgcgttattcccaagtattattaatgtatgccgaaaccctaaacgaattggccagtggtcctgacggaacttacaacggagcctccacccgtattagtaccgctagaaaagcattggaattggtacatacacgtgcatttgcagatgcaaacaaatctgaagccgaaaattatattgctgctatcaatggaaaggaagacttttttgaagcaattgtagacgagaatgcttgggaattggctggagaaggtttccgcaaatatgacttgattcgctggaatttattgattgataaaatcaaacagtttaaaagcgattatgaaagccaactgttttctagtaagaactcatatccggaaaaaatttatttcaactattccaatgacgacaagacgagcatagacatcagcagcgtcacttggcatggtattcctagtggaaaaagtagcagcgattatgatgacaacaacaatttttggggaaaggaacggacagataccaaaggacaagctcagttgacagtcaatttaccttccatttccagtggactagtaggagataatgtagcagttatcaaccgttacttactgccaatcgcatctactacgatctccgcttctaacggaatgttacataattcatacggattttcagactaatacctaatcaataagtaatcatgaaaaaattaacacatattataaaaacaggagccttcgcactcctcacttctctaagtgttgccgcttgcatagacggtaacgactgggaaaccattagtggtaaccgactgttcggtactacaagcttctctgtggaaccggctgcaataacagctgaagctaaatgggacgcaacccccaataccgaatattacatcatcgaagcaagcagggaacaaatggatgataatatgccaatgggcagtgcttcaggtagtatcgtatacggtgaagaccaatcaatcaaaaaatcgccttataccctgaccggtctgttaggtgaaacgacctattatctacgcatcaaatccgtagcaagcggaaaagaatcccgttggatatatttggaagacggaacattcgaaacttcgaaagaagaaatattaggtaccattccaagcgaaaacattacggaagaaaccattttaattacttgggaagccggtctggaagtaacgcatttcatcatcaaagcaggaatagatgctcctataacaaaagaaataacttcggaagaagtcactgccggacagaaactgattgaaggattactgccgggaacagaatatacattctccatctataatggagaaattaagcgtggcgaaactacagcgatgacagtaatgcccgaaatggtagatttcacaagtgttacgcctaccaaaacatctgtcagccttgtttgggatcccgaagctatccaaaccggttccacgacagtttctcattatgcatggtgcgaaggagacagaacaccaagcgtcagtgatcattatactgcattaacagttgaacaaatcagtcaaggacaattgaattttgatggacttgagcctagcacaacttatacagtagctttaatgagaggaacgtacgttcgtgcactgaccacctttacaacagcaaaaggcattccaagcggatataccagagttgttgtaactaacaaagaagaatggaatacagctataagcagtaacaccgggaaagtagccatgttaatacctagtggaacaacactagatataactagtgcaacagcaattatccccaatacaatcacatcattattgatttggggagctgacgaaagtgaagagaaggcagcaatccagccggatatcagacttaaaggactcagcttcgctgatggaggaggatatgaaacaatcgaattctacaatttatatctccatcatgataataatgaaaacaattttgttgtataccaccaaaacaataatgcaaccatccaaaatttaatattagagtcatgtaaagtcgacaagattcgtggtattttcagattcaaaaatgcaacaggttcttgtagcaattgtatcatcaataactgtcagattgagaacattggcagttatggtctttttgccacagcagaggcaaagggaacgtggacgttcgataatgtcgtacttactaattccacaatcaatgaatccggcattgatttatcacaaaaaggtccattattaaaaacgcaacaagatcactctatctcatttgaaataaaccaatgcacaatatatggattggcatatacaataatcaattctggtagtaagccattgactttgaatatttcaaatacattgtttggcggattccagtccggacaaacagtaaaaggatacgaagaaggaactacggttaactcttctgaaaatgtatacacagcttccgactcaccttttcacagtaatgcattaggagaatgtttaacaataacaagcgcagagttattcaatgcaccagctgcggtagacggtgacttcaccgtaaaaatagacacctataaaacttacggtgaccaacgttggaataaataacaataaaaagaaaacttatgaatacaaaatatatttataaaataagcaattacctattcatttgtatgctggcattagctgttttcgcatgcaaagacgatgataattcagaagacacgagcgcattgacgctcgtatcttccaacattacagaaggtgccacactggaaagtaacagtggctatgtagaactgactttcaacaagaaagttcgccaagcccccaatacatccatcacattcaatgatgccgatatacgaattatcattcttaataatgtggtgcgctataaatacagcacatcagacaatacagactgtacctttaaaataccttccggagcattgctcgattatagcggaaacccgtatcagggactgactctgaatttcaagatcatggaagaagcgatcaccccaaaactgttcgacgttatagtcgatcctaatggaaaaggtgactataccagtattcaggatgccattgatgctgttccaagcaaccgtacggaaccttatcttatttttgttgcgaatgggacttatgaagaattcatcaatgttcccaaaatcaagcctttcatacatttgatcggacaggacaaagaaaagacaatcatcgcacgtaagttaaccagtgccagcaatgctaccggtgacggcggagaagaagcatggcagtattcgtggagaaacgaggctaaccaaagccaaagattccaagaatctgtaactatgatctatgctaccgatttttatgcagaaaatatatcttttgtgaatacatggggaacagaaaaactgatcggtcctatggcggaagcaatgtacacagccaatgacagaattgctttctacaattgtaaattcagatctttccaagatacatggcaaaccaaagtacagtcttcatctgagaatggtatcaatgccagacattatgccagtgattgctggatagaaggcgccgttgactatttctatggaaacggaaacgtattgatagaaaacacgaccttatacaatgtacgctacggaagtgttataactgccgctaatcatactaccggcacaaattggggatatgtattcaacaattgcacagttgacggtatcaacaaagtagatcctgacaaatatggaacagaaagcctcgactatcaaccgagtaaaggaaccgctcaaacattaggaagaccctggcagaacaatcctatcactgtatttctaaacaccaaactgaaattcgacattgatcctgccggatggagagatatgggcgctgtacctgctttgtatgctgaatacaacacgacggacaaaaaaggaaaggcggtagatatgagtcagcgaaagactaaatacactatcaatggtacatcatataattatgaaggtaaaaccgaattaagttactccgaatacattaaatatacttacgagaacattgtaaacggttcagacggctggaatcccaagaagtttatggaacaattggaaaccccggaaaatgtatcactcaacggaacgaccttaagttgggacgcccgttacaaagcaatctgttacctgatcttcaaggcagacggaagttttgaaggacaaacgactgacacttcttttaccgtaagtgatgcagatgcaacctacaccgtaaaagccgccaacaaatacggaactcttagtgaataaacaatcaataaaatattaaagttatgcacaagttattattcggagcatttctttccggtttactaatttcattcgcagcctgttcggaagacgaagcgaaactcaccaacagttatcagtattttcccggaaattcagataagacagaagaacctaatgatgaagagttaatagactatccaacacctgaccgtaccaaaatagcagcctttcccggagcattcggggctggccgctacacaacaggaggtgcgggaggcaaagtctacacagtaacgtcacttgcagacaatggtgcagtaggaactctgcgctgggcactcaaccaatctgaaactcgcactattgtatttgcagtcagtggaatcatcgacctgcaacaaaacctgactatacaaaaaggaaatgtaaccatcgccggacaaacagcccccggtgacggtatctgcctgaaaagatatccggttattctagaggctgacaatgttatcatacgtttcatgcgtttccgtctaggagacgagcaaatcaataacgaagaaaccaaagacgcggatgccattttcggcaggaatcaaaagaacatcatcatagaccactgttctatgagctggtgcacagacgaatgcgcttctttttatggtaacactaatttcacaatgcagtggtgtctcattgccgaaagtcttgccaacagcatacatccgaaaggggctcacggttacggtggcatttggggtggttctcccgccactttccaccacaacctattagctcaccacgtcagtcgtactccccgtctatgcggaagtcgttatagcaactcgcccgacaatgaaaaggtagacgtacgcaataacgtattttacaattggggagcaggcaacggaggctatgccggagaaggaggaaattacaacttcgtcaacaattattataagccgggtgctgctaccaacacgaagaaaattgtcattaaccgtattgttgctccaggtcccgatgatggaactaacaaccaggcaaaaggcgtatggggagtatttcatctgaaaggaaactattttgacgatacgtcagccgctcttgaccaaagcaacaaatcacttattgcagaagtcaacaatgacaattgggtaggttttcagccaaaccagaaaatcagtgtcaacggtgtggatgaaaccattccttatccaaacaatgatgaaaatgcattaaaatcacaaacggaatttgttatttcaaatgatgtcagtacctttacacaatcagcgcaagaggcttacgcagatgtattaaagtatgccggagcttcttataaacgtgacgctgtagatacgcgtatcatacaagagacacaggaagggagctacacatacccaggaagcaatggaggcaaattcggaatcatcgattcacaacaggatgtaggcggatggcctacttaccaatcagaaagtgctccactagatactgacggcgatggtattcctgacagctgggagacagcaaacaagctcaatcccaatgatacatccgacggcgtaaaataccaattgagtgctgaatacacaaatttggaggtatacataaacgacctagtcaagaacttatatccgataaaataaaaatcatattatgaacaaagtattattaggaacactctgcatattattcatgcttccccttgctgcaagtgctgcaataataggggaaaattgtcctagtcccatcgaccgctccaaagtccccgcctttcccggagccgatggagccggtaaatacaccacaggcggtgccggtggcgcagtctacaccgtcacctccttagccgacgacggttcaaagggaacactccgctgggctatcaatcaaaaaggtccgcgtaccattgttttcgcggtcagcgggatcattgaactccagaaatcattgaaagtgaataacggagacctgactattgccggtcagacagcaccgggcgatggtatatgtctgaagaactatacattctccatccaagcggacaacgtgattgtccgttttatccgttcgcgtatgggagttgacatcaagcaaaaaggtgacgatgccatgaacggaacaaaagcgcatcagaatatcatcatcgaccactgctccatgagttggagcacggacgaatgcgccacattctatgacaaccgtaacttcaccctccaatggtgtatcatcagcgaaagccttgccaactccatccatgaaaaaggagcacacggctacggaggtatatggggcggtcaaggagcttctttccaccacaatctgctagcacaccacaccaaccgcacaccgcgtctctgcggaagccgttataccggcaagccggaagaagaaaaggtagacctgttcaataacgtaatatacaattacggcagtgacggagcatacgcaggagaaggcggttcgtacaatttcatcaacaactactacaagccgggacctttcagtgccaccaaaggttcttacaaacgcctgttcaccgcatacgccgatgacggaaagaacaataataaagccggagttcacggagtgttctattttgacggcaactatatggatcctacctgttccagcctgacagacaaacaaaaggaagctctctacaaagtgaaccgggacaatgcttacggattggttatcaaaaaggaattcgcacccgaagacgaggttctctcttccaaaatatttgatatagccgaacgcgcctcattgcaacctgccaagaaagcgtacaaggatgttctcgaatttgccggagcttcttatcgccgcgacgcggtagaccaacgcatcgtggaagaaacaaagaaagggaagtatacttacgaaggttctcatggcagcaccaacggaatgatcgaccaaccgaaagatgtaggcggatggccagaatataaaacaaccaccgcacctgccgacacagacggtgacggtatgcctgacgaatgggagaaaaagaacggattgaatccgaatgatcctgctgacgggacggtttatggacttagcaaagaatacaccaatctggaagtctacatgaacagcctggtcaatcacttgtttcctcaaaagtaaattccgcgataccacaatcggataaaacacaggattaacgcggattttcgcagatcagactccagattaagagtttatctttgcgaaaatccgcgttaattcacgttaatccgcatttaaacaaatcctattttccctgtttcttatccctatattcagtcggtgtcatccccacttgcgctttgaaacacttgctgaaatatcgcggatcattaatacccaccatatacgaaatctgcgtcatattaaactcccccgtctctatcaactgcacggcacgcttcatacgcatctcctttataaactcaataggcgccagtccggtcaaggtcttcagtttcttaaagaataccgaacggctgactgccagttcactgaccagatcatcgacaaccaactctccgttatccatattcttttccatcagttcgaccaacttatccataaacttacgatcgttgggagacatcaccggaacctccgacacctgtccgtccacatcgttcttttgtgcttcggaggtacccccgacaaccgtttcggacgttgtggatacaccggacaaactaccgttcgagtccgcaaccggtatattcagcaaattctcccgatagaaactctgcaacttctttcgctgcgacagcaagttctccacacgcgcctgcaaataagtcgcactgaaaggcttcgttatgtaatcatccgcgccatattccaacccctccaatttactctcgatcgtagtcttggccgtcaacaagataattggtatatggctggtcgtcatatccgcccggagttcacgcgtcatctcgataccatccttctccggcatcatgacatcgctgataataatatccggtacatacttcaacgccttgctccatccttccataccatcagcagcctccaccacccgataattcgaagcgaatatgctacgcaaaaatacccgcaactcttgattatcctccactaataacatcagttccttagcgtttccctcttccgtttcctgttcttcttccacagaagaagcggtccccacctcctctgcgtccgcaaccaacctttcggactgaatggaggaattggccaaatccaccacctgtcccatttccatcggagcgccggtatcttcgaggataaactcaacctctttatcgtaatgtcctttccctttcaggaaatccactttaaaacaactgccctctcccaaacggctgtcaacactgatagtagcctgatgcatctctacgagttccttcaccagcgagagcccgatacctgtgctcgcctgattgaaaagattcttatccaccagattctcaaaacggacaaacagcgatttcttcttgttctcggctataccgataccttgatcctgcacaccgatggaaacgacttcttcatcctcgcggataaaaatcgtaatcatcttcccgttcggtgtatatttaaaagcattggaaagcaagttaaacacaattttttccagcttatccgcatccacccaaagataaagatgttccttttccgtctcaaacaagaaatcaatccgatgctcttcggcgacagcctcgaagttatccatcaccttacggacgaacggcacgacatccacacgctgcacctgcatcttcatcttcttgttctgaatcttgcggaagtccaatatctgattgacgagacgaagcatccgactggtgttcctttctaccaccaccaactgctcccgtgcgtcggccggcaatttatcattcttcagcacctgctccaccggtccggctatcaacgtaagcggcgtacgcaattcgtgggaaatattcgtaaagaagcgcaacttaatatccgagatctgctgctctaccgacacctcatgcttcaaccgataaatcgtgaacaggatataaacagccacgaggataataatcaaaacaaaaagtacatacatcacatacgccacaggggtctcccaaaacgaaggaagaatcactatatccaacgcacgttcgttctccacccacaccccgtcgctgttggtagaacggacacggagcacatatttccctttcggaaggttcgtataagtcacactccgctgcttgtcggcaaacgtccactgcttttcaaaaccatccagaatatatgaatactgcacattctgcggattggtgtagtccaatgccgcaaaatgaatggaaaagatgttctcgtcatgcgaaagcaccaaccggtctgtatcatcaatatccactttcagcaacgagccgtctctgggtacgacgttctcattagctaccgtcaacttggagaatacgatagacggaacatagctgcttttgtggatagaatccggattgaaaataaagacaccgccactggcaccgaaaagcatactccctttggcagtcagcgtagaggccgcctcactgaaacgcaccggaaaagtaatgctgcgttcatcaaaactctcgaagcgttcttccgacggactgaacttgcaaagcccgttctcagtactgatccatagattccgtttatggtcctcgcggatggaaagcaaaatatccgaagaaagcccatcctgcaccgaataggactcgaatttagcatgaccgtctttgtcgatagataccagcttgttgagaccgccgccaaatgttcccagataaagttccttattttgagtagggataatccaatgcacgtcattgttgctcaaactttgcgtgtcgttcggcacacgggagaaatgatggaactccacctcttccggtttttcaaagttctcgtcgaaagcgatagcccccgtagtagttcccacccacaggcgaccgttattgtcggaagtaataaagcgagccttatagcaagggtcgataggataacctttcagattattacgatgattgataaacaaagtcttccggtccttgtcctccgtgatataattgatacctccgccaaaagtagctagccaaatacgcccgtgatggtcttcgtacacacaatacacattattatcactcaaactgtacatatcatcctcctgatgaagatagcgggtcagcctgtaggacataccgtccggagaggtggactcggcacggatcagtccgtcacctttcgtcgcaatccaaatgataccttttgaatcctgaatgacgaaataagcggttcccctcatcggagtaccggtggtagagacagtaccgttctccgtcagataacctttgtacgttctgcggacatcatacaggcggagcataccgtctttcactcctacccacaggttacccaacttatcttcgcacaaagcacgcacctcgttatgcagagattcatgctcgtgcaatacaggaatcatcatcgaaaagggaacattgcgatacgtcaccttttccaatcctttggagtgcgtacaaagccatagattgccttgtttatcagaaaaagccgaatgaatcttattggagaaacgccagtcgtgactgcccaattcattatagaaaggaaccagacgccctttttgccggtcgaagaaagagaaaccgccaccgtatggatgcacccaaaggaaaccgttcacgtcctcaaaaatgtggaaagccggacgcgaacgttcgggattactgtattcaatcagaatctgttcacgggtgactactcctgttgccgggttgaaatgagccacgacacccggttcttcctgttcaaaccagacttcagaagaacggtctacgtaggccgaaagaatcggacggtcgggcaacgctttgcaagtcagagaagaataatgtacggcagctttcgtcttcagatgataggtaaagaaaccatccgagtccgttgtgaccaccgtctgctccggagctacttcgtgaatggaggtgatgcggctcttcgtaggcagttcaaacaatgtaaagtcgccaccttctttccgataagaccagatgcgtccatgatcggaagcgaaacggatgtgtccgtcattctcctgcgccgcataaaaagcctggttcatgccaccgttctttccttttgtctccgtaaagtaggaaacaggttcccgcgtgcccggacgaatcaagcccaatccgttatccgtcaacagccaatcgtttcccgctttatcctgatagactttaaaaacatggaaagaagggaacaattccgacttgccggagtaaatatcccatgtcaggcggttattttcttcgggatgggtcaggatacggatcgctccgtcattgtcggtcagcaaccagacagtcccgttcggcattacttcaatggtatgtacattgaacgtacttccctcttctcccgcagcgggcacttgctcgaaagtctccgttctgggatcgaagcgatggacacggttgtcgtatgtcagcagccagaggaaaccataacaatcttcatacatatggtctaccctgttattggtcagactgatgtaatctccctgacgtgccttataggtcttgaaagtgtagccgtcaaaacggttgataccatcccaagtagcaaaccacaaattgtctttatggtcctgaaggatgttcatgactgtgttctgcgacaatccgtcctctgtagaatagtgggtaaagaagcaatgttgctgtgtatgtgccgtgaatacgacagccaacaatagaattacggaaattaaggttttctttatcatatatcactcgattctgtgccgtaaagatagaaaaatacttgcattctggcgctatcttcaacagctattttgcagaatcaggagatataatcaacgtttcacatccaacaaccggtttccgtccctcaccggattccaaccatcgtctcctgccagcactgttaccggctcataacctttcagatttttcaactgacgggagaatgccgcacgtgcttgcggattggcccctgcgcccttactgccatattcggcataaaagactgtcttttcgttttccttcttaccccaattattccagccgacaggaagaatatgtttacccagttcgcagcgaataaatacagcctgtgcataaggtcgccagggacgtgacaaatagacctttgtagcttccgcatcagccgtcagccgacagtcgtagaaaatgtaaccgtacttctttcctttatcggtagaaggagcagtgacgtagccatcccccttgctgtgaatgcggcaacgattgaagacagccgtagaccaaccgaaaataaaatcgaccgttccttcgatgtagcagtcctcataatattggcggctttgcttgccgtatgtgtagagtgtatcctggaagccgagaaaactacagttcttaaaataggcacggtcggcagaaacaaaacaggcaactgcttgccccacgggacctgcagagttctcgaaggtgatattctcggcataaaaatcaggagcatagatgtaacagctggacgaaccggaagttcccatgttctcaccgaatacgttcttcttgcttgcgaaatcgtcattggtcagtatcgtaccatcttcgccaatcagggagatattaatcttactttcggggatgattatcttttctttgtaagtgcctttgcggacaaggattgtggtacgtacatttttgcgaaagtcggggacagcattaacggcttcctgcacagtgaagaaatcaccgctgccgtcttgagccaccacataatcataatgacggatacatttcgccaattccggaatctctttgccgatggctttcaccgccaatcccgctacggttcttgccccatagatattcaaatgagtattgtcctcacgtcccttcggaaaggccggaacccgattgggttctacaaacatgaacagctttttcgactctgcgggaccaagtccctgcaccaagtcgtgcgtgattttattcaagtcgataaaggtcactcccaactctttggcaacattgcggggagaatccagataggccccatgagtatcgaacagaacggttccttctttgggctgctctttggatgcaccgggtatccgtcggatgtctttcgcaatagaagcgtctttcggctgaacaaagttacgacggacgatggaattgaatagtacggggataccgcctttcgcacgggtttcgttgacaaaccgacggagattatcgtcgaaagtagttcccggatcggtatgacgggtagaatccgttttttcatcattatgcccgaactgaataaagacataatctcctttcttcactttagaaatcactttttcccaacgtccttcagaaataaagcttttagaactgcgcccgttgacggcatgattgtctatccgtacatcttcggaaaagaaaccgggaagcaccattccccatcccctttcgggatttcccccatccatctttttatttgccatcgtcgaatcacctatcataaagatagtgacaacaggtttatccgcacggaatgcagacaaaagaataaaagccgccgccagcagccatatcattttatttccttgtattttcatacttatcttactttaattatactactctcctacatacaaaaaaacgttttcctctatcacctatcaccttcgatagtcaaactacttattatcaaccagtaaggtggtgacagatcctcataaccaacctatcacccaactgtcacctatcaccgtgaagccaaacgcttatcaccgtaaagctaagtgtttgccggtacaaagcaaagagtttcaagcagccgaacagaaagtttcaagcgcttgaaactaaagtttctcactgatgaaactacagtttcacgccgatgaaaccgaagtttcatgccgtgaaacaaaaagttcgctgtggcgaaacaagtggaaacaagtcggcaaaggaccgtttaccccatttctcttacttgtaagggtaccaattgctattttctttgaaaatattctccggtgtatacctcaaggcttccttctttgtaagctgtttgccccatgccacgcgtcccgatgtatccgcaccgtctcctgtgtttccaaattccgcataacgggctgttctctcattctccggattcttccaattatgccaaccttcgggacggatatgtccgccaaactcacaattaataaaagccgtagcggcatatggacgccaaggacggcctaaatagacctttttcactccgggagcagccgtcagcttgcagtttttaaagacatagccgaattcttcattttgaggagtcgaagcagcagtgatatacgaatcacgtttgctatgcagctcgcaatactcaaaaagtgcagtggaaggaccgaagataaaatcagtagtaccttctatatagcagttggtaaacagcaaacggctaccctccgagcctgtataaatggtatcttgatttccaagaaagcggcagccgacaaacatcagccggtctccttcggtatggagggcaactgcctgccccaaaggagcggcattattctcaatcgtcaagtccttgaaagtgatatcactgccttccactttcacggtgtaggtacggaatgttcccatcttattgatattggcatgatcatcatacgtaataatcgtcttttcggaatcttcacctaccagttgcacgttcttcacccacgaaggaatcactagcttttctttatatacccctttctttatatagatagtcaccgtataatccataaaggcgcgtaccgcctccacagcgtcctggatattacgatacttacccgttccatcacgtgacacaaccaacgtgtcttgcttttgctgttgctcataggacaaaagacgttcatattccaaactcgccattatgaacggacctaccgccttcgggtcattattgcgaatcgtttcattgatataatagtcataatcgcctgaacggtatacttttcctcccaatcctgccaccgcgcaagccttcgtgacagttaccactccattcttgtccacttcgataaaattattcaggaaacctttatagcctttcagcgccacattcaaatatgatttatcaatatatcccagccgtaccgccttgaacaaggaataaataaacatagcagagcaggaagattccacataattccccttatccccgcttctgtccatcacctgataccatcctccggtcttcgggtcttgaagtttcctcacttgtacggcaacattattcaaaatatccagcagagaatctcttccggcttcatgcttcggaataaactccagcgcatcaaccaaagccatcgcataccaccccatcgcacgtccccaagtgtgcttggactgccccgtgacgggatccgcccaacgttcggtgcggctcacgtccgtcgcatggcggtaaagtccattctttggatcgtatgtgtggcgggcacaggttacaaactgattgattacatccgcataagcctgcggaagattattgcggaacgcatattccgcatagaaaggagctcccatataaatgccgtccaaccacatctgatgcgggtaaatctttttgtgccagaagccgccatccgcattgcgaggctgcccttcaaactggctgtaaagcaagtcgagcgctttcttatacttaggattcttcgtctgctcataaatacggaaaaggattttaccggagttgatgcggtcgagactgtaatcggtcagcttataagcggtaatcgtcccgtcttcatttaccattgtgtccgcgtaagcgatggcgtaatcacgaatcttctcatcgccatacgcatcatatacatcaagcatagcccccaattcaagtccgtgacaatagtcccacttcaacttcggctggaaatcgagctgccaggattcggggcaacggatcatttccgattcagtcatcctcaccgaccagggcaatttactgtctaatttgctgtctacctgctgagccgacaagactaaaggaacggttgttatgaataaaaacaatataaaaaaatcagaaaagagagttcgtctcatggattgctattttaaggattaaacattcaggtcttttcacggtacgaaagtagcgcttttcctccaaatcctataggattttttagtcaactaggtgtattttttgtttttcgtgcacggaaacgactaattttgtgcacgtaaacgtcaaaaatgtccatttttgatgcaatatctgataaattaagagtttcgttttggaagaaagcggaaaaggtcgtacttttggcacggtttacaactaataccctctggggaaacacagtaatatatcattaaaacagagaaaaaagaacagaatggaagaagtattcaagtacattatcggtcttggagcggcagtaatgatgccggtcattttcacagtcttaggagtatgtatcggtattaaactaccgaaagcgctgaaaagcggtttattagtaggtgtcggtttcgtcggtttgtcggtagtcacagcgttgcttaccagcagtctgggtcctgcactgagtaaaatggtagaaatctacggattggaattgggtattttcgacatgggttggccttctgcggcagcagtagcctataatacatctgtcggtgcttttattattccggtttgtttgggggtcaacttgctgatgctgcttaccaaaacgacacgcactgtcaacattgacctttggaactactggcatttcgcttttatcggagcgatcgtttattttgcttccgacagtattctttggggattcttcgccgctatcatctgctacatcatcacgcttgtaatggcggatatgactgctcccgctttccagaagttttatgacaaaatggacggtatctctattcctcagccgttctgccaaagttttgttccattcgctattgttatcaataaattacttgatatgattccgggattcgataagttgaatatcgattcggaaggtatgaaaaagaaattcggactgatgggcgaaccgttgttcctgggtatcgtaatcggttgcggtatcggagcgctgggttgcgcaagctggcaagaagtagtggacagcattcccggcattttaggattgggtatcaagatgggagccgtaatggaattgattccgcgtatcaccagcctctttatcgaaggtttgaaaccaatctccgacgctacccgcgagttgattgccaagaaatataagaacagcaccggtttaagcattggtatgagtcccgctttggtgatcggacatcctactacactggtggtatctctgcttttgattcctgtcactatcttcctggctgttatccttccgggcaaccgtttcttaccgctagcttctctggcaggtatgttctacttgttcccgatgattctgcctatcacaaaaggcaatgtggtgaaatcattcatcatcggtctggtagccttgatagtaggtctgtacttcgttacagaactggcaggattcttcacactggctgccaaagacgtatatgcagctacgggtgacccgacagtaaatattcccgcaggctttgaaggcggtgcgctcgacttcgcttccagtctcttctgctggggtatcttccacctgacttacagcctgaagattgtcggcccggctatccttgtgatacttgcgctcggaatggctgtttacaaccgtatccgcatgactagaaaagatgcgaaagaagcattagagaacaaataatcaatgacataataataatccaataaaaattcgaaatatgaaaagagtagcaattgcaatgatgttgggtatcgcagccatgtctgcttcagcccaagtaaattacaagatgcaagtggcttgcaatccgcaagacgtgaaaacgtatgatacaaaccgcctgcgtagtagcttcctgatggaaaaagtaatggttccgaacgaaatcaacgttacatattccatgtatgaccgttttatcttcggtggagcagttcctgcaactaaagagctggtattggaaactatcgacccgctgaaagctaaattctttttggaacgccgcgaactgggtgttatcaacattggcggtgaaggtatcgtaaccgtagacggtaaagaatacacattgaaattcaaagatgctttgtacataggtagaggcaaacagaaagtgactttcaagagtaaagattcaagcaatcctgctaagttctacatcaactcggctactgctcacaaggaatacaagactcagttgattacaatcgacggacgcaaaggttctctgaaagcgaactctttccctgccggaaagatggaagagagcaacgaccgcgttatcaatcagctgattgtcaacaacgtgcttgaagaaggtccttgccaattgcagatgggactgacagaattgaaaccgggcagcgtatggaacacaatgcctgcacatactcacagccgtcgtatcgaagcatatttctacttcaacgtaccggcagacaatgcaatctgccacttcatgggcgaaccgcaggaagaacgtatcgtctggatgcagaacgaacaggctatcatgtcaccggaatggtctatccacgccgctgccggaaccagcaactatatgtttatctggggtatggcgggtgaaaatctggactatggagacatggacaagattaaatatacagaaatgcgctaatcgttgcgcagctctgaattacatatcagtaagagaatgtgttaatacgcagattaacgcaaattatcgcagattgttttaattatatataggttaaccaacggcctataaaattacttctgtgataatctgcgttaatttgcgttttattattcgttatgacgccccctttgaaacaaattacatacataatgtaacggataatacatgaattcgaccaatttttacaaatgaaatccagtcgaaataccgacctttgtcagcgaatcaaaatctatttaaatccattatcatgaatgcatttcaaaaaacaggcgaaaagatgacaaactacagatggaccatctgtgctatgctattctttgctactacagtcaattatctcgaccgacaggttctttcattgacctgggacgaatttatcaaaccggaatttcattggaatgaggtacactatggtacgatcacttccgtattttctattgtctatgccatttgcatgttgtttgccggacgctttgtcgactggatgggaaccaagaaagggtatctctgggcaatcggcgtatggtcggcaggtgcttgtatgcacgcactttgcggaatcgtgaccgagcaatacgtaggtatgcacagcgcagccgaactgatggccgctaccggagacgttgttgtcgtgctggctaccgtaagtatgtactgtttcctggctgcacgctgtatccttgcacttggtgaggccggtaacttccctgcagctatcaaagtaacagccgaatatttcccgaagaaagaccgcgcttatgcaacttccatttttaatgccggtgcttctatcggtgctctgatcgctcccgtatctatcccattgctcgccaaggcttggggatgggaaatggcttttatcgttatcggtgctctcggctttatctggatgggaatgtgggtattcatgtatacttctcccgacaagagcaagcacgtcaataaagccgaattggactatatcgaacaagataagtttgaggaaggtgagatccccgcaaatgcagaagtaaaggaagaaaagaaaatgagcttcctccaatgcttcacatacaagcagacatgggcttttgccgccggtaagtttatgaccgacggtgtgtggtggttcttcctgttctggactccatcttatctgaacacccaatttgatattaagacatccgatggattgggtatggcattgattttcacgttgtatgctgtgaccatgttgtctatctacggtggtaaacttccgactatctttattaataagacaggtatgaacccgtatgctgcccgtatgaaagcgatgttaattttcgcattcttcccattggtagtattgttggcacagccgttaggaacactttctccgtggttcccggttattttaatcggtatcggtggagcggctcaccaatcatggtcggccaatatcttctctacggtaggcgatatgttcccaaaaaccgcaattgcaagtattacaggtatcggcggtatggccggtggcgtaggttctatgcttatgcaatacggtgcaggcgtattatttgtgcatgctgacgaaacccacatgacattcatgggatttgaaggcaaacctgccggatatttcatcatgttctgtatctgtgcagtatcttacctgctcggatggttgattatgaaagcattagttccgaaatacaaacctatcgtattggattaattcatccacatacgttagataacaaacaagagggggaactcatcacgagttccccctctctcttgtattaacaataaatttctttgaaaaagaaaaaaataaaaaagcctcttctcacgaagaaggctttttaggtttacttattctgcaccatcttcctgcaatattttcaattgcaacacttgagatgaagtgtcattgcattctcataatgaagaatagtaaacgttaagatgaaaaaaagggaagtctcacgacttccacaattcttctaaccttaaatctaaatctctatgaaaaaaacgtgttgcaaatataggcgtttgttcaacatagaggtgttaatgaatcgcataaagagagaataaaaactaacatctgcaaaaattagcaaatcactctttatactccattaaatttaataaactttcgtagagtggattggacttcagatacttagggactcctgtcacaaacatctgttttcgcgcacgggtaagagctacattcagtttacgatcaatcagcgtaccgtcttcttctgttaaattcgatacaaactttaattgaaaataactgttgatgcaacaggaatagatgattacatcccgttcgctcccttgaaaacgctcgacagtatcaaccataatccgattcagagccggaatgcccaatgcggctatttcttttttaatcagtgctatctgacttctgtaaggggtaatgattcccaacgtacgcgcctcatcgaaatctatccggcaatcctcatagatacgggcaaccaaatccgctacaatacgggcttccgaatggtttattttcgtagatgttcctgtcttctccggtatggaaggataaaaagccagacgacaaacagtatcggagtcttccagttggtgaggcaatccgacgggaatcagacgccctccataaaaagcacggttggcaaacagagccacttcgggatgcatacgaccttgacggcaaagcatatcgtaggaaggatgagaggtcaggggtgactgacgagcggtgcagttgcggtagagacgttcgaacagggaatctttcaagttggtcagtccgatagacatcaaggactcctcgtagatagcggactgttcagaactttgcagcacaacggcaggaagttgcttatggtcgccaatcaggataaatttatcaatggcattcccaccctcttcgccacgtgcacaaagaatgcctaatagctgaggttccaatatctgtgtagcttcatctataatggcaacattaaaatgtttcagacggaacaattccggtttgccggaaatggccgctacggttcctacaatgatgcggcaactccgaatacgctcgtaaacttccgaacggcggttgcaggaggctaattcgttttctatcagatgagtgcggtaagtctcgtcgcacgacaattcacttcccacacggataaaatcaacggcaggacgaatggaagcaagcgatttgcatatctcgtcgacagcccggtttgtatacgaaagcagaaggatttgaacgcctttatccgcatggaatgtttcaaccatcttctttaaggcacaagaggtctttccggttcccggaggaccgataagaagaaaataatcttgtgcggcttgcgctttcaatgcgacacgggtgaagtcgtctttcgcctgtgaaacaagagaatccaatgattcgtcgaacttcggcggacgctgggccagcaataagtcgcgacgttcctgtgttgcagagagataagcgtacaatccttgatacatggagcggaatgtcgtatccatcgtgtcatgttctatcgcataaaggctatcggcagggagcaccgaaggattctgctgtgtagcccgaaggcgaatacttatttcataatcggtcagatgttcgatattgcccttgaataccattttattggttacattatccgtcccgcagtttcgttcatagaggataatggcatcaccttgacggaaattaggaagtacgttttgtatatcattgtccgctactgtctccggcagttccttttcttcgaaatcggaacgtaccaataataaataagctttatgctcgtcggcggcatgattttcacgaatccgcaaattatagataatctcaccggcttcgcatttctcggccaatgtggaaagccacaaggaagccgcacccgtacgcccttcataatccacatcaccggacttagaagtataaagttctttcgtcagaaaattatagaccgcataaaaatagctcttttctatggcggaaagcctctgcaacttctcctgaaagcgatcaatgggcggccgcaaataggtttcccagaaacgtcctcgcaagccacgttcattcaatgtggaagcattgatctcctctaacttccgtgcagtatattccggattgttatgcaactggataccatattcatcggctacgatccggttgcgcaaatcaatcacacggcgcaccattgcccaagaaggccgtgaagggtaaagaagcggataacgggtataaagcaaataggcttttactttccggtgatccatccccatagagtattgcaatactgcctgataaagcaacatctgcaccttgttgttctctttcggttccaccttgccgcggatagcgtactcgtcagctttacccgatttcatttcgatgaaggaggacatatcccgttgcatataatcaaggcgaccttgcagtccgagcgcttcgcagatataagaaggttcaagcaccgcatccgtcttgtccaattcgtatccggcagtatgaaaagtatcattcaccgtttcgcggatatgctcgaaatgcaatttgcaatcatcaaagaattgacgttccttctctctgtcccgcaaatcggggcaagccgccaattcgatgggatagcggcggaaagccttttgcatacaagtccgataatcaatatcctcgttcggcgcatgaatccattcatccagaaagagattggcaatatttcccagtaacaggggacgggcattctcaatcggttgcattcgggaaaggaagtagtttcccggatggtgtccgtaatcgcggaaacactctgcaagcgaactgatatcaatcagataatccggttcgagaacgataaaagaaggggtaaggattcccgtctcatctatcgcaacgtcaagcagattcatctgggcatgttgccaaagcagcttacaggtttctgcaaactcttcgtttatttgaggtatattatagcggacaagatagggtctctccgagacttcgtccaaaggagtcacatacagatattgttcgtccgcatattgaaaacagacacgcattcgccgaactcgttcacgggcaggaggtgcaaccagataggtagcgtccgcacggggaagcaaacggtataactcatccggaatattctctcccgaaagtttgcggaccagaaaggccagtgttttaacatcccgcaagagtttttccctgttcggttcgagacggcggttcaggatttgattggaagtcaggcggaaagtatgaagccggttctgctctcctaccgaaagtccggtcttggcagcaataaaactgattcgcgccgagaggtcggtcatttgcaaactgccgctctgcatttgcgcccggcaaatacgttcgagcaagtcgcgcatctgcttgtaaccaacggtcagttcatcctctcccgccttgcagactgctagaagtaattcataagattctatcgcttcactcttctgacagggcaatttcatcttctatttcctcttcggttttcttcttatcctttatcatcaggatactcatttcgtatagcagataaagcggaatagcgacaacactcaatgtaaacggatcgcctgtcggagtaataatggcagcagctatcacaatgatgacaaccgcatggcgacggtacttccgcaagaaagacttattgactattcccagcagggatagcagccaggtcactaacggcaattcaaaagctagccccatacagagtaccaacatcataaaattgtcgatataggaattgagcgacagaatgttctccacttccgcactcaactgataggtggaaagaaaacggagtgtcaacggataaaccataaagtaacccagcaaaacaccgacaaagaacatcaccgttccaactgtcagagctttacgcactcctttcttttcattgggataaagggcaggaccgataaagcgccatacttcaaagaaaagataaggcatggcagtgactaccgacatccaaaaggctgtcgacatatgtataaagaaaggagccgccaagttgatattgaccagcttcacttgaaattcttgtgtgaagaaatcatcggtcaaatcaagcgcctgaccgatatgccgtaataaatcgtagaatatgaaatcattgtggcaaggcgccaatatcacatgatcaaaaaggtaaggcatagcaataaaataacctattgccaatacaaaccaaactccgatcacccggaaaagtaccttgcgcagttcatccaaatgatcccaaaaggtcatttctgccatccgtacttgctttacttacttgagtccgccggtttgtccaggtcttcttttgccttatttatttcctctttcgcatcattcactccgtctttgaagctcttcactccttttcccaagccacgcatcaattcaggaattttctttccgccaaaaagaagaaggataaccaaagcgataataatccattcggacccactaggcaaaaagcctaacaataataagtttgtcataagtttatttgataaagaggtttttattagtcggtacaaagataattattttcatcacagatcacacggattaacacagatttttattcaccacagaggacacagagggcacagagtccttttttcataatacgctgtcagtatcctcagtatctgatttgtatctttgaaaaaactccgtgtcctctgtggtgaactaatcctgataatatatccgtttcacccgcgtcgatatgctagtcagcacttcgtacggaatcgtatccagcttgtcggacaatactgtgatcggcaggtcgtcaccgaagattatagcttggtcaccttcacggcagtcgatgtccgtaacgtctatcatacagacatccatgcagatattgcccacataaggggctttcttgccgttcaccagacagtaagcatttccacgccccaagtgtcggttcaggccatcggcataaccgatagggatagcggctatacgggacggacgtatcaagtgtcccatccggctatatcccaccgtatcttcttcggggacatcccgaatctgaagtatggttgtcttgagcgtgctgacattatgtataatcgagttgtctatcggactcactccgtaaagtccgatacctagccgtaccatgtcaaactgtgctccgggaaaacgctcgattcctgccgtattgcagatatggcgtaaaattttatgcgagaaagccgcctgcaattcttgcgagcctttttcaaacaattcgatttgctgccgggtgaaagcgtcaaattgaggagaatcactgcctacgaaatgagagaataccgaacggggaattaccgcattctgattcttcaagcgacggataagcaagggaatatcttccgcttcaaaacccagccgatgcattcccgtatccagtttcacatgaatagggaaattggtgatcccttccttttctgcggctttaatcagcgcatcaagcaaatggaaattataaacttccggctccagtttatagtcaaacatcgttttgaacgctgtaagctccggatccatgatgatgatagaggacgtgatacccgctttacgcagttcggaaccttcatcggctaccgccacagccaagtagtcaacatgatgttcctgcaaagtcttggctatctcgtatgaaccggctccgtatgccgacgccttcaccatgcagatcattttcgtctcaggatggcgcaacatggagcggtaatgattcaagttctccaccatcgcgcctagatttacttccagtatcgtttcatgcactttcagttcgagcgcttcggacaccagatcaaagttgaacacacgagaaccctttatcagaatcacttccgaatgaagggatttgagcagttccgatttaagaagcgcttcggtattagggaagaaataacgttctatcccgtcgtcaaaacgagcggcacacgaagagatttccggccctactcctatcaatttatcaataccccgactctgcaccagttgggctacacgccgataaagcgtggcagtactctgtcctgtttccagaatatccgacagaatcagcgtacgtttcagtcctttcttttcagaacggcgtaccaggaagtcaagagctatatccagagaggccagatccgaattatagctatcattaatcaataggcagttattctttccctctttcacttcaaggcgcatggcaatcggttcgaggcgtgccatgcgttccgttatctgatcggcgggagtcatcaagtaaaggcaggcagccaagcagtttagtacgttttcgatggaggcgtcgtcgatgaaaggaatacagaaagtgttatccatattcagataacggtaagcaataacggtatggtcttctttctttgtcacacggctgatgtacaagggacgttcaatatccgtacgactccaggcaatctcacgtgcagtcagcattgatttcgccacacaattgctaatcagctcattatcaccatcataaatcacgacatcacaatctttgaaaagggttagcttttccatgcacttctcctgcaatgaaaaaaagttctcttgatgagcaccaccgatattcgtcagaataccgatagaaggctttatcatccgtttcaatgcccccatttcccccatctcagaaatacccgcctcgaaaattcccaattctgcttcttcggaaagttgccacacagacaatggaacaccaatctgcgaattataactacgcggagaacggacgatacaacggtccggactcagcaattggtgcaaccactctttcacaatggtttttccattgcttccggtgataccgattacaggaatattaaacctctcccgatgtacctcagccagtttctgcaatgctttcagagggttgggaacgatgaggaaattgagagttgaggggaaattgagagttgagagttgagaattgagaattggctgcgcatcatcatcctgcatagcactctcaattctcaactctccattctcaacttgtttaaactcttcctcggagatcacaaagtttcggacaccccggtcgtacagttcggggatgtagcggactccactattgcgtttggtggttaatgcaaagaaaagggtttcttccggaaaactcagggaacggctatctgttaagagccaatcgatagtcgcttcatattcacccacacggcgggcgccgatactttgggctatggattcaatcgcgtatgacatagttctgtttctttttgaaaatctaagtacgggtattttctgataagtcgttctatttttaacactatttgtcctaaaaagcgttgatacgcttcggacccgggatgaaagggcttgtgcgccaagtcccggcggatgtcttctacttcgcggataacctgctttgtttcagcggaaaagaaggtttcggaaaagcgttcccaaaggtaatggactgccaacggagacggatgcaacatatcatccgcatagaagcgataatcgcgtaattcatccaatacgatttcataagaggggaagtagaaaacttgttccgggaacgattgctgcaaccggtcgacggccagcaacaaagtcgatttactcaattggttggcgtgcattccatcccggatatgacggatgggactgactgtaaacaagaatttcaaggttgcattgcaagcagccatatcggtaatcaatgaagtgtattcatctactatttcatccacagacaaaagtcggcgattaaaatcattctccggtaatttgtgacaattggagactacctttcctgtctcttttgcttcataaacataagccgttccgaaagtcaacatcagccaatcaagcttcggcacagtctgatgggcttgcagcaaacgggcattgatattctgcaacgtagcctctggagtaatagccgaaaaagagccatgatgcatagtactatgccacagccctctataagcaaacaaatctttctccgtatattctttttttgtaataatctctttcaaagctgaggatatggacaaaggattatacagaattccgaaaggattcaaatccagttgaaacttggcctctgtcaagaaagttcccatattctcagcaaaacaagatcccatcaaaagaataggggatatatggctgataggcggtagtccgaccggcaatcccacagatgtttgaaagttcatcatgattttcctacattttattacgtttcgtgggcaaaagtatactttcttttcgtatttttgcgctaaatttcctcgaatcatgaagaatgaaccgatatataacttgctaaatgctattaattaccccgaagacctacgaaaactagacgtagaccaactgccggaagtatgcgatgaactaaggcaagacattattaaagagctctgctgcaacccgggacattttgctgccagtctggggacggtggaattgactgtagccttacactatgtttacaatacgccatacgaccgtattgtatgggatgtgggacatcaggcgtacggccacaaaattctgacagggcgtcgcgaggctttttccacgaaccgcaaatttgggggaatccgccctttcccgtcaccggaagaaagtgaatatgatactttcacttgcggacatgcttccaattccatctctgctgctctcggcatggctgtagctgctgcccggaaaggagaaatccaacgtcatgtcgtagccatcattggcgatggttcgatgagtggcggactggcttttgaaggacttaacaacgcatccactacgcctaataacctgctgattatcctgaatgacaacgatatggcaattgaccgtagcgtgggaggaatgaaacaatatcttttcaatctgacaacctccaaccgttacaaccaattgcgtttcaaactttcacggatgttgttcaagctcggtattctgaatgaagaacgccgcaaagcgctgatacgtttcggcaatagcttgaaatcgatggctgcccaacaacagaatattttcgaagggatgaatatccgttacttcggtccgatagacgggcacgacgtgaagaacctagcccgggtgttgcatgatattaaagatttgcaaggtcccaaaatccttcatctgcacacaatcaaaggaaaaggatttgcaccggcagaagaacacgctaccgaatggcatgctccgggcaagttcgatcctgtcaccggcgaacgtttcatagccaacacggagggaatgcctcctctctttcaggaggtattcggtcataccctagtggagcttgcagaagctaatccaaagattgtcggtgtgacccccgccatgcccagcggttgttcgatgaatattcttatggagaaaatgcccgaacgcgcgttcgatgtcggtatcgctgaaggacacgccgttaccttctccggaggaatggctaaagacgggatgttgccattctgtaatatctattcctcgtttatgcaacgggcgtatgataatatgatccacgatgtagccatacaaaatctttccgttatattgtgtctcgaccgtgccggacttgtcggcgaagacggtccgactcatcacggagctttcgatatggcttatttgcgtccgatacccaacctgaccatctcctccccaatggatgaacatgaattgcgccgattgatgtacacagcacaactgccggataaaggtccgtttgtgatccgttatccgcgaggacgcggggtagtggttgactggaaatgtccgttggaagaaatcccggtaggaaaaggtaggaaactgaaagatggtgacaaccttgcggttataacaatcggcccgataggcaacactgccgcccgtgccatttcccgtgctgaatcggaactgggcaagtctatcgctcattacgacttacgtttcctgaagcctttggatgaaaggctattacatgaaatcggacggaagcatcaacgtatcctcaccatcgaggacggtatcatcaaaggtggtatgggtagtgcgattcttgaatttatggccgacaatgaatataagccgaccttaaaacgtatcggcattcctaatatatttgtggaacatggttcagttgcagagctgtatcatttatgcggtatggacgaagaaggtattctgactaaaataaaagaatttatcaactgacatgaagatcattattgccggtgccggaaacgtaggcacccatttggccaaattgttatcgcgtgaaaagcaagatattatcttgatggatgatgacgaagagaagctaagcgctctcagctctaacttcgacttgctgacagttgccgcctctccttcttccatttccggactaaaggaggtgggtgtcaaagaggccgatctgtttatcgcagtcactccggatgagagccgcaatatgactgcctgtatgctggctaccaacttgggagcaaagaagacagtagcgcgtatcgacaactacgaatatcttctgcctaaaaacaaagagttcttccaaaaactgggagtagattcattgatctatccggaaatgttggctgctaaagagattgtatcttccatgcgtatgagctgggtacgtcaatggtgggagttttgcggaggagcactcgtgctgatcggtacaaagatgcgtaagaaagcggaaattctaaatattcccctacatcagttaggcggtcccaccattccatatcacgtagtagccatcaaacgtggaacggaaaccattatcccgcgcggagacgatgtaatcaaactaaatgatattgtttacttcaccactacccgcaaatatattccttatatacgtaagatagccgggaaagaggattatgccgacgtgcgtaatgtaatgattatgggtggaagccgcatcgctgtccgtaccgcccaatatgtgccggactatatgcaagtgaaaatcgtcgataatgatatcaatcgttgcaaccgactgaccgaattattggatgacaagacgatgattatcaacggggacggccgtgacatggatcttcttattgaagaagggctgaaaaacacagaagccttcgttgccctgaccgggaattccgaaaccaacatccttgcctgtctcgccgccaaacgcatgggagtggaaaagactgttgcggaggtggagaatatcgactatatcggtatggcggaaagtctcgacatcggcacggttatcaataaaaaaatgatcgccgccagccacatctaccagatgatgctggatgctgatgtgtctaatgtaaaatgcctgacattcgccaatgcggatgttgcagagtttaccgttccccccggagctaagataaccaagcatttgatcaaagacttagggcttccgaaaggaactaccatcggaggtatgatccgtaatggagagggaatactggtaaccggtgatacgttggttcaaccgggtgaccacgtagtggtgttctgcctgagtatgatgattaagaaaattgagaagttctttaattaaattctttaattagatagcaagtatcaggtaattgttatgattaactcgaagatgatattccggattctaggctttctgcttctgatagaaacagccatgttactatgctgcggaggtgtctcgctcttctatgaagaaggggatttaaaaagtttcctaatctcatcagctctttctgccggtataggcgttgtattgctcgccatcggcaaaggggcggaaaaatcactcaaccgacgtgacggatatgtcattgtcagtgtggcgtgggttacattttcccttttcgggatgttaccttattatataggaggatatattcccaatgtcgccgacgcattcttcgagacaatgtccggattcagcagtaccggtgccactatcttgaacaatatcgaatcaatgcctcacggaatcctattctggcgtgcaatgacgcaatggataggtggtttgggaattgtattcttcaccattgccgttctaccgattttcggtgtgggaggtatccaggtatttgcagcggaagccagcggaccaacgcatgacaaagtgcatccccgtattggtgtcaccgccaaatggatatggggaatctatgccggaatgacgggaactctgattatattactgacagtgggaggcatgagcatatttgacagtgtatgtcatgctttcacaacaaccagtacaggtggcttttccaccaaacaggccagtatcgagtattaccattcgccttatatagattatgtaatctctattttcatgttcctttcaggtatcaactttacgttgctactgctcatgttcaatggtaaaataaagaagttcatccatgatgcggaactgaaattctatttcctatgcgtatctttcttcaccatattcattgcagtctggctctatcagacttctccgatgagcgtggaagaagcattccgcaaatccctcttccaagttatttcactacagacttcgacaggattcgccacagccgactatatgctctggccttctattctttgggggtgtctccttatcgtaatgatcatcggagcctgcgcaggcagtacaaccggaggtatcaaatgtatccgcatggtgatcctcttcaaggtagtaaaaaatgaattcaaacatatcctgcatcccaatgccgtacttccggtacgggtgaacaaacaggttatctccccttccatccaatctacagtattggctttcacctttttgtacgcggtaatttctatcatcagcatacttatcatgatggggctgggagtcggttttctggaatcaatcggaaccgtaatctcaagtatgggtaatatgggaccgggactcggtacatgcggcccggctttttcatggagtcaattgcctgatgccgccaaatggctgctttcttttttaatgctcttgggacgtttggaattgtttacagtattactacttttcacttccgatttctggaaaaagaattaagaattcaataaaggtagtctctttaatgcaaaagctacaataaggcatacattatcaggctattacaaagagtacttatctattcatatattctcaacgatactcactgtaagtaagcgtctcggcgatgccatattttctatcttaatttttccttttagctttgcttcataataaaaaaacacatcttatgactgcacatgacttgtacacccgtaccttatcggattataaatcctgtttatgttcttctcctgccttaactcttcgtagttattgccgtgaacgacatgtaaactaccatggtatgtgtctttggctttcccgtcacggcatcagtatccgtgagttgcgtccctcctcttccgtcaccaccgctaaagagcctgcatcctctttcagccgtttgtttccggtctgctcttccccttcctcctctccggatatgctttacggggttaccatcactttccctgacggagtgactgtctctatcaagcaaggcagctcttttagcgtcagccgttttatcgaccgttataacagtaaaattcaggaggaagagtcatgtttgctttaaccgatggcatgcattattatctgtgccagcattatgttgatatgcgtaaaggcatgaccggactttaccggcttgtcaagtccgacatgtccctttctcccgtttcgggtgatgtatttgtgtttttctcccgcaaacgtgacatggttaaaattttgcggtgggatacggacggttttattctctatcagaaacgactggaagaaggtacctttgaggttccccgttttaatcccgatacagggtcttatgagctctcatggaagacttttcttttgataatgcagggcgtctcgctccggtctgccaaatgcaggaaacggttccggttgaagtaatacaccgatgcaataatctgtatatcaatatattatattataaatacttcgctgatttatttgtcttccggttcttttttcttatctttgacacatgcaaaaggaccggctcatagaacttctggaggatcaaatcagatctttaaaagaacagcttgaagcggctgccaggcgtgaggagcatgggcagctgcttatctgcgaattgacgatgcaggtccggcaattaaccgaaagtgtccattcattagaagaggcgttgaccttgaaaaatggtaaactgaaaaaacaggagaacatcagtcgtggcttaggcaaacttataagcaacgagtctgaaaagcaggtaccgggtaaggcggaggcggtccggcagacggctccctcccgtccatgcccttctcccaaagagcggggaaacaataaatccaaacgcaaggagcattttgaactggaagagaaggtaatcgaagtcaatcccgaacatccccttttcagcatctcccttgccaaattcatgggataccgtgattctatccgttatgtctacactcctccgaaatttgaaaaacttgtctaccggcaaaacatctatagcttaaacggaacagtcttctgcggttccgctccccaggcacctttccttaactcaaactacgacggatcttttgtagcgggtttatgccagttgcgctatatctactctatgagtgtggagcggattatcggcttcttccgtgaaagcggatttgagcttgaaaagcccaccgcgcatcacctgctgggcagagcggccgaaatgttggaaaacctttacagggcgttgagaatggccgtgcttggagactcttatctttgttgtgatgaaagttaccacaaagtccttgtggaagagaagaacagtagaggcaaaggggtaaggcaggggtatatctgggcggccgtcgcggtcaagcagaaattgatactgtacctctacgagaatggctcccgtagcgggaaggtgctttttgaccttctttccgaatatgaggggacagtacaaagtgacgcatacagtccgtatagaaaattggaaagtgacgcctatccgggaattaaaagaatcgcctgcctgcagcatgtcaaaaggaagttccttgaggtacaggaggaaccggacgcacaaaagatcgttgaactgacgaacaagctgtatcaaaaagaacacgaacactgtgttggtcgacagggatggacagacaaagataacctcaggcaccggaaaaggtatgcgccgcagatactcagcgaaataaaacgggaactgctcaggataaagagtaagcctgacttgcttcccaaaagtgagatggcgggagcggttgactatatgctctcgcaatgggaggccattaagggcatctttactgaaggatattattacttggacaataatttggtcgagcggtacaaccgatatatatcactgtccagaagaaattcccttttctttggaagccataagggggcggaaagaggtgccttattttattcgctggcctgttcatgcagaatgcagggaataaataccttcgaatatatcacggaggtaatcaataaagcggcaaagctaccaccaaatacggacataaaggtatatagaaatttattgccggacaaatggaaagaaaatagaagtaggatcgaaacataaagaggagatgctacttctattttttttgaggggggggacggcatcgccgagacgcttaccactgtaatgagaaaaaatactcatcgcaatgagaaaaagttctcattacagtgagaattctttctcattacggtgagtattctatcgtatttctacgctgttatcacatcagacctttctaagtaaaatctttcttacaacaggcttatttatttcataaatcttattgataagaacatccatttcctgttggcgagcatcacggacagcttcaaacatcatctttgaatacatatcacgacgtcccttcaaccaaacgtttttatccaagttttcatccatcacctcgatcgcttttctgtcgtcagcatacaacaatcccttttgctggaaaaagccaaattcacaccacgcatattctctgaatgttctttcaatttcccaacgatattcattcaggtgcatcaccgtcaatgcttgttggtattggggagttttagattcagcagcaagattaatgccctttgccagttcatctccactccaggttccaatttcttcatcgtctatcaacaacttataattgcctttcagtcctgttactttcaacgtttcacggttcatctcttccataaaaggaacaactttcagcacttctgcctggctctttttctgtccccaaccacgagcaatagtatctaaaggataaggaagagcttctgccaaatagtcaaaactcaaatcttttccgttcttctttatatttgacacagtacagttctccgacttgacggcttgttttttattggcattaatctccatatccgctacttccttacctacaaatccctgggctttcaggaaaagataggccatcaccatgtgcccgtcgttatcgggatgaatacggtcactgccacaaagggtaaaggtaggatctttctgctgatattgctgattaagagctgtcataggagcatttaaatcggtaaattcccaattatttttagctgccgattctttctgatattcaacaagccgtttgatggtttcattctttgtcttaaacggtgtattctctttcagttgtacggtttcatcatacggagaagtcccaaccatcacgatacgggtatcaggaagatctttaaaacgtttctccatctgctggtaattctttatactttcctgatatttctgctcaccgaattctttgggcttatcaccgttgtattcaaaatatccggaatcattcataccaaaagtaaccatcaacacggaaggtttcatcgcaaaaatatcaccatccagacgtttgttcatatcataggccgtatctccaccaataccaccgttgaaaacacggataggcatatccggaaaacgggtcatatagtataaccagatgtatgaatggtaatgcccaccatccgttatactatttcccaggaacactgctctctcaccctccttaaaaggtttcacagtttgtgcaaacgcagcagtacatgtcatacaagccgccgcaatcaatacaaaaagttttttcatgtcttaatttctattttataaactattattttcattatgaacgttttctttcttttttgagaggatcatatacggcaactgccacgcgtgaatcggcacagccataatataagaaccatttctgattgtagaatacaagtccttctataaatacggttccggctggatattgtccgctcttttcaaagtctgattcgggaatatagaaaggcttatccaagcgatcgattagtttagtaggatctttagcatcaaataaggcttgtccggcgcaataagagttggctgtatacagtgtgtctccttctgcgcccgatttatttttgccgttataaaataaaaggattcctttgtcagtcaggatggcaggaggaccacattcggtcaggtcactgtcgaacttacctgcgcggggagttatcactttcaggaattctccattttcatccaacatcggttcccagttgacaaggtctgtggaagtggctacattcacaaacttttctccccagtacatccagtatttgccgtcaatcttggcaatcacttgtttgccgtcaattaatttggttacgatagaggcagatttggaaaattcatccatgaatcttccgttgtatgcttttgcgaaagccggtccatgtttttcccacgtttgaagatcacgcgaggtagccactgccaaacgcgcctgtttgtggttccattgtgtgtaatgcattacgtaaagcccgtcttctgttacagcaacacgtgggtcttcgcaaccgccgggattttccagctctttctggctgtcgtctgccggataaaatacaggtacggacattcgtttgaagtgtagtccgtcgtcagaataggcatatcccaaacgggaggtacgtgatccgataccggttgccgagttatcttcagcccggtagaggactactacttttccattataaacagtagcagcgggattaaacgtatcactcgcttcccatgctactgaatcctgtctcatcggacaatagaaaaaggttgtagtgtcaggagaaataatcggattaataccttccggacgctggaaatctgcccatgcccaatccgggaattcagatgtctgcttcttcccgccacaggaagtgactaatgcggcagccatcagtagataagctatgttttgtagttttcttttcattttcacgtttgatgttataaataagtgctcttacaaaataatcttatatcataaatttatatgcctcgttaatttgctttaagggaaagagggaggcgtcactttagttccccacttcacgtcaggcttggacgaggtagtgtattctattgtagccccattattcagctgatcccaatcgatccatgtactgtcatacggtttaccgttcagcttcatggacttgatataaatattcttttccgaaccgccttttatcaccatatcccctttctttaaatgaactttcacggatgagaatatcggagtgttcaccgtaaagcctcccactcccggtatttcgggataaagaccgatacaagcgaacacataccaggcgcccatcgtccctaaatcatcattacctggcagaccatcaattttgcttgaatactgttcattcaatacacggttaataatctcctgtgctttatagggagttccgacccagttgtatatccagggaatgtgaaagctcggttcattgccggaagcgaaccaggcatcattgtaaccggcatccaggcgggtaaaaaattcatccagacgtttttctgccgctgctttgcctccaatgatttctatcagtccggcaatgtcgtatggcaccatccagaaataattcttataggtcgattcacggaaatcttcagtcagtggtttccacgaaccatccggattacgtgattgcagccatccggtttccggattatacagattcttccacgaacgtgcaaaatggaaataacgccagcttgcaaactcatctcctacggcatgtaaggcaaattgtgcgattgcaaaatcagcggaagtatattctaattgtatagaagcgttgtaatatcctttatccaaatactgtttcagtcccggacgagcctcaacctcctgtgacattgctcccggttcttccgctccttttctcatggttttgaaaattggtttcggatcataattgcgggcaccaaaagcgtaagcattggatatcaggataggagtcggatctccttgcatcacgccggtctctatattagccatcacccaacgcgggaaagcaccaccagcctcttcggcaaacaattggtgagaaataacaatatcagaggctacttcaggatcaaggattgacaatagttgaatctgtgtacgataggtatcccagttgctaaaagaagtatagtgcttggaacgggatttatgcactttgaaatcagctcccatgtattccccattcacatcactacatacgttcgggtgaatgaatgaacgatacagatgggtataaaattgagtggtacgatccggattggttccttctacttcgatcttacccaaataatgattccatttggattctgcctgattctgaatctgcaggaaatcccatccggtattctccgctttcagattctcgcgtgcattttctactgatacataagaaaccccaatcttatattggatatttttcttcttatttacatcaaaagtaaaatagactccggagtattctccttcagcaaaagtcgtgttcggcttcagttcatttcttttccatgttcccgattccaacgcatccgtatcaaactctgctacaaaatagactttatacggtgtacggagtccacagaaattaccgccttctgcatatccttcacacttattcggtgcagtaataacgatggcggcctgctctatcggagttgcggaaatgcctccaccgataattaccgtaccatattgctgatcggccggatattcataactcgccataccggtcctttcagttactgtcagttttgcatgaatatcttcctgcacctttgcttcataataaccggcatgtcctttttcttcagaaatattgatgcggtagttgaggatattgtccggagacatcttcagtttaccttttaccggaaaagtgggaaagttgcccatgtgctcgcaaccgccaccactcaactgattgatgacgaatccggaacgtttggaaaaataagagggagtgaactgcaccattccataaggataggtagctccgggataaagatatcccgaagtcaaacccacgcccttcgttcctattagggtatttacctgacgggcataattactcccggcgctctgcgccgagagactcccccaccctccaatcaaaaccaataataaacctgttaaaattttatttttcatactgtattcttcttatatctttttagtttcttattctttcgacaatgagaaaggagcagcatacttcgacgtacatcgttctttattcggttgacttcccatttcaaaacggataattcctccgtctgctatatcgtcgtatctgataaaattcttatccaacacacgtccatttaaggtagcagactggatatagagattctctttactattgttgttcgcttcaatcacgaatttattgccgttttccatcgttatagtagctttcttaaataacggactgccaattacatactcatccgtacccggacaaacggcataaatgcctaatgagctcaagatataccatgatgacataccgccttggtcttcgtctcccggatatcctctttctgtggaattatacaatctttcaacgatctgacgcacccaatactgggttttccacggttggccggcatagctatacagataaggcatgtgctgaatcggctgattgccgtgtgcatattgtcccatacccgccaattccatttctttcatttcatggatcactcctccgtaagttcccggtttaatagtgctgggaagggtgaataccgaatccattttggtcgtaaatctttggtcgcttccgaacaagtctattaaaccttctacatcatggaatacagaccaggtataatgccaggcattaccctcgcagaaaggtccgccccactccaaaggatcaaacggttcctgccatttaccatcgacgccttttccacgcataaaaccgatagacggatcgaatacgtttttataattatacatctgacgggcaaaaacttcctgatagtgtttgtttccagtcatcttagccagttggtagccacagaaatcatcgtatgcatattccattgtctgtgcactcgatcccattgattccggataaggaacatatcccagttcaaaatattctttccagaaaccgcgtccgttggcgcctccccaaggacctttattcatggcttcgtgtgcgtatgctttcaaagctttctccggatcaaaagtccgaatcccttttgcccacgcatctgccagtaatgaaatggaatgattacccaacattcctcctgtttctccgggagctgaccaggaaggtaaccatccgcattgttcttgtgcggcaagcaaggcattcatgtaacgtccctgcatagtaggatgcaaaatattagttaatggaaattgagaacggaaagtgtcccagaatccattatcagtatacatatatccgtcatatactttaccgtcataaggactatagtaataaggttctctgtttgctttacgttcatagaatttgcgtgaaaagagattggcacggaacaggcaggagtagaaagttttcatttgttcatctgttccaccttctacctggattctgttcaataattcattccacgttttatgtccacgtattttggtggcttccaaattcttatctttacccagttcgtcgttcagtgtaatcacagcctgctctgcgctgatataggaagaagcagcctttgcctgtactttcgatcctttcttaaatttgatataagcaccatagcctttgccttctccttccaactttttagggaaaatctcatctttctgattttcccacataccgtaatcctcaaatgctttgtcgaactgcactacaaagtaactacggaatgtcttagagttatttacaaaacgttgattattcacccaacctaagatttgtctctttgccggatcaatcttaatttcactcatatctgtatatccgtcaattaccagataggcgtcttcagtagagggataagaaaagcgtaaatgtacaccacgagtagttggagccatctcggttgtaattccattatccagcatcactttataataatgcggcttggctatttcattatcatggctgaacttcgttgcccgcatctcctgattaacgactaacttccctaccatcggcataaaggaatacactgcataatcactcatccacggactgcattggtgagactggcagaatcctctgatattatctaccgcatattgatatttccagccttctccattcttgcctgtttgggcagaccacgtatgcatggcataaggcataccggtagtagggtatgtatttccataacttaatccgaaatgagagtcggtaccttgcagtgtattgacatattgcacaaggtctttcatttgggcatatattcctgaagaaataaaaagaaagattactagataaattagttttctcatggttattctttaatgcgtaacgtactatttttactgataaatagattgaatgaatcatttattgccgaaagtgattcccggccaatcatccgtacggaatggagatgccggaagattggctccattatacaaattacagatcggattatcagcccatgcgtatctaacagctatcgggaaagcaacttccggtgaagatacaacgatggtattaccctcaatcacagcatcagcccaatgaaatttatgatcaacaccggcaatggtaaatccctttattacttcgttatttgcagtcttcaacccaccatctgtatgtttgaaataaatacggatcttattaccttccatctgatacgtatcatacattggaccggaatatggtattttctcaccataagtctgtgcccgcgcagccaatgccaaacgtctgccgacttcctgcttatttttcggatgaatatcaaaagcatcacctatatcaattgtcacagccattcctgtatttgcaagatgcaatgttcgtgtttgagcttctcgcaattcagcccaagttgcatccactggagctgtctgttgagctgtgaaacttgccagttgcaccatgtaaaatggaaagtcatatccccaacgatcccgccagtcttttatcattaatggcatcaattcacgatattgatatgcctgtcctgtgttagcttctccttgataccaaatcgccccttttatactataaggaatcaacggattcagcatcgcattaaataagaagccaggaatattcggttcattggctgtattaacaggcatctgtggaatatccttaatattcaaagaaatttgatacttccaatcaccggccaatggtatggcatccaattgggaacgatgaagtgaaatactttcaggacttccatttataccacccgtacctcctgtatccataacacgcacagcaatcactgctttaccacttttcaccaactctttgggtatcttatagcttctaggggacatccatccctcggtgtgtcctacttgcacgccattgaaataggtaaaatcattatcatcaattactccgacattcaacgtcagttctttgccctcccatttcgccggaatttctattgtttttctaaaccaaacaataccattaaaccctttcaaaccttgctcctgcatcaaaccaggcacttccattgttttccatgcactgtcttcaaagtctgtaactgtccatgcggctctgccatccacaaatcctttatcaatcttttcaatctcttttttccaatcttccacatctgaatgaaatttcttttcacgatcttcggatgaaatcggaagttctttcaagacatcaagtttcttctgcatacccggcattgttgctaaagcctctttactcgtccatgtctcaatacaggtacctccccaagaagtatctatcaagccgattggcacattttgatacctatgcaaatcacgcccgaaaaaataaccggctgccgaaaagtctgctacactttttgatgaacaaacttgccaaccatcacctgctgcttttatatcactaacaggcaatggactcgtagctttttctatcagtaagaaacgaatatttggatagttatttgcttcttttttttcttgctggtagttcattaccttaccccacccttctacctgcatttccatattggattggccggaacatacccaaacttctccaatcatcacattgttcaactttacagtttttccgtcagagatagttatcgtatatggtcctccagctacaggagtatcgactttagccttccagtttccttgtgcatcagcttgggtagtatattttttctgatcccatgaagtagtgatttctatagttctattagatttgcttattccccaaataggagcttctgctttctgttgcaacaccatattattagaaaacaatggtgacaattttacttgtgcataaacattagcaacaaacaatagacaccataaaatacaaactaaaacttttctcatttccactctttattgatcatataacgtatgacgaacaaaaccctatttaccattaattaagcaaccaaatacaaacttaaaataatcaaaaaaagaatcatttcttatatttgtaaaaaaaatgattcttttttctcttatctaaacaaataacgattattcttcataaactctttcccaattatatacacgatagaaataaggacgataataatcagcactacctacagcgttaaagttgtcccaaaaatttttgggatctgtatttgtagaaaagactaattcaccattacgtgataaatgtggatgcaagtttatcatgtataaattctgataagtttgatcacctaatttatctaaaaaatcagagaatccaaatagccttttacaatcgacaaaaggtccatatggtttatcactccggaaaatatacatttcacgtccaaaccatttagcttgtgccaacatataataggtatctccttttttaaatacccatggcatactacaatctgtctcttgaattctagaacgcttaacttcctcctcagtaggataagtattctgccaagaaaaatttccttgttcatcccctacataatactcccacggactagtaagatcatgtctagccgtacgagctactatcatatcataattattatatgaaccatacaaataaatatgaccatcttcgtcttcccacaaagtagatccatatccatatatatcagcatcattaaaatggtgatcagcactaattagtttcatatagttatcatctcctggggttccctccaaactataagttgccaaacaaataccctcatgtctcatcaaagcatccggatttgtattatcgaccccattccaaagcacctgcaatttattattacatacagtagcgtcacctgcccaatacaaccaatcctgatcaatttctccttcttggatcttatcatcactcaaactagctttgggatgacgaatatgagtacgtgcttgataataacgaggagcctcgggggtagtagtttgtacaaaatcagccaaccatacaagattctcctcctcatcaccaggagtctgaaccattatagaattacgtggaaagctacaatccttacgtgcacgagtttcaccttctactactccataaaaactatcgttaaatgaccaaaatgcatttccatcaggtaatagagttgtcaatacaccgtcgcctccgttccagcccaaagtccgagtaaatagtttatcatactttttatctttaaaagccatcacatagccattagtctccatcagttctaattcccatgccggatcaatagtatttaaaacctcttcttgtgcttcttctaatggagtactcttatattccaaaggaattgcttcaaatttatcgcaagctcctaatattccacacatcaaaaaaagtgagaagatctttccatttttatatctattcatatttatgttcatttaatcattaaattagaatgtcaattgtacaccaagattcactacacgctgattcatataagcatcacccgccgtattagtttttatttcaggatcttgctgatatttatcataacctgtaaatgtcaataaattataagcattcacatagaaacgaatgttatctacatacttaggtaatactttctttggaagttgatatcctaaatcaatcgtcttcaaacggatataccaagcattaatcaaccagaaatcagacatataagtactggcactatttatagtggaaggattggtcgttaaacgagggaaagttatttcttctccatttttataacgatctaatgtccaacgtccagtatggataggctgaaactgacttttaaacgattctataccagtaccattgattgcaaaactatagtcaaatgaaccttgaaataatacattaaaactaaatcctttccaataacctccaaatgaccaccctaaagttgttgtaggcagattaggcttaccaatagcacccttatcaaaatcatcaatagaaccatcgccattcaaatcagcatacttcaagtcaccagcctgaaccggaatatcagtataaggtactgctggagctttaatagtaggatcttcctttgcagcatttatcagttcaatatcttccggagtataataacctatccatttatatccaaatggttgattcaaaggtcttcctgtttctgctaaccaaggatatttctgttgagcctctgccttaaaatcaactttattctttgcataagagaatactaaacttgtattaaaatcaaattctccaaaacgatcttgatagccaatttgtccatcaaatccttgattagtagttcttgctacattactcggagcataccctatacctattattaagggaacgtcagctcttgtcaccaattggtcataacgtttatccaagaagtagtcaatagtaaatgagaccttattaaataaattcatatctaaaccaacatcaaatttcttagccttctcccaagttacactaggagtccctaagtctccctcttttatcactggactatcggctggataatctccaaaaggataatttccattttcttgatatacttgttcatacaaataacgattaccagcagctacatcagatcctaccaagccatatgaagctcttattttcaataactgaacatttttttctagccagtctacatttttaaagaaattttcctctgaaatagcatacccaataccaacagctggaaaaaaaccaaaacgattgtttttaccaaaacggtcagttccgttataagccatattgagatcaattaaatatttacctttatatttatatcccatcgttaaagtatagccctcaaaattattgggaacagctgcatccttttcatttgtcgtactctgacgattatacaaaaacatagcatttacatcgtggtctccattaaaaacatgtgcataatttaatgaagcttgaatatttacatccttcgtagcttgatttgtaccgctagttacagagtatgttccataatcatatttcttattaggattaatttcatattcattagttgacgaattatagtaatacgttggataatccccacgatgcacttgacgataattttcatctacacttgaataagctacacgaagattagctgcaagtccctgtgttagaaagtccatcttccaggtggcaccatataaaatattattatcattacgacgagtacgcttatacccctcattagctaaacgagcattcaaggtaggtttatatccttctgtatctctcaaataagcatacgatccattaggatttaatactggagcagaataaggatgcatcttagaaaagtcataaatttcacccgttgcattcatattacaaggctcattaatattcataaaacgtgaagatacatctaaacgcatattcaaattatccgttacatcaaaatctacgttagttcgataattgaaacgacgataaaaataatttgaatttacatcatttcctttcgttccaaaatcttttaccataccatcctgagtaaaatagccggcagagacaaaatatcttaatctcttagaacctccagaaatatccacattcacattttcttgaaaggcattctttttaaagatctcgtcataccaatttacatcaggatggccataaggatcagcgtgatctctaaatgccataatatctttcttagagaacaatctaggcataccatcattctcatacgcttcattcaccaaaatagccgtattatatgaattcaagaagtcaggagtacgaactggggtctgtattcctccttccaaacgtacattgatctgtggtttaccctcttttcctcttcttgttttcactactaataccccgtttgctcctttgataccataaattgcagttgtcgaagcatctttcaaaattgaaatactttctatttcatttacattaatttgtgataattgctcgtatgtatactgcacatcatctacaataatcaaaggtttattaccttcggagttcaaagagctaacaccacgaataaaaaaatccgaagcatctttacctggctgtccagaggactgctggctaaaaaatcctggcaattttccagttaaagcattttgtaaactactagttggtacatttcgaatttcacgtgcttgtataccgctaaccgcccctgtcatagtgatacgttttgcctttccgtatgctaccaccactacttcatccaaatctgtttgatcaggtgtcaactctacattccaagatgtctgatttcctacttttagttcatactttttaaaacctatataggtaaatactaacacatctcccttattcactttcaactgataattaccgtcaaaatctgtaattgtaccaatcgtagcattttttatccttacatttactcctggaagcaattcaccatcagtagaagagacctttccttttaccgttaacgattgcgctaaggcaaacgtaaacagatttatactcaataatattaataatattcttttcataacgtaattaccaattcgggttttgaatcatatttccattttttatcacttctgaatacggaattggatagaagtaacgcttcgtatcaaatttggctgaaagtacatccacttcatgataattggttttagtaccaacaacctgaatacttaaacctcttaaaggtttttcgaaaacagtttctgcaattctccaacgtcgaatatcccaatagcgttgttcctcaaaagccatctcaattcttcgttcattacgaatgatgtcacgcatctcaataggatcataagcctctgaagtaggtaaaccataattaccatcatctccaggttctataccagctctcttacgcaattgaacaagactattgattacttctttataatcaatcgtgccacctgctacagccacttcattcaatgcctctgcataatttaataacacttcaccataacgatatatgacccacaaatgaatatcatcctcataattgcccaaagcctgataatctttcataaatttcgccatataataacaggtacgactatattgcgctcctgaagggttatgcattccccctacttttgtatcaagagttgtattcaaccatctagatccattatgcaataccgtcaaatctaatcgaggatcacggtccttaaaaggatcatctactgaattataaatatatttagtactttcacctggttttttaccatctttcatcaaaaaagactccaccaaattctgtgtaggattagtattaccattacctaaagaattaccagaaaagcccaaaggaccattagcagtctctattgttttgttcttacctaccggacgaaaaaatattaattcaggattatttccgccatagaaatttacaaaaatattacgatagtcttgcgctaaattcaatgtgccttttcctttcggtccatattgatcgatcaaatctttagcagcttgtgcagccaaattccaacgttgactatcataagaagcatatcctatcaattcattacctgcttccagaggtttttcattgaataaaggactggcagcatacaacaatactctagctttcatagccaaacaagtctctttggttggagcatgtgcaaattctgtggcatctgacatcggtaacgaacgaagatcatcttttatctcgtccagttcacgtacgatataatcaatacattgagcaaatgtatttcgtggaagctgcacatcatctcccaatacatatacattatcacccactaaaggaacacctccataacgcttcactaattcgaaataaaaatatgctcttaaaaaacgagcctctgccttcattgtataatttaatggctttgtctctcccaaagcattaacatatgtcaaattaaaaggcaccacgtctatattattaatcaaaatattcgctttgcgaattccttgataatatgccccccattccatatctcccaaacgagaaactgcagaataacgccccataaacaacttatagatttctggagaattattatcaatagaaatagcatcatctgaagccgcatccaaaaaatctccatctatacggttgtatccactatataaatgttccaaatagatattattcaaaaagtatcgagattgtatccctgctgaatcaacttttgagaacacataatcaagtgtaaaatgttctaccggctctttttcatacccatcattacaagccgatgccatgaacaataagcccattcctaaaaatgttaaatatttatttcgtatcatataataactcattaaaatctgatattaatacctgtactaatacaacgttgcaatggataactagtaaaacctacttccggatcaaccagatcacacgcagatttcgtaaatagattttgaccatttacaaatatcttcaaacgtagtcctcctaagtagttattacagaaagaatctggtaagttatatcctaaacttatatttttcaaacgaataaaatttcctgagcgcaaccaaaatgaagaattccaaccattaccccgattatattcatttccaccagctgttaatcgtgggaatgtcgcactttctgcagtttctggtgtccaacgtcctaacatattttcatatgcttgtccgtaataacgaccatttgcttgaaatccttcaagtagtgtccaatcctgcaaataaagatcacgattataagcgccttgccaaaacatagaaaaatccaatcctctccatttaaatcccaaatcaataccgaaataagaataaggtttatcaccaccaatgacagtacggtcaaattcattaattactttatcgttattcagatccttgtatttaatatcaccaggttgaatattttcgaatccatcaattaccggacttttctcaatttcctctcttgtagtaaaaaatccatcagctactaatccgtaaatagctcctgcaggacgccccgtttgacgtaaatattcttctgggacttcttgttcatccatatagagtaatttactttgctcacaactccagtttgcagaaacataataacttaaatcatttacacgaccttgataagtaatagacaaatctccaccaaaacgacgaacttttccaatattttccatcggataatactgtcctatcaattcaatacttttacctctgttttgtaacaggtcaaaatatttatcattataataatccgctgtaaatttcaagcgattattgaacatagccaaatcaactcctacattcaatttatacgctttttcccacgtcaagaaaggatttgctaatggagtattttccattgtcacatttcccatagccgacatctccgtccctaacggataaccagctgtcccaatatgtgaaaatgtttgccgatacatataataacctgagttgtctataccattgcctgttttaccaaatactccacgtagttttaattgatttaaccaatcagcattctccataaagttttctttactgatatcccatcctaagccaaatgcataaaaagtcccccatcgtttaccaggagcataccgattgtaatagctttcacttagagccgcttgcaaaaaatatttctccgcataatcataagccacatctgctataatattagagggcaattgaggtaaatcataatttaccaatgtatggcgagtatcacccattaaagttgcctttatcccatgtactccaaaacgacgattataatctacagcaaactgtccgtacatttgctgataactagtcaccgagtaaaatttattaatttgtgaatcacttgatccatactgagtatatatttctttcccctctttatctaagccataagaatataccggagcacgcttactacgttctgtataggaacgattctgaatagaaacatttccaactaaacgtgcagataatccttttactaacttatcaaaatcatatttcaaattaataccgcccaccatatcacgagctgtatccataatgtaacccgaattaatggcttgtgacatcaagttattgtcaaatgtcacattacctccccatgtcccattcgggttcttaatcggatacgcattattaggagtagtataaatcgcattcaacaaattactatattttgcaccaggttgatttccatcttctacacgccctaataaagtaactttagcagtaaaatcatccgttatattaatatttactttggaagaaatcatataacgggaataagataaattagtatcatgcgcatcactttctgttggattcgaaaacaatccattttctcccatataacctacactgacaaaatactgtgcgaacttattccccccagtcacatttaaattataggattgagtagtagaagtgttatttaatatttcatcaaaccaatttacattaggatgtgtatatggatttgactgcgtacgaaatttattaaaatcatcatatgtataaaatggttctttcccatcattctgtaatgcctcattcaataaataagcatattgatgtgcagataaaggattaggtgttttaagagcactctgtaccccaaaacgcccggtaaatgacaattgaaaaccttgttttataggttctttagtagtaatcactaatgcgcctctcgaactacgcattcctaaaaacatagatgacaaagcatctttctgaatagaaactgactctatcgcctctggatctattgaataaagttctcgttgtattccatcaattaccaccacgggagctataccccgcgaaccaacattaaactctgtgttatcactataaaacccttctccaaacacagggacatttcctacaatatcactcgttgagttggcagatgtttgatgaatacgtgcccccctatattgagtaatattcaaacctgacaaacgtccttctaaagcaggaagaatggtagttcccatcatcgatgacaatttatccgtataaatagtagaggctgaacctaaaaaatgttttttatcttttccttcataaggaccactaatcagctctttatctttaataaagtgttcatccaacgtcaccctaaacacacgctcagttttttttaatttattcacctttatttccttatgaataaatcccggatgtgacaaacacaatatatcccctttcttcaattggaatttgaaaatgccatcaacacctgttactactttaaaattactatttttcatagttaccgttacatccgaaactggattaccatattgatcgacaaccttaccagtaatatcagcatggttattcttaccctgtgccgacatattcggactcagcattccaagaagcatgcacattgcaagcaacatgaaataaaaccggtcatttttcttaattactatattatacatacaatttactatcatttaatattaataaaaagcataagtactgatatgctattcacaaataagctcactgtaaaatggctcttcttccccttctacctcatcacctcctgctgctattttatcatcagtactagtaatatttattgtaccatccgcatttgtaaatatataatcaattcgtgtaattgtctcacctgcaggaatagcaaaaaaacctgtcggccaaatcgttaaattataaatattagtatagggacgatcatctttaatcatcaatgttttttcgctcttttcatttacagaataaacattaccattatctgtatatgccgtagcttccatataaatagcatcctctttcacaagatcattagaataaatgtcgcctaaaaaggaaaaagtcacataatcatcttgtaatgccgctaatggctctactttattaaaatggaaagagcaaaagtcaattactcccccatctccttctactacttcaaaacactgatcactatcactatactttttatatttttcatcacttgggaaatcgtcttctgcaaaattgataaagaaagcaggtttaaaacgtaaattcttaggtcctgccttacatttcaaagtaatagtgaaatttgcataatcatgatttttaatagagtatattttatctgtacgaaaagctacccattccatatcattcaacacatttgtaccaactccatattctgccatcaataactctgcccaaggcacggttgcattctttggtaccaatttagtgtctactggagacattggtaatgaagtaactccatcttctacaccatcagcaacataagttaccgtcgtattttcacgtgcattccaacttttaggaaccaatatagcaacaagaaatcttcttgttgcatcctcagcagcctcaatgtgaccttttactgtaaaggtggcaacttctcctgctttcacccaataaacaggttcttcttccggatttgtattttgattaatattaatagaatcaagataaacacatccgaccattataatggttatcaataatagaagaactcccaaaccatagtttctatctttctgtttactatttgttttcataaggttatattaaaggttattccattacttgtttaaaagtataaacatatgtattagtatgacatcctggacttaattttatagtcaattgacgttccccattcactgttaaaaatccaatttctgtttctacagtttcatccgctccatcttctctaaaaatgagatgaaacggaaatagcggatcatctacactccatgttccattacctttcacaataaatggtaaataattttttatttcatacgtattatctttatttaatacaatatggaaacgactaaaatccatatattccgtaatatctatcccatttcgggaaacggtaaacaatctccaattaccatctacatgtttaattgtctccgaataactatcgggggttatttcatctctaaacgtgtcgcaagaactgatcatagtcaatgtcagaaatgccccaatcacaaattgcatattcagtctcatatttctattttttattattcgtaataaggattctgaagtaaatcttcactctttacagtttctttataaggaatagggaagaaatacatagcttctctgaaagtatgtttacgcaccggcactttttcacctttttcaatgccattagtacttcttgtgattttatatccatacatctgttgattttgtgtcgtctctgctatcatccaacggcgtacatcaaaaaaacgatgtccttcaaaagctaactcaatacgacgttccaagcgaatagcctcctgcatttcctcataagtcatatttttcttcagcccatacattccatcatcccccggttcaattccagcacgttcccgaagcattttcaatacctcatacggacttacaacatgaccatctaaaacgtcctcatgatctggtccataatattcattagcagcctccgcataatttaataagatttcagcataacgaatcagatcaaatgcctgcgaagttgcaagaaaatgattacctgctaattgacgatggccaaatttacgtatataatatccagtcggtgtacctgttccaaaagcatcggaagtacttcctgctcctacatgagtataaacaatatgattcaaatcaccaccactagttaatttcgatccattccataccactgaattagcaaaacgcggatctcgtccttcatttggtttcaatggattataagaatatttactactaggatcgtttatagatttcccatctttcataggaaattgctcaactaaatcatgataaacataaccgccattaccattccccccacaacttggagctccaaacaacgcttcacgctcattactagaagctacaggtctatattcaaataacatttcacaatacgttccatcaggataagtcactccatttcctgcatcaggaactttatagaagtcattgttgtggaaaattgcataaaatccccaccccggttcaggacttccttttctgtccgtttcatcattacatatatgattagaataaatagcaaaagtattcatcctaatcacatcaagagctgcatcaacagccgttttccaacgttccttattatattccggatggccaatcaattctattgggaaaccagcagattgtccaaatttactgccgttgaataatttactagcttcatacaaacgaacacgtgaaattagtccgttacatgccccagcagtagcacgtcctgtgttgatgcctcgaaacttattaggcaaatcgcgagctgcttgtttacattcactaacaatgtattctacacaatcggcatacgtattacgacttgttttcatttcatcatctacctcatatatattatcaccaattaaaggaactccaccataatgtcgtaataacattgcatagtaccacgcccgtaagaaacgagcttctgctttatactgccgtttgatagactcagttagcggactaccatccacatatttcataaatacattcgcacgacgaatattgacataggcaattttccacacatcgtcctctttggcattcaccggattgatcgtacctgtagcaaacatcacgtcattagtcacatcagtaacaactttgtacgcagcttcatcacatgcagtttgtaaacctccatgttgagtaacccaacccaagaactctgttttgtaacgattaggtttcacatcataacctatatctgtataaatttgcgaaagaaaccttgccgtatacgcactatcagcgaatactgtttcccgatcaagatctgtcgtttccacttgctccaaattggaagtacaagaagaaagcacaaatgtacctgcaacaaacaaatacaaaaaaacaatttttctcatattactagaaattatcaataattttttaatacatatttatatatacgacgattatacatatatataccactaaaagtttttttgattatcgcctcatagtaaaaattcaattatagcaactctttgaaataatgaatctctacatatatctgccataacaacattcttttctatttaacattatttcaccttgcgaattcataatcaacagcctgaatttctacaggtccaagtagacctgaagattgtaatggagaatttgctttccacggattaatagttgtccatgtcggacgttggtcttccaaaagagactgatcaccaattagacgattctgccaattattgacaactgttatttccagtttattctcaccctcctttaaatagcctgtcacattcaaacgatatggataagtccatacaccacctacatagtgtccattcaaagtaactttagccattaccatcacactacccaattcaagatacaaattcttctgcggaagttcttttaatgcaaattctgtttcatacacagcttctcctgagaaatacttaattttattatcatctgcatttgtccaatccttcaaatgagaccaaattaccgctgtctccggtccacgtttacctgcttcaaatgtgatcttccaaggggtatctatcttatagactgttgtcttctgtggaaaattatctttcttttctgttactttattattcttgcgaaaaacaataaaggcactttcatttccttccaattcaatcggtaaagatgtattaccttcttcacttttaaaatccggtaaataacggatctcccctgttacaggattccaatgttccggagagaaatcctgagacacacgaaattccccgttgaaaatcactttctcattatgttgattggacacaaaataaatttccgcatccggtaaagttcgatgtataaacaacactggcatatccttttcacacataaaatcaggacatatattcagcgtatccaacacatcttgtaaaacaagcccccgttggaacactctcccttttccgtaatgaacgttagcaaacaattctgtaccaatatgtgaaacctctttatctacctcaggataccctgacaggctcggagaatattcaggcgcatcaccataaacagccaaaccattacgtaccaattcactaatctttctcagcacttcaggacgcattgatttctgatttggcaataccaataaacgatacctcattccatcaggcaaggttaaataaccatccttaacaacagccctcgttaaaagaacctcggcattaataaaatcaaaagaatatccctttggtaattgagggtctattgaaccagtcattttgggagcatcttcaccgatgaaataggcaacatccgctacataggtaccttgttgcaaaaggaagtttgacctccgcagatagtctgtaaataaatccatctgactaaaccaagtatttttacgatggaaatcatttccaaaccaagcactcacaccgggattacgatcttcatacggttgatgaatatacaaatgaagtaatgaagcattaataccttctgtgaaaaaacgatcaatacgtgctttcatattacccggataatgggtaaaattaggtcctccacttgtacacgattcagcccaaatacgctttttaccgtaaatatgcccacaagaggaagcacaacggttttcaataagccccaaatcaccaaagctccaaaattcaccactaatctcatcagattgaccgccatattgcaagaattctcccggaaatccccaatgcccataattttccaaccaagtggtgagtccatgttgatgacaaatctctctcgatccacctacataatcatatgaaacagcatcagcaatcaaacgacgtaaatcccaaagaaaacgcgaagatatatcctcattaccaacaactttcccatatagagtcggtaaataaggtaacggatcgtacccataaactttcttaaaacgttccagcatatcatccgtccaattttgactacctgtttcataactatcctgtacagctattttcaaactcttccggtcagcctcgggaatacgacggaggatttcacccatatacgcatcaaaatgtgcactaacgtgcttcttactcattttgtctacttcaagtcccgtagcttcaggtgttgcaggtgtatttgtcacaccagtcgttttcatttccaaacaagaaataatccaatctccttcaggcacattccaagtcaacattccatctggtgacagaaaggatgttaaatccgtcactttatcttctggtatcacaaatccctccgaatcattataccaatcttggttaggccacatatatgaatcccattttggatcaggacgctgatacatttttgccaaagattgttcaggataccgttctaccactttggcggaagaaagagagacaatgccctcaatgtttccataagaattaatcggtttatccaacaacaaacgaaaatctgcagattgcgttgctggaagagaaataacaaccggagcatttgtaaaaaagccaacagaacgcattccattggtacggtctatatcaaatttccggatcgtttgataagtattaccgactttagcttgtagttccgctttcgtccatacataattgtttgttgcaaaggcaaaactacgaatagtctgtgtttcaccaatatgcatatcaaaagtaacaggctcataccctttctgctgtactctccattcttttttaaacacatcactttgtgtaggataagctattacacgaaccaattgcatagaatccgaatattcaggtattgcatatgaaagtgtttgcggaccttttacctccatatcagtagcggctagataacgcatactctgttctggcttcacccatggtcctcccgactgactccatcccggactattgaacatgcctatttctatatccaattctgttgcagttttcagtgctgcgtgtacagcatcccaccaatctggggtaaaaatcttcacatctccataagcatttcctcctatatcaatatttccgatataagcacgagtaatccctgcctttttcatggcatgcaaatccttcaccactccttcttttgaaatattatctgaaatccaataccaataacatcctactcggatactatccggaatttctcgaaaacctttctctatagctattatagaaggaggatcttttctattcgagcatcctgataacaaacaaatcataacactcgttactattgctaaaatatttttcatgatattaaaatgttcactttcgtccaacgatatttccaacaaatcctccgacccaatgataaaaagaaaataaacaggccggaggattattatggaaaatcaacccccaatcctaatttttcacctatatctattatcctattgaaacttacactaagaacgcttaagaagcgtaaaaccactaaaagaaaacaaaaataatcacataggaagaagaaaggcaagctttgattattatataaacaaaagttgtaattatagactataaataatcccaaagaagtttggtaacaggagattggatatttatctctaatgaaacaaaacttatttatatacaattttagcagtgactaatataacaagcaaacagtttctacctcctcccgacattatctttgcattctcatcaaagtaagtttcggcatgaaaataaataatagaaaatttgaattttataatggaagggaagatctagaaattttccccaaatataagttttttacagtttcttcagagcaaaaacgaaattataatctccagcttctacgacaacagtttgctttttaacacttactttctttttattcattttacatgagacagcattatcgggaatacaaactgtagcagttgttccaacaggaactattaatcgaagattcaactggtcatctttcaaattccaattaacggcaatcgtaccataaggtgactctttggtcactttcgaccaagtcactccatttggaatttggggatcaacatagaaatgacgataccccggttcagtttcatcaagacgtattcctcctactgcttgatagaaccaagtaccgataccattataacagttgtgtacacgacttctttctccactccagtattcccaagtagccgttgcaccatggtcaatcatatacaaataccccggataatcacgttttttcaacatttgatagaaaaaatccacttttttattctgaacagcccattctgtcaagataggaactcccaccaaaccaactgcaatatgccctttatgattttcctcggtgatggctatcatgttatctttcactttattatataaagaatctggaacaacacctaccaacataggataacacatatccaattgcgaaccagtagaataaataccttcatccgcacgatagaaagtctggtgaatcagtttgttaagttcttccctacgtacagcaaattcctccgcttcttcttttttacccaatttcaaagcagtattatacatagtacccaaacattcactgataaaacagttacttaccaaatctacagaagctagattgcctgcatctacccccatcggtgccaaccagtcaccaagataccaatcacggtatttcgtatcaggccaacgtttcaataaaccatccaccgtatatttatcaacatatttaaaccactctttcatttgagaataatatttctcaatcagtcgagaatcattgtagttaacatacgttctccaaggagcccggacaaaaaatccacaccaatatggaccaccgccaccagcaccgggattaggaccgacgtgcggcaaacttcctccttcacgcatagagtctccccatgtctgtatccagttttcgaacgttggagctacatcatacatagtttgcaaagacatagtagacgaatttccgtcaccaccgtatcctgcacgttccaaatgcggacagtctaccatatagccgctgaaagtcaagcatttcattgtatactgaatcatattatgaatcgcattcaaatcggcatccgaacattcaaaagtagcagcctgcttgtaatctccatgaatctgcaaggatttcatccattcagtttctggcttttgcggaagattagagatacgcacatatcgaaaagcgtgatggttgaatttatttctgaaatattccccttttgtaccaccggatacataaatatcactttcaccctgtttgtcaaactcgccatctttcgttagattatcactatattccatagtaatctcatgacctgaaggcaatataggcatctgcatctcaaaccatccagtttggatctttcccatatctaccagccacattccttcacctaacttcttcacggaaacagcctgtagtatctgatgaattttattcacctcacacatttgaggtgaagcaatatgatcaggaactttcactatcaccacaggtgtccatttcatcttatccaaagtctcagatgaaagatctcgaggaagaatcctgccatctaccctctcaccaccaaactgcaatgctcgccaagtgcctgtatccgaataaccactttcacgcccgctccatgagcggtctgttttagccacgacttcccatcgaccgtttttcaaaacatctaattctgctttcaccaacggcccctcataggcagctccaaaagttgtcgtcttataccatccttgtcccaaccaaattaacaaatcattttccccttctttcaaataagaagtaatatcataggtaacaatcaacgaacgtttagtcaaatgtgacactgcaggcgtaagtacatcttcacctacctttcttccattgacataaatttcgtggtatcccaatgtatttacatgcaagaaagtagtttctcctcgggtcagtctcacttttttacgaagaattggagcacaaattttaccacctttgacagaagatcctatataatcaccctgcatctgcaacttatccaaaatgccaactccaaaacgagcgacaggactccatgatgacacttgttttttagagtcccaaacacgtactcgccaataacacaaagaacgagaggttaatgttttcccttgataaggaaccattacagaagcgtcagatttcaattttccggtattccataaatcagctttatcctgcaccaatagaatactgtccgaagccacttgaatttcataataaatttgtctacctttccaaccatccccttttaatttccaactgaaatgaggagctacattatcaatccccaaaggatcaaccaaattttcacactttaattccgccaaataaaaagacggcgtttttttatttccatatactatcactgacagacaacagaaacaacaaactaaacacaacaatcgtttcatactattcatatttcatttttatggcttatttaaaaatgacaaagttgtatgagcccgatgaaacttccatccggaacggattaactttatctattataatattactgatttcacttacaggttttcccgattccatcaccactccactcccccaatcaggaatcgttaccgtagccgatgtatttgcaggtatctcaacttgaagattcagatttccgttctcatctatcttccaactcgaacgaattttaccatacaaactatcatacgtagctttacaatatttcaaactagttattattaccggttcaacataaaaatgtttcattcccggattcgacaaatcgggttttatgccagctaatgaattataaaaccatgctactacactgccaaacatcggatgacagtagccacaaccttcatcatttccatcaccattccacgtttcccaaagcgtattattttttttatcagccaaatatccataactgggaaaatcacgttgattcataaccctataagcgagatcagctctaccattctctgtcagcactttcagtaaaagcggagtagcaagtatacccgtatcaaaatgatagttaattttctccaaatgttccaacaaagcagcaaacactttcttacgatcactttccggtacaagtccaaatgctaatgcaaatacatcagcaccctgcttgccttcccaataatgatgagtcacttcattgtaaaatgcaatattgaaatttctcttaattgtccgagcaagtatacgaagctcattctcatcatctttcttattcaaaatattcgctatattcgccataatgcaagtgacatgataaaaatatgccgtgtttaccaaggaggccggaatctcaatcacgttatggggagtagaccattcacccaaacaccagccgtttggttcctcccgcactactattcctttatcatcagttcgtgtattaagatattcaacccaatatttcataccacaataatgttcctctaaaagtgtggtatcaccataatgacagaaataattccatggaataatcacatatgccgatccccatgcaggtccgccacctccacccccaaaaggtgcagtatgcggcacatatcctgtattcttatttcttgcgtcactaatgtcgctaataaactttttaagaaaacaggtcatatcatatgaataaagtaagctttctgtaataatttggccatcaccagtataggccaatcgttcacgatgcggatcactacttatgatacccttaaaattagcctgcatcgtgcggttataagctcgacaaatattattaaagagctggttagaacattcgaaactccccgtattcctaatatccgtataaatagacttcacccgtatactttgttttgagatttcaacaccttgggttgcaattacctcaactttcttaaaagcatgccaagtaaatttaggctcccatttctcttcctgtccacctcgtagtatatacatgtcttcttgaccataactcaacccctcatcactaataaaacgtagtttcacagtatctccagcctggcctttcactgtgagttcacaccagcctgaaacagtttcaggtaaagtaaaaacaaataaagaatcatttacctgttcaaaatgggtatccaccgttcccattactttggtaaatggaattgtttgtacccttaacatgcccgtggggggacgaacagacagaaccgatttccaagccgaatcatcataaccaactctattccatgaacctaactcaagacgagcatcataaatctcacctgtaaatatggcatcatgcaaaataggacccgtaattgttttccatgactgatcagagataatcgtttctttacttccatctttatattcaatctctaactgcaacagcattttgggaacatcataccacatatagccttccacaacacgatcacgctgattataccaaccgttgcctagcacaaccccgattacattattctgctttttcaatttagaagtaacatcaaatacattgtaaagcactcgttgtgtagactggtcatcgtaatgatacagaagtttcttcaatgacctcctatcataatttgtaacggcaggagccaatacctgttccccaattttatctccgttaaaatacatctcataaaaccctaatccgcaaacatataccattgctttctctatggctttcttaatagtaaactcctttcgaaaatagggtgccgaaaaggtaagtgtcgaatccggatacgtatcctctatctgtcctatccattttgctttccagtcagaagatttcaacaatcccatagtccaactcgacacgtcactccatttcgtaggattaccattctcatcccaagtcatcactttccaatacagctgcatttgagatgataacattttcccctgataactaatagcagattctgaagaactgactttaccggaatcccaataatctcccttctctttgtttaacaattccaaattgctagatacaataacacgataggccgattgtttctttcctctttgattcgacaccaactgccattgaagaatcggatgcagactttcaataacagccgaagtctccatattgtcacaacgtaaattcactatgctaatatcatttcttccataagtaaaagaagaaaacattatcaataacaaaagatttccaattaatctattcattttgtattctctaaagagttcttactacctacgaattaggatattgctattcaatttttgtcaacctcactttttgggtaaccggtctattgattttataaatggtttctacaatcttctttatataatccccccaaacctcacgtatttctgggtgcatcgctttgatataccaatcataacttgctttaagaaatatgtctttaggcaggtattcttttagtttatcgacagcttgctgattatcagcaaacaataatccttcttttttcaagaaagaacactctgtccacaaatattctctgaaacgtttctctacttcaaaccgttcttcgttcagatacataattttcgcagcttgttgatactggggagtatttggataaattgccaaattcaccccatcagctaactccttagatgaaagattgtcaataaacagatctcctatagtcaatcggtacatgccttcttccaaatcagtcacctgtaaacgctcctgattaaattcttccataaacggaaccagttgcattgcatcacgttgtgaccttttatttccccaaccatgtctcgggacagaatccaatggataaggaagagcatttgccagatagtcaaaagtcaaatcagtaccattctttttcaatttggatattttacaattcttactggttacaacagctgaattacacgcatcaatagaaacggacgacacttcatttcctgccaatccttgtgctttcagaaacaaataagccataaccatctgtccgtcattatccggatggattcgatcaactctacagaaagtaaacgtagagtctttctcttgttccctttcgctaatttcccgcatcggtaaattaaaatctacgaatccccaaccattctttcttgccgatgcacgttgagcatctataattttcagaatgacattattctttccatgcagaataaaattgttaaatctggaagtttcgtcataaggagaacctccgatcaacaccttagttactttatttttagccaataatcgttgttctatttcctgataactttccaatgactttgcaacttgtcgttccgaaagctctttggcattatctttcatataaatatcataaccagtatcgttcatgccaaaagtaagggctacataagtcggttttctgttaaagacatcataatccagacgatctttgatatcccacgcactctccccgccaatccccgcattcataatcgtaaccggcttgtcaggaaaacgagtcatataatacaaccagacaaatgaatgataatgtccagcatgagtaatgctatttccaacaaatacaacacgctctcctttttcaaaccgtggaattgacatctgtgcctgtaaagaactgcaactcacataaatcaaagataacaacaagaataccttcatacttcttttattatccatttatctattattcttttaagtgattactctacaattccagtaatcaatccattatatccaattcacttttctctgcttttccatactgttttaccagtacactcactccgccttttagtaattcaggtgctgcctctacactgataactttttcttcattcggcatcaacgttacataattatcagacatgataacaggaagtacacgcttttgcgtgactttattaaccaatcttacccgattggcaaaagcaacagttttagaattgttctttacagatatctgcatttttccatccttcgatttgttcactaaccaacaagacaaatcagcttccggaagcgtattcagctgagtataatcaagatctctcacaccattccgccaatagaagttttcggaaagcaaattaccgtcagcatcagtcaattccagtttaatgaaatgaagtggagttaattcttctattccttctggcttctcaccataaatttcaaactcaaataacgagtagccaaactgtgtggcacggctaataccctctaattttacataacgagctgttacagattccaaatctattttctctataccgccttttccatccttattgtcataaacagtcttccacttttttgcgtcatttgatacctgcaaagtgtatttcttggcacaagctgtttcccattttaaaatgatattctctattttttcttccttaccaagatcaacatatatccattgaggatcattatattcactttcccaacgacttccagcaccaccatcagttactagtgaagcctttttagaatcactggtaaaagaagaagccactacctcttttccaaaagctaaattaaaaggattaaaattcaaagtaaaggcttctgtaatattactggctgctacatctacctgcttagtctgtccatacgcggcaatctctttcccattcaaatcataaatcgtagccttgactatcgcgcctttcaaatctttggctgtcgtatttatcgcttttatgctgttattagaagcattccattgaatatgcagaggctcacaagcctttttcgctccccaataagcccccgtaggatcgtaatagtaatcgtaagtctgccacacaaacgaaggataagcaggatgactcatccaaatcaggagtccggcagcatcgttccacattttatcattccaagcctcatacatccctttcatgacttcaatattcaacatttgagctttctcacagaattcttccaatccggatgattctccatactgcatattgaccgaattcttgtaattaacagggtttgcattagacgcttccttaccaaagaaatgcttattccatacattatcgtcatcattcttcaactgctcatcagtgggtagaggccaccaatctttctccggaataaactctttgacactttcgaaagtaggaaaagtagctgtacctatttccgtacgcattccataaccgtgatcaattccgtacggataagccggtgtattaaatgctaaattactacctgatgtttcaaaatgatgtctcggaggttggttaccccaccaaccactaccagacaatccatcttgattggaacaagacttatacatacgatcattatgatcttccttagcaatcatctcacgcagataattatccaaatccggtgccggatgcgtttcatttgctccacaccaaatagcgatagacggatggttcctcaggcgtctgactttgtcaagagcattcgccttgaatgcctccggttgtgccacatcattatatgccacgtacaaccaaaaatcattccataccataatcccatatttatcgcaataatcataaaaatcatcatcagtaacacaacctgtccacaaacgaatcatgttgtaattcatttctttatgcaacctgattttcgtctcatactcctttccttggcaacgaagcaaatattcgctcattccccagtttcctcctttcaaataaatcttttgtccgttgatgaagaatgtcaaaacaggataaccaactacattatcaaccatcttatactcatacttcttaataccgaatgtcaaatctttcacatccgatacctccccgtcaacagaacaagtcagtttgcatgtataaagattaggatcgccataaccattcggccaccaaagtttcggttgatcaataaccaattgtgcaatatcatccttggtgatagataattctgtcgttgctccgccttctacccgaacttccttggaaaaagagatgtttcccggctgaatcactccggaaacaacaacttttttaggagaggaagaggcatttctgacatttgttgaaatagaaagttcagccttctgcaaagtaggtaattctgaacgtacccaaggatcttccatcactacatccccggtaaccataagataagtattacctgtgataccggctaaacgtccaggtacataaggcatccaatcccatccggcaccagccaaataactgggactacaagcaacaccataaggatctttcgctttacgtgtcttcttctgatcgggatcaattatcaaaacagcaatcgcgctcttaccggactttttaaccaaatgagttacatcaaattttgaacgcaacatatgaccacttacatccttagtagatgttttcgttcctgatatcttctctccattaaaatagaaatcagcaaaacgattcgtattatcgaaatggagccatacacgtttcccctcagaataggaatccggaagttcaaactctgtacgataccagaacggacggttataaaatgtttcgtccactttataaatattatcagcataattaggatcaggcactattcccgcttcaacataagctgtaaaaactgttcccggaactactccttttacatattccgacatttcaaatcccggagtagatatctgttctccagttacattctctaaatcagcttgtggtttcacctcccaaacaatccggggttcagaactattcaatgacattttcgtaacctgttccgtacagcctgtctgcactaaaacaaacacaatagatacgatatagtaaattattttattcatcatattagcaaaatattaaagttactttctatcaaaaacgaaagaaaattttcccttcagataccccattctttattaggcgtatcacccataaacagttccaatgtgcctccagatactatatctgtaaaatctaaataacatttattatactccttaccattcaataaagctttctgtatataaacattatcaacgctgttatcatgagctatcaccgtaaacttctttcctgaataataagcaggatctaaagcaaattccaccttatcaaataccggacttgtaatctccatacgtgtattacccgggcaagaaggatgaataccggaagccgccaacacataccatgccgacatctgacctacatcttcattaccaacaataccttctactttattagcatacgctttttcacaagtataacgtgtccacttctgggtatgccaaggtacagcaagctgattaaaaaggaaaggtacaaaatgaaccggttcgttagcatggttgtagtattcattccacaacatattggaaggagtcttgctgaaaaaataaatcagatcctcaataactttctctttaccgcccatcaattccaccattcccgaaacatcgtgaggcacgaaccaaccttgttgataagaatttgcttctatgcagccataccattctttaagacgtgcattctcaggccatgctacccatgagccatctgctttacgaggacggaaccaacctttctctttatcaaaaatattatgatatgcctgacctttttcataaaaatatctggcatcctcgttttttcccatagcttgtgccacttgagatatacaccagtcagtatatgcatattccaaagttgtcgaaatacttaatggttccggtatataacctaatgaatcattaccaaaatgtcgtgaagtattaacggcatatcgataagctttctctacatcatatgtacgaattccttttacataagcatccgccaaaacagacaatgcaggatttcccaacatacaaccggaataagaatttagaaattcccaacgttcgtaatattcacgtccactctgctctgccattgaaatcaatgaattcaattcatcgctcaccagacatgggttaattatagtctgcaaaggaaactggctgcgaaatacatcccatccactaaaaattgtacgctttgtaaaagcactgtccgttgtatgtattttataatcacctcctacataacgaccatccacatcagtataaatacgaggatcaatcattgtatgatacatagcagtataaaaaatagttttttcatcttccgtaccaccagatatccgaatacgactaagttctttattccacaaatccgtagcttccttctttacctgctctaaatctttagaagctatttcctgtttgaaattattagcagctccttccatatcaacgaaagagatacccactttcatctctacagtctccccttcttttgtaggaaactctgtaaaaaagcccaaatgcttaccttccaattctttcttatctttgatgaccggagcttgtgaaacacgagtcaaataaggaatactaaccacttcatcacgtttccgaacccaaccttcaggaatatccgcactccagaaaccataatctgccaaaggtttactgaattgagcataataatagacagtataatcggcttttccttcaccattcccccatccaccaccatcaggtgtacacttcatccaaccttgaatggtatgttcatctacaaccttaatatattgggaagtagatgttcctcccactctacgcgctaaatcaatctgaatacgagaccgcttattagaaggataagtaaaacgtaaaattccacaatgcggcgttgcgctactttccacttttatacggtaatcagtcaactcaaccgaataatatcctgccttggctgtctcagtcactttgttataaactgaacgatatccctttatactatcattattttctttccctgctactttatataattcacctgttgtaggcattaccaagaaatttcctaaatcgccgaaccagcccacaccactcatctgtgtaaaggcaaagccttcaatcgtattatgttcatcactatatcctgaaccattatctcctcctgtgatggtatttggactaacttgtaccataccataaggagtggtagctcccggaaaagttttacctaatccatgatatacacccgcagcccctacactggtactggcgccaataaacggatttacataatcagtcgggatcaaatcttccgatactgtactggtggacgaacatcccgtcatccagcataaaaagcaaacaaataaaagattagcagtcgctttatacataacaatataataaatttaaatcaaactcagaacgaaagttctaacaccgaaacgaggcatcgagatcatcatatccgattttcccgcacgtgtttttatattctttttttcgacacattttccatttaaatccacctcttccacaccggacaatggcatgtcaaaagtaaccttctgtaatttcccgttcccttccgaattaaacaggcgtaatacgatctttccatttttcagataaacagcacttacctgataaccggtattttgtaaattaataaacgactttgattccggttttgccaccgaataacaagaagataataaaggttcattccaacaatcactgctgtttgctactgatgccttatcccatttaccccgatgaggcataatcgcatatttcatttttaaaggaccggtaattttataatcaggtccccaaagtcccccacccgaatattgagctgtcagcccgagcggaaagtcttctccataggaataagaagttgtatgatcagaaaataaagccaatgcataatcgcctttctgttcagctaaatcgacccaattgagtataatattatgtttgatttgatcccaagaattgaaaaaagtattatcgagtgtactttcacacacatcgaatggtgcattcttataaatacgaggagaacgaagatcggccggaaacaatacattcaatttaaaacgatcatcacaaaaagctctgcgattaccactccaatgattttctttatactcaccaatacctacattcttcttccaatcaaccgtcaattcaaaatcaatccgtttcaccccctttgaaagggttattaactgtgtaaatgggtgagcagcaatctctccctctatctttacttttttctcatatatgttatccctcaatatagtcaatctggctggagcttctgttgaggaacggaacttaccctcttcataaaagaaacctctcaactctcctaaaaaatactcacctgttttacgtgcaaattctttattcccctcttttttagcaatcaggcttttgataactcctcccttcgataagtcaaaaacaaccttatacatgtcattctcaatcacgtattcctgctcattaaccttcttactttctgaaaccttttcgcttcctgcaacgatctttttacctacttctttcttttttatacaatacgtggagtatccgaagggaggaatctctgcttcaaaaaacaatcttttcttttctccttcactttctacaaaacaagctatctctttacctttccaatcacaaataacaaaatctgaattctcagactctaaagaaagaagaacactcaccggttctttcctttccactcctaaagtgttaaaaagacgtacccattgctggttaatgtcaccttgctgcgagcctgacaaatcatcaaagttttgtatggacgtttctataattctatcagaaattcgattcgtatcatccgtccatcgtttaatctgatcagcccatgtaccttgtctattcaatccgttatagggcacaatccaagaatcatgatgctgtgccatcattaaagtacgccatgcctcatccatatctgccttcaaacaagtatacccattcttcagatgagccataacagacattttctctgccatgataatcctgttttcagaagtacgaacttcctgcgctatcctctgtaatacttggctaccccacatcaggtttacgtgtatatcttcctgtgagaaatgccaatcatcatcagtttttccgatggagatattctctatataatccctccatcttatatatatagaattattttttgtgttctttccacttccgatccacggaccgtttttccatccggcatcctgaaaacacatgccgaccgggtgcttgatctccgcttcacgacaagccgtcaaatatgcttccgaattcccccaagcagttgtctgccacgttgagttcttttccagtcgttcacaagcataacgaggaaccgtcaaaatagaagtcccgtctgtccctatccaattaaccagttcgccgccatacgcagcagtataccctccccaacaagtattagggcactttaagacagcatatttaaaaccgaattgtttaagaatctgtggtaaacaactcgtaaaacaaggctcttctacagaataagtaacaaaatcaacttccggaaaatgtgcattggtcttggttataccatattgaaactgccgaatgatgctctctcctgaaatattatagcaataaggttgtgcataagtaggattcgtaaattctacttgccgacttgccacgagctttttaaattgttgataagcttcaggagtttgtacataaacagtatcccaggtttccggttctatctccaaacaaatccgccaatccggatgcatagatagctggtctactataaattgagttttccacttcaccgggtaatgcccatatattccaccatgatacccatcaacaaaataagcttgttgtgcacgaacattactataaaagaaaactgctaataatatgatataaaattgattcatggtattccaaaaatagttatctttcgcgctgttccatcttgcgcataaattcatccaatttttgctgtatcacttcctcattgtctttattcccagggaatgtccagtcaatgattaccaaaagactttgattatcaacaaaattctctttcaaagctttatccttatccacctccatcaaaaagctttccttctcatcagaagtaagttcaccagcaaaatatttatttaaagactccttcattcttcgttccttttttatcaaaggacgattatatcaataaatacccctaaaaagcatctacaaattagttaaacgtttatgcagccaaacgcatattcaacattacacgcaactttttaagcgctattcccatctgacattccactgtattaaccgaaatccccaaccgctcggaaatttcccggtatttcagcccctccatacgactcaacaaaaatatagcacgacactttttaggcaaactattaattgcttcccggactagcttttccatttcatttccctcatagatatccaatacatcaaagcgatccaaagattgcattttcaaattcaattcgacttcgaaagaagcttgtacattctcagcgtatttctgttcgaacactttatgctttagatgatccagacatctatttcttactagcctaaaaagataagcatttatattctcaatatgatccatagactctcttttttcccaaagatctgcaaaaacatcttgtgttatgttttcagcatcctcttccgacatcacaaattcttttgcaaaccgaactagtttgggataataaataagatacaattctgaaaaactcatagttgtgtgtttctttaaattagtattcagttatcaaaaatcttgtgatgcaaatatagagatgaaaaaagcctacttcttagtggaagtaggcgggaaagtaaacgttttacagtttaattattatatacacatttaataatcagcattttacaataatactattttttagttttggtaaactgaatagaatcatttttgagacaaagaaccaagtttttttacctcttcttcaaagatattactatcaagagcggacattctcttcactttactcttataattataaattgtctgcacagaataatgcaaaaatacagcgatctgtccaacatcggtaattcctaatcgaatcaatgcaaatatgcgtaattctgtattcagttgatctttttccagtttatagcgttcctctgatttcaacaaagcattgaactcttccacaaagttaggatacaatttaaggaacgctttatcaaagttctgataaagcccttcaagttctttttcaaaaggacgggaggatgatttatataaatcatcaatctgtcctgttttgattttcctgtttacattctttctgtactcattgagtttattaatataaacggcacattgattcataaaataccccacatacttttctttaatcaaattagcttcgtcgagatttttattcagcccgaccaattcctcattcatagctttaagatgccgtttagcctgggatacaattttggtttgtttatatgtaaaatacagggtaatagcaagagctaccacaaacaagctagtcagaaatatataaaaacgaaggttctgtttttgtttttccaaccggatcaagtacgtattttcaataattggatggatgcgggcaataaccgtattcttaaaacgggagttataaaagatggcatcatccaacgctacttttatataattataagccctgtctatatctcctttatgatataaatgaactgccaatgtcaataatgcctcattctctttaactgccaattttgtatctgtcatagcagccaacattagaaacttttcttccagtgcataattcccaatcaaccgataagccttggcaagtcccatagccatcatagcatagccatgagatgccggctcttgtttatcatatatctctgtcaaaatcagaagagcctctttggtacttcccttatcttgaagcttcacagctttttcttttctatattcatccgactggtcaaataagatgctcatcacagtatcccgataagcttctttttccgatacatactcgtttgaaaatcgtacatcgtccgtgtatttaatgagattttcataataacgtatacgattccagcaatacaaagcttttaaatgatcgggtaaatcagcacattctatcgacttaaaaatatcatttgcttgaataaacaaaccggataaagaatagacaaaagccaaccggagctgcccttccaaaagatattctttattaccgatcgtttttgctatatcaatattctcatgaatatattgttctgccgagtcacagacaaaggtttcatattgatggataatctctttatttaaattatatgtatcttccaaagaattaaggccgaccttctttttctttaattcttttatggtagcttcttttttccgggtgtatatcaaacgttcagaaatcactttatccaacaccttcaacaaagaatcattctcactatctgcatagaggtaaaacaaggagtttagaaggaaaaatataaaccaaagtgtgcgtttcataatcatgtattctttcttaatctgcaaaaaaatgtattttctttgtgttattcgccaaaaagagcgtaaatcattctttttattgcatcttttaacaaatgaggatggagaaattatcccattctaaatgatatttgtgaaaccatgctgactaaaaaatgaatctaaaagatatggagttaaaaaaagcttttttgccatacggactttgcaaaaagtataaatattagttctatatttgcagccgttaaaagagaaagatgaaacaaaacttaaaattcggactacttttagtgttggctttgctcatccattgcgcaactaacagagcaatggaagatatgtgcaaagtttcctccccgacttatcggcaggagaaatgctatgtatcacaagatcgtccgattcaggatgctttggaacgtctttataatctttatacgactcaaacctgtgatatgagtcatacagatgtcgcacatgttccgacagataaaagcatgtttttgttaatcgcttatttctgtgaccattacaaacatcaaagtccaccttaccctgtctcatcccattctcctacatattattacgatcctatctcctattatatatatgggttgagaaagattgtcatttagcctacagtacagtagactcttttgctcgtcatttatattacagttggttttattctccatagggcgaatagactagttgcttattcctatataatattcaatctaaacagctattgaattatgaattttacatttttagttgttgttttactgacagcgcttgcttttgtcggtgtggtgatagctctttcacgcgctatctctccccgttcgtacaacgcacaaaaattcgaggcttacgaatgtggcatcccgacacgtggtaaatcatggatgcagttccgtgtgggctattacctgtttgccatcctgttcctgatgttcgacgttgaaacagcttttctgtttccatgggcagtggtcatgcaagatttaggcccgcagggacttgttagtattctcttcttctttattatcttagttctgggccttgcgtatgcctggaggaaaggagctttggaatggaaataaccaaaaagcccaaaataaaatcaattccttatgaggagttcattgacaatgaatcattggaaaagttggtcaaagagctcaatgccggaggggcaaacatcgctctcggagttcttgacgacttcatcaactggggacgcagcaattcactgtggccgcttacttttgcaaccagttgttgcggtatcgaatttatggcactgggtgccgcccgttatgatatggcccgcttcgggtttgaagtagcccgtgccagtccgcgtcaggctgatatgattatggtatgtggaacaatcactaataagatggctccagtattgaaacgactgtacgatcaaatgcccgatccgaagtatgtaattgctgtaggcggatgtgctgttagcggaggtcctttcaagaaatcctatcatgtggtgaatggagtagacaagattctcccggtcgatgtatacattcccggatgcccgccacgtcccgaagctttctattatggcatgatgcaattgcaacgcaaagtgaaaatagaacgattctttggtggagtgaacagaaaagagaagaagccggactatttaaataatgaagaataaggtattaaaaaggatttatgcaagaaatacaatttatagcccctgcagcattacacgacgagatgttgcgcttgcgaaatgagaagcagatggactttctcgaaagccttaccggtatggactggggagtggcagatgagaaagacgctccggagaagctccgtggattaggcgtagtctatcatttggaatctaccgttacgggcgaacggatagcactgaaaactgcgacaacaaaccgcgaacaaccggaaatcccgtctgtcagcgatatatggaaaatagccgacttctatgaacgggaagttttcgattactatggtatcacctttataggtcatcccgatatgcgccgtctttacctgcgcaatgactgggtaggtcatccgatgcgcaaagacaatgatccagaaaaagacaacccgctctgcatgaccaatgaggagacgttcgatacaactcaagaaatcgagctgaaccctgacggaacaattaaaaacaaagaaaccagacttttcggggaagaagaatatgtggtcaacatcggtccgcagcaccctgctacacatggtgttatgcgtttccgtgtttcactagaaggtgagatcatccgtaagattgacgccaactgcggttatatccatcggggtatcgaaaagatgaatgaaagcctcacttatccgcaaacattggccttgacagaccgtcttgactatctgggtgcgcatcagaatcgtcacgcattatgtatgtgtattgagaaagcgatggggatcgaagtaagtgaacgtgtgcaatatatccgcacgatcatggacgaattgcaacgtattgattctcacttgttattctactcctgtctggctatggacttaggagccttgacagcttttttctatggattccgcgaccgcgaaaagatccttgatatctttgaagagacttgtggcggacgtttgattatgaactataatacgattggcggtgtacaggctgaccttcatcctaacttcgtcaaacgagtaaaagagttcattccttatttaagaggagttatccacgaataccacgatatatttacaggcaatatcattgcacaaagccgtatgaaaggtgtcggtatattgagtcgtgaagatgcgatttcttttggttgtacgggaggtacgggccgcgcttcaggatgggcctgcgatgtacgcaaacgaatgccatacggtgtatatgacaaagtggatttcaaggaaatcatttatacggaaggcgactgttttgcccgttatctggtacgtatggacgaaatcatggaaagcctgaatatcatcgagcaattgatagacaatattcccgaaggaccctatcaggaaaagatgaaacccatcatccgcgttcccgaaggaagttattatgccgccgtggaaggaagtcgcggtgagttcggtgtattcctcgaaagccagggtgacaaaaccccttatcgtctccactaccgttctaccggtttgccgcttgttgcagcgatagacacgatttgtcggggagccaagatagccgatttgatcgctattggcggaacaatagactacgtagttccggatatagaccggtaatcactaaccactaaaacactaaaaaatgttcgactttagtatagttacaaactggatacatgagctactcctctccgtcatgccggaaggattggccatctttatagaatgtgtggctgtcggtgtgtgccttgttgcattgtacgccatcctcgccatcatcctaatctacatggaacgtaaggtttgcggtttcttccaatgccgtctcggtccgaaccgtgtcggtaaatggggttctatccaagtggtatgcgacgtgctgaaaatgctgacaaaggaaatcttcatgccaaaaggcgccgatcatttcctctacaaccttgctccatttatggtaattatcgcttcattcctcactttcgcctgcattcctttcaacaagggagcggcaattctgaatttcaatgtaggtgtattctttctactggctgcttccagtatcggtgtggtcggtattttgctcgccggatggggtagtaacaataagttctctctgattggcgccatgcgaagcggagcgcaaattatcagttatgaactttccgtcggcatgagtatcatgacgatggtagtactgatgggaaccatgcaattctctgagattgtggaaggacaagccaacggatggtttatcttcaaaggacatattcctgccgtgattgcctttatcatctacctgattgccggaaacgctgaatgtaaccgtggtccgttcgaccttcccgaagcggaaagtgagctgacagccggataccacaccgaatattccggtatgggtttcggtttcttctacttggcggaatacctgaatctgtttatcgtagccagcgttgccgccactatctttttaggaggatggatgccgttgcacattgtcgggctggatggattcaatgccgtgatggattacattcccggtttcatctggttcttcggtaaggcattctttgtagtattcctgctgatgtggatcaaatggactttcccacgtttgcgtatcgaccagattctgaatctggaatggaaatatctggttcctatctctatggtaaacctattattaatggcatgttgcgtagccttcggcctccacttttgattagattatggaatataaagataaaaaatatacgtatttaggtggtctggtgcatggcatcagtacactggcaacgggtatgaaaaccagtatcaaggtgtacttccgcaagaaagtgaccgagcaatatcccgagaaccgtaaggaactgaaaatgtttgaccggtttcgcggaacactgaacatgccccacaatgagaataatgaacatcgctgcgtagcttgtggattgtgccagatggcttgtccgaatgacactatcaaagtgaccggtgaaacaatcgaaacggaagacggcaaaaagaagaaaatcctggcaaaatacgaatatgacttaggatcttgcatcttctgccaactttgtgtgaatgcgtgtccgcatgacgccatcacattcgaccagaacttcgaacacgcagtattcgaccggacgaagctcgtcttgcaactgaaccgtcccggcagtaaagtaatagaaaagaaaaaagaagtatagatatgggatcaacacttgaaacagtagtattctactttttggcagcatttattattgctatgtccatcatgacggtgactacccaacgcattgtccgctcggctacttacctgctcttcgtgcttttcggcacagcgggtatctacttcttgctgggctacacctttctgggctctgtccagattatggtttacgccggtggtatcgttgtgctttatgtattctccatcctgctgaccagtggagaaggtgaccgtgccgaaaggctgaaacgaagcaggtttctggcaggactctttacaatgattgccggtctggcgataatcctgtttatcacgctgaagcataacttcatgcagacagccaatcttgccccgcaggagataaacatccatacgatcggaaacgctttgttgagtagcgacaagtacggttatgtactgcctttcgaagcagtcagtatcttattgctggcctgtatcatcggtggaatcatgatcgcccgcaaacgttaatcattaatcactaaaaaacgaatcactgatatgatacacatggaatattatctggtggtctctaccatcatgatgtttgcaggaatctatggattctttacccgccgcaatacgctggctatcctgatttccgtagagttgatgctaaacgctacagatatcaactttgccgtgttcaaccgttttatctttccgggaggaatggagggctatttctttgcattgttttccatcgccatctcggctgcggaaaccgcaatagccatcgcgattatgattaacatttaccgtaacctccgaagcatccaggtacgcaatctggacgacttgaaatggtaagtataagtaataataactcaagtaattaaaataaactgtatggaactaacaattctaatactccttcttccttttttctcctttctcctattgggaatcgggggaaaatggatgtcacaccggacggcaggcgccatcggtacgttggtactgggagcggtagcagtactgtcttacgtgactgctttccaatatttctcagccccgcgactggaagacggaacatttgccacattgataccttataattttacgtggctaccttttacagagacgttacatttcgatttgggcattctgctcgatcctatatccgtaatgatgctgattgtcatctctaccgtgtcgctaatggtacacatctattccttcggttacatgaaaggcgagatcggttttcaacgttattacgctttcctttccctgttcaccatgtcaatgctgggattggtagtagctacaaacattttccagatgtatcttttctgggagttagtgggcgtaagctcttatctattaatcggattctactatacaaaacctgctgcaatctccgcctccaaaaaagcgtttattgtcactcgttttgcagacctgggcttcctcatcggtatcttgatttacggatattacggaggaacgttcggttttactccggatacggtatcgctggttagcggcggagcggctatgcttccattagctctcggattaatgttcgtaggtggtgccggaaagagtgcaatgttcccgctacatatctggttgccggatgcaatggaaggtcctactcctgtcagcgccttgattcatgcggctacgatggtagttgccggagtctatctggtggcacgtatgtttccgctcttcatcgaatatgctccgaatacgttgcatatggttgcctgggtaggtgcaatcactgccttttatgcagcaagtgtagcctgtgtacaatcggatatcaaacgtgtactcgcattctctactatctcgcagattggttttatgatggtggctttaggggtttgtacatcaatgaatcctcatgaaggcggtttgggatacatggcatccatgttccaccttttcacgcacgccatgttcaaggcgctgctctttctcggtgccggtagcattatccatgcggtacactctaatgagatgtcggctatgggcggattacgcaaatatatgccgattacccattggacattcctgattgcttgtctcgccattgcgggtatccccccattctcgggtttcttctcgaaagatgagattctggcagcttgcttccaatacagctctgtaatgggttgggtgatgacggtaatcgccgctatgaccgctttctatatgttccgcctttactacggtatcttctggggaaaagagaacaaagaacttcatgcgcatcacactccccatgaaagtccgttggctatgactttcccattgatgtttctggcggcagtgacttgtggagccggatttattcctttcggacactttatcagttccaacggtgaatcctactccattcatcttgacccgtcagtggctatcacaagtgttgttatcgcgattatttccattgccatcgcgacctggatgtataagaacgccaaacagcctgtcgccgattcgctggctcaacagttcaagggattgcataaggctgcctatcaccgtttctatattgacgagatataccagttcattacgcataagattattttccgttgcatctctactcctatcgcatggtgggaccgtcatgtcgtagacggattcttcgacttcctggcatgggcgacaaatgcgacaagcgatgagattcgcggcctacagagcggtcaggtacaacaatatgcgtatgtgttcctttgcggtgcactggcacttattcttctgctggttctctaaacaagtaatagtaaatctttaaacagtaaatcataaagatgaatttcttatcaatattcgtacttatccccctcctgatgttggccggactttgggcggcacgaggaattaaagctatccggggggttatggttacgggcgcatcagcgcttctgatagcctctgtcgtacttacattcatgtatttgggagagcgtagcgccggaaacacggcggaaatgcttttccgtgcagacacactatggtacgcaccgcttcatatctcctactcggtaggcgtagacggcatctcggtagctatgctgttactgtccgccattatcgtatttaccggcacattcgcttcctggcgtttgcaaccgttgaccaaagaatatttcctttggttcacgctgttgtcgatgggagtgttcggattctttatatccgtagacctgttcaccatgtttatgttctacgaaatagccttgatacctatgtatctgctgattggcgtatggggttcgggacgtaaggaatatgcagcgatgaagctgacacttatgctgatgggtggttccgctttcctactgatcggtattctcggaatctatttcggtgcaggagccactaccatgaaccttcttgaaatcgcacagttgcacaacataccttttgcacaacaatgtatctggttcccgctgacatttctcggtttcggtgtgctaggcgctcttttccccttccatacatggagtcccgacggtcatgcctccgctccgacagcagtttccatgcttcatgccggagtgctgatgaaattaggaggttatggttgtttccgtatcgccatgtatctaatgccggaagccgctaacgaactttcctggatattcctgatactgaccggtatctctgtcgtttacggagctttctccgcttgtgtacagactgatttgaaatatatcaacgcatactcttccgtatcccattgcggattagttcttttcgcaatcctcatgctgaaccagacagcagccacaggcgctatcctccaaatgttgtcgcacggactgatgacagcattgttctttgcgcttatcggtatgatttacggacgtacccacacccgtgacgtacgcgagcttgccggtttgatgaagatcatgcctttcctgagtgtatgttatgtcattgccggccttgccaatctcggtctgccgggattgagcggttttattgccgagatgaccatctttgttggatctttccaagacaatgatgtattccaccgcacactgaccattatagcctgctcctccatcgtgattacagcagtctatatcttgcgtctggtaggtaagattctgtacgggacctgtaccaacaagcatcacctcgaactgaccgatgcaacttgggacgagcgtgtagccgttatctgcctcatcgtttgtgtagccggactgggtatggctcctttctgggtaagccacatgattggtgaaagtgtattgcccgttgtctcacaactgataccctagctctttaatttttaatctctaatttaattgataaagatggattattcacaatttctacatatgcgagaagagctgtcgctcgtagtagttctgttgctactgtttctagccgacctcttcatgagcccggatgcgcacaagaacgatggaaaggcacgactgaatacaatgtttcccgtcattctgatggctatccatacggctatcaacctgataccgggtaccgctgccgacattttcggcggtatgtaccactatgtgcccatgcatacagtcattaagtcaatcctgaacgtaggtacattaatcgtctttctgatggcgcacgaatggatgaagcgtgaagacacttcattcaagcaaggagagttctatgtactcactctctctactctgttcggtatgtatctcatgatttccgccggacacttcctgatgttcttcatcggactggagactgcttccgttccgatggcagctttgattgccttcgataaataccgtcacaactccgctgaagcaggagccaagtatattcttaccgcactcttctccagcgcattgttgctgttcggtttgtctatgatttacggttctgccggaaccttgtatttcgatgaccttcccgcccatattgacggaaacccgttacagattatggcatttgtattcttctttacgggtatggcattcaagttatcgctcgttccgttccatctttggacggcagacgtttacgaaggagccccgagtacggtcaccgcttacttgagtgttgtatccaaaggatcggcggcatttgtattgctgattatcctcatcaaggtatttgctcctatgataaacgattggcaggaagtgctctattgggtaacgatagcttccatcaccatcgcgaatatattcgctatccgccaacagaacctgaaacgtctgatggcattctccagtatctcgcaggcaggatatatcatgcttggtgtaatcggtggcacggcacagggaatgacagccctagtatattatgtacttgtgtatgcagccgccaatctcggtgtatttgccgtaatcactattgtggcattgcgcagccagaagttcaccctcgaagattatgcgggactttataaaacgaatccgaagatcgccctcctgatgaccctttctttgttctcattagcaggcattcctccatttgccggattcttctccaagttttttatcttcatggcgaccttcgatgcaggtttccatttgttggtgtttatagcattggtcaatacagtaatttcactgtattactacctgctgatcgtgaaagcgatgtatatcaccccgtccgaaaacccgattccgactttccgcagtgaccgatgcacaaagtggggactggcactctgtacgttgggcatcatcggactaggtatcgcaagcgttgtataccagtctatcgacaaactggcatttggaatctaaacaaaaaagcgtatgccactttaaagtgacatacgcttttttgtttagatttgtagggatattcctaaaataataaaatttaaggcaactacttcattgcgaattagttgccttttttgtatctttaagcattccccccaaaaaacggtttgacggccaaaacgggggtaatctaaaataaaaacacatggtaaagatacaaaaaatctcagaaatcgaaccttgtttaggttttaccgagttcgatatgcttaaaaaatatcgtcaaagttttgcaacgagtgaattaggtcgactccattctctattccctttctcggaactggcccgacaaatgcatttgaagtcctctgctttgggtcgtaaaagttatttttctcccgaaggtaaaatagccttgatggtcttgaagtcctataccaacttttccgatgcacaactgattgagcatttaaacggtaatattcattaccagttgttttgtggtgttcagattgatccgcttcatccactaaccaatcctaaaatcgtcagtgcaattcgtcaggaactagcgaatcgccttgacgttgagtccctccagctcattcttgccgagcattggaaaccttatcttgagaaccttcatgtctgtatgaccgatgccacctgttatgaaagtcatctgcgttttcctactgatgccaaactcttatgggaaggtattgtatggcttcatcgtcatctgtgcaaacattgccgtacattgcacatacaacgtccccgtaacaagtatcttgatgtacgccgtgcctatcttgcttatagcaaactgcgtaaacgcaggaaatcacagactcgtatgattacacgaaggttacttcaattattggaaaagttacttgaccagctggagcagcttcattcatcctacaggaacaggcttgcactatcctctgattaccaaagacgtttctcggtcatacagacagtccttgagcaagggaagaatttatttgcaggcaaaaaagtgtccaaccgtatcgtgagtatcgaccggcattaccttcgccccattatcagaggcaaggaaaccaaatccgttgaattcggagccaaagtcaacaatatacagatagacggaatctcctttatagaacatatctcctttaaggcttttaacgaaggagtacgtttgaaagactgtattcatctgcaacaacaactgaccggggttagggttaaggcgcttgcggcggattcaatctatgccaataatgccaaccggaaattttgtacaaaatatcatataagcacttcctttaagcgtaagggcagagctgccaaagatgagccgcttcggagaatcttacggtcggaactcagccgagaaagagctacccgcctggaaggaagttttggaacgcagaaacaacattactcactggccaggataaaagctagaaacaggaaaacggaagtactttggattttctttgggatacatacagccaatgcggtatgtatgatagaaaaggtcgaaaagaaaaaaagaaaggcagcataatctgactaaaataacaggaaaaacaggagaggttttaacttcccctaaaaaagacatgtacataatgcatgggtgggaagggaaaaacaagaatatgtaaacaatattctacaaaaaagatagaagactgggagagttgaacgaaaaaaatcaagagaaaagctcacgtaaagcaaagcttttctcttgattttttagaaagaggaacatttactgaatatccctttgtagttttttactgaagactttcttccgtcatgaccactccaggaatcgtaaaccagaaacgcgatccattacctttttcggagtcaacgccaatatgtccacctaattgttccacaatactttggcaaatagaaagtcctaatcccgtgccatgcacaaaagaatcaagctttacaaaacgctcaaagatgtgcggtaattgtttcttctctattcctatccccgtgtcctgaacatagaattccaatccttcatctttcagcacatatcccacacggatattgccctctgaagtaaacttaatcgcattgttcacaaaattggatatcacctgatatatacggttacggtcactagtaatatggcaaatagaaaaatttggttcgaatactaactttacattctctttcgttttcatctgcatagaacggaccagatcttcacacagcagattcacatccacatctccatgcgaaaattcaaatgtccctgcctcaattttggaaaggtcgagaatatctgatattaactgtaacagcaaatcattattttcccgcacgatcttcatatactctctccgttcttctatatccgcagtttccaccaataaatcagaaaagcctacgatagcattcagaggcgtacggatttcatggctcatattggcaaggaaagcacttttcaaacgatccatcatctccgccttatcacgtgcatgaatcagttcagcctccgtctctttcagtttcgttatatcataattgataccaatgatttcgatttcaccctcttccggtttatattgggttaccatcacattcgtatttacccagttccactcattttccgttccgggacgaagaatacgcatttccccttgaaaatgttttcttttcccgactttgacttctttatagaaatcaagcagacctttgcggtcttccggatgcattttacgatagactcctactacatcacttaatgcaatgtcttcctcttcccccatatttttataccattgcttgatggcatatcccttccgattcagaagatttaatttcgcataaccaacttttgcaaaatcggatatcatcaaaaagaaattttcaaaatcacgaatacggttcattgcatcaatacgttccgtattatcaatactaatcagaatatacccgataaactctccctctctatcgtacagtttagttactttcgaatacagttctataacattagaacgcatggtacgataatatcctttaatctggtcgaaagaataattaagtcggaaatccactaaatcctcatttcgtacacgatcacgaatcgtttgcggcacgttcggattttcaaagaagttaatacctattacatcctctttattggcaattccgaatatttccaaattcttattgttcagatcaagcagatatccatccttatcatagatctctactcctgccggaatattagcaaatatatttttaaaaagtttctcactacggtccaatgcacgattagcctctacagcctcagttgagtccgtaaacaatcctaccacctcatctttctccggtgaatacacaatccagtgagtgtacaatcccgtttgaggaaaatactcatccttttctttataagacttaccatcaagcacttcaaggataaaatccattttctctgaatgatcggaaaacaaatccgaagccaacacacctacatattgttccaaaggtttgccaaagaaatgggcactgatctggttagcatccgttatccgataatcataaggcttgttgttctcgtcacgaagaacagacatacgtatataccccattggcataaaatggaaaagattacgtaagaaagactgttcataagttactttatcttttgctatgcgtagttcaatacaaatgcttataatatttcccaacgaagagaaccattgaaaatcctcattactccagttacgataactatctatcaattcaatacccattcctccccatacatgatccccagccatcaaaggagttaccatgaatgaatagactccccgttcagcaaattctcgtcgcatttccgatacttcttccggtagttgtttcaacgaattcaaaacgatagctttgccagacaaaatctgctgattccaccattccgaccgatcgaccggtatgtcttgccaacattgtttttctgtcgacatcccttcggaaacgacctcatacgtgcaactgcgataagtgtgttctttattgtactcgaaaatatagacacgtccttttccattataaagattcagtatatcctttaaaatctctgttacacattcttcaactctttcatcccgaagaaaacgatataaagactgcgaaatgtagttctgacggagaagcaagtcattcacacgtttcagagctttcttctgttctatctgttcaggagcctccacgcgttgaatcactccaaaagatttgtctcccccattagtccccgttcctttctcacgggaagccaaacgggtatgcaaccagacttcgccatatttcgaatagatgggaaaggtctgttcgtaaaaatccttatggatagaactatttgcccggaactcatgtgcaatctgacaacgataatcttcacgcaccaagttcagaaaatcagaaaatgagatagtatctccatccaaatccaaaagatcacaaagaaagtcggaacaaagataatatcctcccgtcaaatccgcttcccaccatccgacttgagccaaagaagccattttgcgataccgctcgtaatctgtatgcataatattgatttttaaagacacaaatataagaaaaatacattacaaacagctatttacaactcaaaattcaaggctgtataaacaaaatagttgacaaacagaacaataaatgcgtacgtcggtatcgacgcacgcatcaaacaattgaaaaacctctttaatcttttattaattcaaagtcggaaaagaatagtttgtccaagcaaaaacggaagtgtttgcaccggcattagaggccgatggattagtcagtgtgatagttccctgcccaacgacattcttatcgggatttgttttatcaacataatccaccactttttcgtttgtatatgagaaagaagaagtcgtaatattgatagtcacggtgcctcccccttttgagtcggtagcgtcaaccaggtctttcgctttcagtgcatcagccgaagtagaagctaccaatgtattcttgatagtagcagtcgcgccacgacgtaccttgattacatcgtccattgcattcttctgtccggtagtcgtatttccacctaccgtgttattgacaatcgtcattccgtctatgataaaatcagactgtcccacatggtctactccgtttccatccagattaccatcagcctcaactccacgcggatcttcttccgtgctggtatacccgtcttcccagataccataacaattactcaatgtgcccttatatccttgagtgaaatcaaacatatcatcatccggattgacagccagcagattagtcacatttactgttccaccgaagaattcgatagcgtcatcggcactttccaacacataaacgttctggattttcgtcccgttacccacaccattcaaagtcagcccgttgtgctcaatatcagccgtattacgtgcaccggcatagaggatattcacataagtcagcgcaccggaattgtcggctctgtcactaccaccgtatttgtaagcattgttaatctccgcattggctgtattagtaccctctgctcccgcaccggaaataggagctttaccattaaggataattcctccccagtcaccggctttctttgtcgcttctccagaagtaaatgtgacaggttgtgaagacgtaccgttagcataaagttttccaccctgtgctacaagaatatagctactgaaacctttagtcgctttaatcgttgttccggcaggaatagtcagttcgcctccattttcgataatcaccgttccacccagaatgtattccccttcttccaacgtttgtttaccggtcaggtttcccatcaatgttttaccgtcggaagctagaatagaagccccgtcgaaagtatcattcccgtcatcatcactaccacaagaagttaaagtcaaagttgttgtgatagcagccattgccatcatacttaagaataatcttttcatctttttagcgtttaattgataatatttctgtttatatagggcttagaatgtacacgacactcccaagctcacgttaattcctttttatagtcgcccaatatcactttctgaccgctaccgttcgccttacggctcagttgataggagggattaagcaagttgcgtgctttaagagtaagggcaatatgtttgcctaacttcgcttgcgatacgaagtctagcgtagccactccctcttccatcacatcctgaaacccttgtgtaccgatagtgtacactttttctcccacatatccgaggaccaatgtattggtaaatgaatatccggctgaaacataggtgtgtgacagatcgaagttggcaatccaaggagccgccccttccagttgcgagccatccgtatcggtagcggcaatattggggtcgttcactttggcattcgtgtagatatacgatccgttcaatcctgccgtcaggcggttcataccgttgttggctgtcgggcgtgagaatatttttttgcgtatctccagttcaatccccgtcacagtagcctgatcggctacgttttcgtatgaaaggaaacctccggcacttggcgtttcgatacgcgaaataggattctttatcattttgtagaaagcagtaacagagatcaattcggttgatgtagggttgaaatcccatttcaaatctatgttgtaattgtccgacggtttcagatttgcgttaccctgactcttaaagttgacacccacatagcggtaaggtgagatttccttcgactgaggcaaagtatatgtcttgctcaatccaagccgcaaggcgttcttatcatttagcctataccttatgttcaaactcggaaggaagtagtttttccggatattgttcttgcctttggagtttcctttatccacattgtagtctacggtcatatccacattatcatacttcaaaccgagattgatcacccaatgccgggtgaactgatagaccgcttccgcatacaccgaatgtatgttcttcttcaccgtatatttatccaccgcattgtccagcgtgaaacggtcgttgaaatgagccgcagaataaaagtcatccaatgaaatatcgtccaccgaagtaaatgaaggaccattcaaggtaatcatattgtattccgtctgtttgaaatcatcgttaatgatacgtccagtgtatccgaaccgaagcctggagatttcttcccaatcgtctttcaagcgataaaccactccggcacgaagattcagatcattctccgtcagagaagaaaaagtacggaactgtgtattacctcctaccaatccgtatccggtttcattccgggttatctggttgatacggcgatccggctcatatccgcgcaccatattataagaggctcctgcgttaacgctcagccggtctgtcaatccccagttcgtcatgatctggttgactaataacagattgtcgttcacctgctgacgatgggtcattcccagattaccgtaatcatcactgaaagtagcgtctttcccttcgtagtttcccaccgactgtacattgctatgtaccatcatgaagttgtaagacaaatgatgacgattgtgcatatcataatctagattagccaatgccaactgactgatattcgttgttgacttatgtccgttcagatctttgtatatagtaccgcccgtatttgtattacgtatgatttcatccgtatatcgataatcaacggaatgtcccacagtggcaaagaacgaaagagcatcccgttgccgacctacataaaacttctttccgcctgcgatattataactgcggtccatctggaagttttgcgccgacgggtcgagtttgttcttaaagccccacatatccgtgcccggttccgtccgattggcaaatcccagcagattcactccatccggttggaagaaatcggaggaaagggtctgtgtattcacaccggccgatacactggcgctaatgtaaccgtcacctaccagttctttggacgagatatcaatatttacgccccctacatcgcctccgttcccggcagtaaatgctttgttgactcctacggactgtataaggtcggttccgaaaaaatcaagagagatattcttgtattccgggtcttccgacggcacagggaaaccattgaacgtagtagtattatagcggtcacccaatccacgtacgaatacgttcttcacaccgtcctgcttggaaattccggtgactttcgtcacagctccttccgcatccgaaactcctttgcgtgaaagttccttcacactgactgactacacggcaatgaccgccttttgctgttccagcaaagccatattctcattttcccggttctttttcgccacaacaaccacatccgacagttcttgcgcatccgtctccatctccagattcagaatgaccagattcccattctctacgcggaccttccgacgtacttcagtcttatatcctacgtatttgatttcgatatcatacataccttccaacactcccacaccgtttagctcaaaattaccgttcatatcggtaaccgctccggcctgggttccaagcaagcgtatcgtcgcacctatcaaaggctctttggataacttgtcctttacagctcctttaatcttgatattggcagccaatgcaggaagtacacacagcagacaaaagaaggccaccactgaaaatcggataagaaatagctttttcatctacctttactctacgtttttgattacgtcggcaaaggtagatgggctgtattacaagattgagacaaagaaaatacaatcaattgaaagagtcgttgcaatgttattacactgcaatatcctctatcagttttctatctttactcctagccggcgcaagtccgctcccgacggattttggaagacacgcaagtcgaattccggaataatggcaagcacatgatcgaaaacatccgcctgtatgccttcatacggaatccagtccttagaagcggaaaagaaataaagttccatcggaatacctgtttcggtaggttgaagctggcgtaccatgcacgtcaagtcttgattgacggtaggcaggctcttcagataattcgtaagataggcacgaaagacgcccaagttagtctggcgacgcccgttcaccaatacggagttgtcaatatgatgctctttgttatactccttcacgaccttctccgttgcctccacatactccttcaacaattggattttacgatacttcgccaacatctccggtgtacagaaacgaacgctggtcatgtcgatattaatggaacgcttcacacgccgtccaccggattcccacatcccctgccagttttgaaaagaatcactgaccagcagataaggcggtatcgtcgtaatcgtattatcccagttacgcacttttaccgtattcaaagtcacttctatcacagttccgtcggcgccatatttcggcatagcaatccagtcgcctactttcagcatattattggcagaaagctgaataccagaaacaaaacccataatactatccttgaacaccaacatcaggatagcggccgaagctcccaatccggtaagcaacaccatcggactctgcttaatcagaatacttacgataataatggccccgacaaagaaaagaacgacttgagcagtctgcaacaaccccttcagaggcttgtccttatattgctccttttcactgtaaacatgatataccgccgacagaaagacactgatgaaacggaggaaaaccgccaagatataaataaggcaaagccgtcgcaggaaatcgagcaagttggagtcggcatgttccggaaaagcgatgggaatagcaaggtaaatcaatatcggggctaccatccggctgacgtgaaccatcaccttatggtcgaacactatgtcgtcccaagtagctttggtctgtttcaccaatttcgctaccgtacgcaaaatgatcttacggcaaatcagattagctaataaggccacaccaataatcagcaacaaaatgacaaagttgtccaccttatccgccaaagcctcatccattcctgccgaaagcaatgcatggttcacttcctgaatcactacatcagtcacctcctgcgttccgccattggccaactcaactgtcacggtatcaactatttcttttacttcttccataagtaatcttctctctattcttctttcttgttcttatttccctcgttccaagtattcacgaatatcctgtcgcagccagtcgtagtggaaaagccgcttataggctacattcttcttcaacatgatttccacatttacctgactgttctgataacaagtcaattcgttcttaaattgttcattatgttcggcaagtcgcttgatttcctgttcccgttcccggcgcaataccgtacaaaccggaatcagaagtttcatcaccacattatccatcacgtggtgtccctgcatatacagataggtattttccggaaatagccccaactctctcagatctgttcctaaggcatttacttgattcatgctgcgggaaaaacgtttcttcagttccgacaatttctgatttacccgttgctgcaatgattcaagactcttttccgggtgtctgagatttatctcacgcagagaagtataggtatgaaaatcatacatcggaaaggtgtaagtatcccgttggcgatagaaccacacgttccataagaaaagcggatatacgatttcagagtatcttttcaggtaagcattgaagtccatcacaaaacggtcgttcaacgtagcctgcacacatacctcatgaaggctttcggcaaagcaatgatagttttcaatggcgtatgtataggtctggaagatatatttgttgcggttgattttacgggaagtattggttgcgccctgcaacaggaaatcataatcgctgtccacacaggcaatcaggcttcttcccagttccgcggtattcaacgtattcatcaagaccatcttcttccctttagccaatgaagtagtagaaggaagcattacctggaaatagtgttcgtcatcttcaaattcttcgagcaacgtacgccagaaagcaatgtcatcatagctttccacataagctatgatacgccgacgggccttctttgaataaagcttatgagcggcattgaaataagaagatgtcagattatctcgtagtgaagttgccattattatataatgttgaaatatcacttacttccgtcactgcatccagccagccctccataatgacggccggcgaatgggtagtcaggatgatctgtacattcggattcaactcacgtatcatggcaatcaacttctgttgccattcaatgtggagagaggcttccggctcatccataaacagtacgcaatggctgttgtcctgcacaagcacggtcaacagaatgactagcatttgcttctcaccggaagaaagtttgtaaggaaacaacagttctccatcctgatagaaagcaatatcattccgtttacggtctattttcttgcgtgtataactgaacagttcgtcaatcatatcttgaaaacgacgcttggctatggacaaagtagctgctttgacccgtactttctcgtcattatcggagagcatttcaatcatcttgttacctatattgacctgataatcaagatagcggcgttgcaacagataaagctgccaatccaattcggacttcacgttcttatcggccatgcgagcagtaaagtcacccataatcagaggacggtcgtaactccggatcacatcgtatgggatataggtcgcctgaggattgtcgaagaaaagacgaacaccgttcttctcgtcacttttcatttcaccggagagttcttcaagatatcctaccgaacggttcaagatggtagtttttcctactccgttaataccggaaaggatattcacatcgggacgcaaatcccatcctatattaaaacgctcccagagtccatgaatttcgatacgacggatatagttggcctgttgttccataatattcaattttattcaaggcaaatataaacaaatcatacgacaaattagctacctttgcagcagttttcaataaaggtaacaattaaaaaggcgtatacacacttatgaagaataacaagaatctgcaaggtcatctgtttgcacttacggcaaacgtcatgtgggggctgatgtctcctatcggtaaatcagcgcttcaggaattctccgcaatatccgtcaccacttttcggatggtgggagcggcggcggctttttggatactttccattttctgcaaacaggaacacgtgaatcatcaggatatgctgaagatattcttcgcttcactatttgctttggtgttcaatcagggagtattcattttcggcctttcaatgacttcacccatcgacgcttccatcgtaaccactactttaccgattgtcactatgatcgtagcggctatttatctgaaagaaccgattaccaataaaaaggtactgggtattttcgtcggcgctatgggagcgcttatcctcattatgagcagccaagcgggaaacaacggaaacggaagcttaatcggcgacctgctttgtttggtggcacagatcagtttctccatctacttaaccgtattcaagggattatcccagcaatattcggcagtcactatcaataagtggatgttcgtttacgcttcgatgtgttacataccgttctcttatcacgacatttccatcattcaatggggggcagtctccacaatcgccatcatagaggttctttacgtagtattgggaggcagtttccttgcctatctctgcatcatgaccgcacagaaactactccgtcccaccgttgtcagtatgtataactatatgcagccgattgtagctacaatcgctgccatcatcatggggataggaagcttcggctggcagaaaggactggctatcgcactcgtgttcttgggagtatatatcgtgacacagagcaaatcaagagccgacttcgaaaagataggaaaagaactgtaatctgtggtgaactacatctttaagtcctcaaaataagtgtccagcaaacttttggcggctatgaatgaagtaagattaccacttaatacttgttgttccttcttttgaagcatggcttcaatcttcggattatggtagaaactgtcgcgaagctgttcattgatactttcatacatccagtatttgctctgctcgttacggcgatattcaaaatagccattttcttttacaaagcaaatgtactcataaaccatatcccatacttccttaacgcctatattgtaaaaaccggaataagtcagaacctttggtgtccatccggattcgggcgcaggaaacagatgcagcgcattacggaactgagtggcagccagcttggcacgttccagattatctccgtcggctttattaatcacaatgccgtccgccatctccataatgccacgcttgataccttgcaattcatctcctgttcccgccaactgaatcaacaggaagaaatcgaccatcgaatggacagccgtctcgctctgtcccactcccacggtctccacaaagattttatcaaatccggccgcctcgcaaagaataatcgtttcacgcgtcttacgtgctactcctcccaatgaaccggccgacgggctgggacggataaatgatttaggatgtacggaaagctgttccatacgggttttatctcccaaaatgcttcctttgctacgctcactactcgggtcaattgccagcacggccaacttaccgcctttttcgagcacgtgcagaccgaagacatcaatcgaagtactctttcctgcaccgggaacaccgctgatacctacccggatcgaattgccggaatagggaagacacttctctatcacctcttgggcaacggactgatgttcgggtttcacactttcaactaacgtcacagcctgacttagtatagtaacatcaccttttgtaatgccgtccacaaactcagccaccgagagctggcgtttcttaggcttccgtttcagataagggttcaccgacgagggctgttcaatgcctttattgacaacaagccccttatattcttcactattctcaggatgttccatagcgataggatttaacgtttgatattgatttcaactttcgggcgcaacgggtcatttgttatcatcaagatacgcaagtggtgtttcttattacccacatcacgcttacgaatagtcactttcaacttcgtcattccatccggaggaagtaccgtttttttcaaactgactccgaccgatgagttgaatacctgcaacttactaattaccaatggagtttttccggcattagcgatcaggatatcatgactggctttcttcttctttatcaacggcacgctaagatcgatgtccgtttccgagattcgtatagcaggcgcattcaaagaatcattcgctgtcatacgcgagaagtcgggaagaagaatagccgaaaccggtatttcattatcttcgctcaccttatcaccggaaaaacgggaaaggtaaacggatgtctgcgtcaatccgtagtctttcaactggttggcatccaacgtcagtttcacagtgccttttttacctttcagcagaaccttaggctccgcttccattttaaggtaaggaggcagatgcatcaacaccggttcgtacggacggtcggataggttcgcaatgctaaaagtcatcgtgggcttctgaccatgatacacatcggggaaggcaaattcgtcacgatcgatacggatattgcctattgcataaggatgagtcttggtatagtcttttatctcttgcaccacttcaccgataaatttcagataaatcaggctgggcgtggcattgctgtatattcctactgttttttcaaagtgtcccaaagctttggcgtcaaaggaggctttgacaattccttttcctccgggagcaatcggttctttggtccagtcggctacggaacaggcgcaagaggtagtgacattggtaagcaccaatggctggttaccggtattggtaattgtatattccaccgtcaccgggcgtttccattctatttgtccgaaattatgtgtctctttattggaagagatgcgaggttgggcaacggccgccaaagcgacagtgagtagagaaaatataaatagcaaactacgtttcatgcgatacttttttattttggtgcacaaatgtaggacttttagatgagtttctcaccacagattacacagattaacacagattgggaaaagactttacatgcagacgaggcctgtcatgccttgtctgcaaactaaaatcttcgcttttggttattcaataataattgtcattgatgcggaatgtgaaacgtattcgggagcgtatgcacactgaatagtgactagtcctgtttcgtaagttccttcacggctcacacggtagccgtattccagtacgtagacgcctttacccaaatggtcgaagaagaagttggtagaggcgtctttaatgtctacataatagccgaatccattgttccagcgataaccggaaatactgccgacaggctcgaagcaggcgccacgctggtctttcaactgcacaaagtccatcgtacggtctacactaatggtcagacgggaaacaactttatcacctactgtgagaacggtctttgaagtaataggctgcaattgtgcaacgttgttctctatgcgttctacgtacagttgcttctctacattcaatgcaccaccctgttgtttcacatcactgataggagaatcgtattcagcgtaaacagctccccaagcgatacccggattccttttttccacttcaatcttacaggcgtctaccacatttttctgtgtgaacgaacgtttgatataacccaatcccggaacggttgtcttactcggagataccgtttccagtacctcgttggcaatcacaatacgtacgtccccttgattatcgagcagattggcgcctttcatcaacagggcatacacagcatccgccgtagctaccggagaactccactgctgcgtctgtttttgctttaacagccagagtttcatttcttcgactgtttcccggtttccgtttccgccaatcagttccaatgcttccatcacatctacatgggcttgcaacttcatacctccccaagcatacggattctcgttgaaggcaaagaacattccttgctcatccgttttcgtcagatgttccttcaaggaagcgacaaactcttgggcttctttcttacgcccggctttatcaagtacaatggctgcaatcgctttcgtttccatcgaagaagaggtaagcaactctcccactttagacagataataagcataagcaatcttacttgccgcaggaacctgttcaccggaaatcgcgacaatatacagatattgcagaataccgcttgaaactcctgtctgtttcactccctttttctgcgctttcagtatattcttgtattcttctaaagccgactgatgaagataagttaatgccttagcctgcaagccaagggcggttccactcaatggcgcacctgtcagtagcgcaaggcgggcattcagttcggcaatataagccgttacataacgactgccgttcattcccttaaaccatgaccaagcaccgtcggaattctgcaattcctgcaatctggtcaaagccgcaatgttattgctgcggatattattcaggtcgaacagcgtagcgatacgttctttctgctgttcttccgtcttggcttcgagtacccacggcgattcggacaacagaatgttcttcacttcctggttcttttgcaaatcactcaagaaggtttctttcgtaccgccttgaagtttccaactatcgaaaactgccttaatgcgcggctggctgttcataatgtaagaagccaatgtatttgcataataggctgtagcccacgaaatagcattattattcactgggaggcttagcgaaggcagtgcctgaatggcataccaagccggatttcccgtaaactcaatagtcagtttgcggtcggtcgccgttttactatgctgattgaacaagctgtcgagtgagaatgtacgggtttcttctccacgcacaggcatcggaagcgtctctaccaaatgttccttattgctcagcaccggaagaagttgttgctcaccgtcactgaacataccgctatcggctatcatccgacaacccagtatctcgtatttatcattcacggtaaatctgaaattcactccgattgtctttccggcagctaccgagaatttctgtttctgcgtgctgacaactttttccgtcatcggatcgaaaagaatcatactgactgtacctgcctgcggcttgcctgtcatattggaaatagaagcggcaatagacgtcttgtcgcctacacggacgaagcgagggagattaggagtcaacataaattccttgctcgtggtagcttcaccatccaacgttcccgtcagcattcctttggtatgggaatatccacgaaagttccaacgtgtcagactttcgggcatagtgaaagagaaggatatttctccctgttcattcgtacgaagctgcggatagaagaaagctgtttcggcaaggttcgtacgcaagtcggcgggcgcatcaggaagggtttcttcttcaaattccgcatcagtagcctcagagactaaggcaggcacatatttcacttccaccacattgctccggcttgcaacactgcccgtcattgctgctttcttctgcactcccccccctctaatcatcactccatcggccaatatttcggattcaaagaacacatttccgatccttgacggcattacgaaatagtcatacgccagcaccggcactttcagcgtcttattgttccaccagtaattgaatgagttgtttcccaaatagccattcatccaacggaaattaggaagtatccgattatagtaaagccggaaatcctgtcggcgattccaaattttatctaatgacgcatcatacatcgtagccagcatttccgcatcagcggcctgcccctgcggtgtcttaatcgtcaatttccactcttctttctgtccgggacgcaatttgtcacggaacacctcccacttcatcgtcaacgtcttatccgccaagcgtttctctacggagacctgttcctgataaagctgcccgtctcttaccatacagaagttcacaaaaataccgtctccatagctctccagatacggataggtaaaacgcacaatcgtatcggacaagttcaacgccttactttccagttgtttatcaccacagaagacgttcatcatcacataagtgtccttttctgaagtaccgaaacagaatactgccgggcgggttgcatcaaactccgtattttccgcataaaaccaagtaggtgatttcaccggcggacgcttgtcgccgatagagaataggatcgtctgagcctccgtctccacttcttttccctgactgtctttcgctaccgctttcaacatataagttcccgatggaagattcttccagtcaagcgtcatttccttattagaagtaaatgttcctgttgcaacgggattctcacttgccttcttaaagccggcttctttcaggctactctctttcacgcttgtctcttcgaggggatacagatagtaattgccattcacctccacaggctgttcgttcaggttctgagctttaaacacaatatcaaacggccggtctttgcacgtcttcttgtccaactccatctgtagaaccaacgaacggttacccgccggaatcacatctgtagaagattgcgtttcacctgccacattggtaacagtagcttcgatggaataacggtaatatactctatcattattcttatactcgtcactttcctccagacggacgggtatcgtaaattctccattctcattggcagtcacctctccggaagcaatctgcacagcccccgaaattctccagaggttatatgcagaacgttttaccgtatatttcaccggaagatcctgaagcgacacaccgctataagattgaatcttacctttcacctgcacttcatctccaagcttgtagctttccgtctgcttttcaaaagttatatcaaatgtcggacgtttataatcttctacacgaacagtcgttccaccctctcccgccgttaaagaaaagactccgttcagacaagcggaaggcaaagcaaaatcagtcgcaaacgaaccgaattcattggtacgtacagatttccgtcccacttcctgatagttcgcatcgtacaaagtcactgtataggctttgttcggaatcacatcagctgtgtccgatttctgggcaaatgcaatacctttcacatacacagtctgtcccggacgatacagagaacggtcggtcaacaacgtcatttcctcaacagctttatctttattgccatagtatccataacttccgccataaattccttgtttcggcatagccgtatccgtgcctttcgaggctttcagataccgatacttggtattcctgaggaataccactttcccctctttatcggtcgtaaactcttgcaacactttctcgtcactactgtatagtgtaactttcgcattgggaatgggatgtccggtctgtccgtccagagtcaccacctcgtattggttttcgggcagacggcaagtcaatactttaaaacgcgtcacgttaaacttgctttcgctatccctcttggcacgaatatccggaataatacgcattacgtaagttcccaaatccggagctttgaatgtaaatacagtatcctttgcccgataatctttcggacgaagaacggaataatgttgttctttaaccagtttcttcgcctgatacagccgcacagtaaagccatccagatttttatgtcccacattcaacttgatttcttcattcggaaaggcctggctcactgcactgacattcaagaaaggcgctaaaatctcttcacggagattcttcagcgcatttatcctgcgataacccggataaagacggatcgcctcatcacaaagttgcaaagcgttgacttgctgcatcttctcaacagcataacggacttgtgccaaatagacttccgcacatatcggctctgatttgaactgccttttaagctcgtccaaagcggcattatatgtgtctgccgtccattcgcccaatcctttttttagttggacaggctgcaatttgttatcattgccacgtttccattccagatattgaagcatggtcaatacatacccctctttaagcccggccgtctcataagcgtcagtcatacgctcatatatattggaaatatcctgtttcacaggagaagctgtgataccattgaaactgccgcgttcgagtctttcaatctgattcagagccctaatggcacgggaagccagcagatggtacatatcgtgatgataatattcgctggtttcgcccagctccacaaaaggaatgtaattgagtgaagaagtcttgagcaataagagagaatccgccaaagcttcctttacattagtccgcactttctctacaaacatattcgccgtccattcgcgtatatctgcggacggagtctcacctacaatctcggttctttgccggagttgccactggttgtcggcggcataattggcatagaattccgctatcaaagagtgtaatatggcgcgatccatcggctgttctgtctgcttcgcccattgctccaagtctcttaaaccgacataaaagctatccggtgtcaatatatcctgagttttcatccgccacatatatgctttcagcatttgtgcggaattcctttctttctctcctttctgataaatttcatcagtcagttttatcactgtcttaggcaagctctttttctccgcctgctccacttctttccataatttgtcgaaagtctgtgcttgcattgccggaatcactcccagtccaagcagcaccatcatacaaatctgccttactttcataatctctccagtttaagtttgatagatatctttgcttaaacaacaaagtaaagaaataaagtttaaagatttgtactttttagcttaaattttgctttcatccttactgtaattcaaagatatatagaacggataaccgaccttacagaatataaacaaagtggggatatcgttttcaataacgtatccccactctaaacttagttaatgtactcgttctcatttctcaattctatacccccatgacagcatttcgttacgacctacttcactgaggatttttcttactaaagaactcattttctttgccataatcttaaatcttttaaattactaattcctgaaaactaaaacttacttgttaggggttgcattaattgtcgaatatccccaaacatgtacatcggcttcaccgatctttctaaacaatctttttaaccttttcattttgttatcctcctaattacatgttttacaacacaaaaatacggcctttgtttatacgttgtacccccaaaagagataaatttatgttttatagcatatttcttgacttgcgtcaattaatttatttgttataaaaggcaattgtaacagagtggcagttaataagacaaaaaggcacagatgacatttcatccgtgccttttgctaaattatatctacctatatataataggtataggtacgctcttatttaatcggagtctgctctaaggtagccaccagaaagtcatagaacttctgcacagtgggaatcagcgctctttcatccggtgaatgcggtgaacgcaaggtcgggccgaaagaaatcatatccaatcctggaataatagcaccgataatgccacattccaaacctgcatggattactttcactgccggttctactccaaactgctgcttataggacgctttcatcgctttcagaatcggagaatcgacattcggctgccaaccggagtaaccgcctgtcatctccaccttcatccctgccatagagaaacaagattcgagactggtagtcagatattccttcatgctgtcgcttgaactgcgagccaaaatcttaatagccgctttgccttcgccaatcgttattatggcaagattggaggatgtctctaccgtgtccggaacagtaggaatcatacgtgtcaccccattctgacaagcaaaaatcgcatcaatcaggttgtcctgaatctcttccggaacttcaccagccggaagttccacacgttccgccgtgaaactgatcggagtctcgatagccgaatattcttcattgaacaggtcttcgcaatatttcaccaagcccaacagctctttttcattttcggcaggaattgtaattaccgcatgcgcttcacgcgggatagcattacgcatattaccgccttcccaacttgccaagcgagcttcatagttggcaacggcttcacgaataaaacgaaccagtaatttattcgcattggcacgtccttcattgatttccagtcccgaatgtccgccgcgcaatcctttcaatgttactttcactgcaatatctccttcttccggagccacctctttatattccagagtagcagtgacatccatacctccggcacaaccgatatacaattcaccttcatcttccgaatccagattcaacaggatttccccattcaccgtacccggtttcagaccgaacgcaccatacatcccggtctcttcatccttagtgatcagagcttccaaaggaccgtgtttcaaatcttttgcttccagcacggccatgatagcagctacccccagtccgttgtccgcacccaaagttgtacctttcgcttttacccagtcaccgtctatataagtttcaatcggatctttttcaaaatcgtgtacagtatcgttgttcttctggggaaccatatccatgtgcgcctgaagaatcacgcctttgcgattttccatacccggagttgccgacttacgtataatcacgttgcctgcttcgtctacaaaagattccagtcctaagccttttccaaagttaatcagaaattcagtcactttttccatatgccctgacggacggggaatctgagtcaacgaataaaaatgcttccatacgttttgtggagctaaagaaagaatagtactcataacaaatctattttattaagtgattactttcgctgtctgttggtgaacggcaatgccgccaaaccatatatgcccaacaaaactactaaaaaggtttgaataccgtgcacaatcaaggcaaatattccggcatttgtcacatttactccataaagcatcatcatagaaataacggcaaagtgccatggacccgctccgttgggggtgggcacaatcactgcgaatgtgccgccaacaaacatgaccaaagccgccatcatgcctaaatgcgcagtgaaagcaaagcaatagaacgtgaagtaaaagtggaaaaagtaacaagcccaaatagctaatgtataaaatataaataaaggaatattgcgcactccacgcaaggacataattccctcccagatgttcaagacaaaaccttttacccgttcataaaagaataatgtctttcgtaaacaataaagtaacatcgccactccgatgaaacagaacaagacaatataaaaccatacggacgtcaacagatgcatcatggaaggtatcttcgttccggtctgttgaagaaaagtgacaaatatcggcatttgcagcaagacggtaattcctgttatcaggagaatggtcaacgtatcgaccaaccgttccgtcacgactgttcccaatgatttggcaaacgacacatcatcgtattttgccaatattccgcaacggctcacttctccgatacggggaacgaccagactggcagcataagaaacaaaaatggcgttcacacaatctcttcttttaggaaacgcatccaaaggctccaacgtctgccgccaccgccagccacgaaacacttgcgcaaatattccgaacaacagcgagaaaagcatccaccaccaatttgtaccatgcttcaacacatcgcccgcctctgcaaaatcaaagtcgcgatacacccagaataaaataaagccgcccaaaacaatcggtaatatcagtttcagcgtcttttttaacagtttcttcatccttaattcttcattagctgcactggcatatcatttatttttaattagtggcacgttcttcatttaaaagaattacctttgtcgactgcaaaagtaattatttagttggtaaatgaaattagtaaagcctaaaaagtttctcggacagcactttctgaaagatttgaaagtagctcaggatattgccgatacggtcgacacctttcccgaactgcccattttagaggtaggaccgggtatgggcgtactgactcaatttctggtgaagaaagaccggctggtaaaagtcgtagaagttgactatgaatcggttgcttatctccgcgaagcctatccgtcactggaagaccatattattgaagacgatttcctgaagatgaatcttcaccggttgtttgatgggaaacctttcgttctgaccggtaattacccgtataatatctccagccaaatctttttcaagatgttggataataaggatatcattccttgttgcacaggtatgatccagaaagaggttgccgaacgtattgccgccggaccgggaagcaaaacatacggtattctcagcgtattgattcaagcgtggtacaaggtggaatatctgtttactgtcagcgaacacgtattcaacccgcctcccaaagtcaaaagtgccgttatccgtatgacgcgcaacgaagtccaagagctgggatgcgacgagaagttattcaagcaggtggtgaaaaccaccttcaaccaacggcgcaagactttgcgcaattccatcaaaccgatcttaggcaaagattgtccgttgacagaggactcattattcaataaacgtccggaacaactatcggtagaagaatttatcgacttgaccaataaagtggaagaagcactgaaacaacaatgaacgaggaatacattgacaccgtaaaacaccttatagagcagaaagacgctgataaggtaaaagaactcctcatcgaccttcatccggccgacatcgctgagttatgcaatgacttgaatgcggaaggagccagattcatttatcgcttgctcgataacgaaacggccgccgacgtgctggtcgaaatggacgaggatgcacgtaaagagcttctcgaaatgcttccttcggagactatcgccaaacgctttgtcgactatatggatacggatgacgccgtagacctgatgcgtgaacttgacgaggacaagcaggaagaagttctttcgcatatcgaagacatcgaacaggcaggagatattgtcgacttgttgaaatacgacgaaaataccgccggcggtttgatgggtacggaaatggtacttgtcaacgagaactggagtatgcccgagtgtctgaaagagatgcgacaacaagcggaggagctggatgagatctattatgtatatgtcatcgacgacgacgaacgtttgcgtggtatcttcccactcaagaaaatgattacttctccatccgtgtccaaagtaaagcatgtgatgcagaaagatccgatttccgtgcacgtagacactcctatcgacgaagtggtacaagcgattgagaagtatgacttggtggctattcccgttatcgacagcatcgggcggctcgtaggacaaatcactgtcgacgacgtcatggatgaggttcgtgaacagtcggaacgtgattaccaattggcttccggtctttcgcaagacgtagaaaccgacgacaacgtactcaagcagactactgcccgtctcccctggttattgatcggtatgctcggtggtatcggaaactccatgattctgggtaacttcgattcaacctttgccgcccatcctgaaatggcactctatatcccgcttatcggtggtacaggtggaaatgtcggaacacaatcttcggctatcatcgtgcaagggctggcaaacagctcgctggatgctaaaaacacattcaagcaagtgaccaaagaagcggtagtggcgttaatcaatgctacaatcatctctttattggtatatacatataatttcatccgcttcggcgcaacggctacggttacgtattccgtatccatcagtctgtttgccgtagtgatgttcgcttctatttttggaacactcgtgccaatgacgctcgaaaagctaaaaatagatcccgccattgcaacgggaccctttattgccatcacaaatgacattatcggcatgatgttgtacatgggaattacggttttattatcataaaaacaggctaaacaaaaaaaaataagcaaaatagtatgaagtaatcgttttatttcattaatttgtgacccaaaactaatatacaatgatggacgctcatgacactaatcaacccttgaaccaaggggaattagaagaagaaaaaaaaacagtcgaggtttctgaagctataacagagactccaactgaagaagttactgccgaagttcaaactgaagcagctcctaaacctgctacaaaggaagatgtattaaacctattaaaggagcttgcacagaatgcagaaaatgcgaacaagcaggatatcgataatctgaaacaatcattctacaagttacataacgtcgaactggaagctgctaaaaaggagttcacagataacggtggagccattgaggattttgttccgcaagaagacccggaagaagaagaattcaaacgtctgatgggagttatcaaagaaaagcgaagcaaaatggctgccgagttagaacgacaaaaagaagaaaacctacaagtcaaactttccatcatcgaagaactgaaggaattagtagaatccggagatgacgccaataaatcttacaccgaattcaaaaagctgcaacagcagtggaatgagacaaagctggttccgcaaggcaaagtaaatgaactgtggaagaattatcaattatatgtagagaagttctacgacttattgaagctgaacaacgaattccgcgaatatgacttcaagaagaacttggaaatcaagactcacctttgcgaagctgccgaaaagttggctgacgaagaagatgttgtttccgctttccaccaactccaaaaattgcatcaggaattccgtgatacgggtccggtagccaaagagttgcgtgatgaaatatggaaccgcttcaaggcggcttctacagccgtcaaccgtcgccatcagcaacattttgaagcactgaaggaaacagaacagcacaatctagaccaaaaaaccgttatctgcgaaatcgtagaagcgatagaatataatgaactgaaaacattctctgcttgggaaaacaagactcaggaagtaattgcattgcaaaacaaatggaaaacaatcggttttgcacctcaaaagatgaatgtgaagatattcgaacgtttccgtcatgcgtgtgatgacttcttcaagaaaaaaggagaattcttcaagagcttgaaagaaggaatgaacgaaaatctggaaaagaaaaaagcactgtgtgagaaagcggaagccttgaaagacagcactgactggaaagctactgccgacgctctcaccaaacttcaaaaagagtggaaaactatcgggccggtagccaagaaacattcggatgcagtatggaaacgtttcatttccgcttgcgactatttcttcgaccagaaaaacaaagctacttcttcacaacgttctgtggaagtagagaacatggagaaaaagaaagcattgatcgaaaagctgtctgccatcgacgaaaacatggatatggaagaagccagtacacttgttcgggagttaatgaaagaatggaactctatcggtcatgtgccattcaaagagaaagataaactttacaagcaataccacagcttgattgaccaattgtttgatcgtttcaacatcaacacttccaataagaagctaagtaatttccgttctaacatcagcaatattcaaggaagtggcccgcaatctttatacagagaacgagaaaagctggtacgtgcttatgagaatatgaagaacgaactacagacatatgagaacaatctgggcttcttgacttccacttcaaagaaaggtagtagtctgttaactgaattgaatcgcaaggtagacaaattaaaagcagatctggacttggttttacagaaaatcaaggtaattgacgaatcaataaaaactgaagaatgatccgctcgctgatttgagaagatacaggaaagtagtgtatcagaatgcagattaacggtaaattatcgcaaaagaattctataaaatattattaacgcatagaatcttctgtgataatttaccgttaatctgcattttatcattcattatgccaccctcttattttcagccgaatcgaatctcaaatatcaaaaaagagcatccgtatcacctaattaaccaccgaattagcgtcaacttttttcggatggcatttgccaaatgcacaaaacccgctaaaattgcattttagcgggtttttgtcagtaaaaagtggtgatttgttgggctacctggattcgaaccaggaatgacaggaccagaatctgtagtgttaccattacaccatagcccaatgattttcgtttgcgagtgcaaagatacaaataaattgggaaatcaaaacatttcagctattttttttgcaaaaatcctcaaattaattttccctaagcaactatctccactaaaaaacacaaaaattgaagtataactttcttgtatccaataaatcagcgtatatttgtcaaaaatatcacgtttataatcagaaacaaagggtgagccttttttgttataaaccaaaagagaacatgaattattaatatcaaatgtaagaatgaacgatactaaagtattaatcgagaaaataaaagagggaattcaagaaaaaaaaggtaagaatatcgttattgccgatctaaccaaaatagaagataccatctgtaaatatttcgttatctgtcaggggaactctcccagccaagtaagtgctattgtagactcaatcaaagaatccgcacgaaagggtgctggcagcaagccttttgcagtagacggactccagaatgccgaatgggtagctatggattatgcagatgtattggtacatgtatttttaccggaagcaagagccttttataatcttgaacacctttgggctgatgccaaacttactcaaatccccgatttagactaaattacgattatggacaataagaatagcaataacaataataacagcaacaaacctaacaataaggttaacttgccaaagttcaatttgaattggatgtatatgattattgccctaatgcttctcggcctctggtggggcagtgattcaaagggtgtcggaagtaaaaacgttacttacagcgagtttcaggactacgtaagaaatggatatgtcagcaaagtattgggttatgaagataagtcaatcgaagcttatctgaaacccactgctgttggcgctgtattcggagcagactccacaaaggtgggacgtaaccccgtcattaccagccggacaccgtctaccgataagttggaagaattcctgcaaacggaaaaagaagccggtcatttcgacggaacatcggattaccctcctaagtcggacatatttcccgctatcttgattcagatccttccgcttgttctgctagtagcactatggatatttttcatgcgccgtatgagcggtggtggaagtggaggtcccggtggcgtattcaacgtagggaaatcaaaagcccaactttttgaaaaaggaggagccatcaaagtcaccttcaaggatgtagccggtctggcggaagccaagcaggaagtggaagagattgtcgagtttctgaaagaaccgcagaaatacacggatctgggaggtaaaatacctaaaggagctttgttagtaggccctccgggaacaggaaagacattgcttgccaaagcggttgccggtgaagcgaacgtacccttcttctctcttgccggatcggattttgtggaaatgttcgtaggtgtaggtgcatcccgcgtccgcgacttgttcaaacaggcaaaagagaaagctccctgtattgtctttattgacgaaatcgatgcagtgggacgcgcacgtggtaaaaatcccgcaatgggaggaaacgacgagcgcgaaaacaccttgaaccagttgcttacggaaatggatggcttcggttccaacagtggtgtgattattcttgccgctaccaatcgggtagacgtattggacaaagccttgctccgtgcagggcgtttcgaccgccagatacacgtagatctgcccgacctgaatgaacgtaaagaagtatttggcgtacacttgcgcccgatcaagatagatgacacggtagatgtagacttgctggctcgccagactccgggattctccggtgccgacattgccaatgtctgcaacgaagcggcattgatcgctgcccgtcacggaaagaaattcgttggcaaacaagacttcttggatgcagtagaccgtatcatcggtgggctggaaaagaaaaccaagattactacagaagccgaaagacgttctatcgccttgcacgaagcgggacacgcgtccatatcctggttgctggaatacgccaaccctctaatcaaagtgacaattgttcctcgtggacgtgcattgggagcagcctggtatttgccggaagagcgtcagatcacaacaaaagaacaaatgctcgatgaaatgtgtgctacgctgggaggacgtgcagccgaagacttatttatcggccgtatctctaccggtgcaatgaacgatctggaaagagttacgaaacaggcatacggtatgattgcttatttaggaatgagtgataagctgcctaacttatgttattacaacaacgaagaatactccttcaaccgtccatatagcgagaaaacagccgagcttatcgacgaagaagtaaaaaagatggtcaacgaacagtatgaacgtgccaaaaagatcctgtctgaacatcaggaaggtcacaatcaattggcacaattactgattgacaaagaagtgatctttgcggaagacgttgagcgtattttcggaaagcgtccttgggcttcccgttcagaagaaatcatggcagccaaagaaagccaggatgcggctaaagcagaaaagcaacttgctgaaaagctgaaaggggaagaaaaagagataaaagaagaggaagccaagaattctgcggaagaaaaagctgcggaaagaaaagttaccatagaaggttctaaagtcactgtagagaaaaatacatctacggaaccgactaccgataaagaaaaataagccactgtttaatcaattaaaaaacgagctgattgtgaacaattttataaaacgagccatcacaggtgtactctttgttgctattttggtaggatgcatcctctatggcgcatttagcttcggcatcttatttaccaccattagcgcactcgccatttatgagttcggacaactggttaatatgcgtgcggaaggggttcagataaacaaggctatcaatatgctgggcggcgcttatctgtttcttgccatcatgggattctgcattgacgcggctgattccaaaatctttatcccctacgtactgctattgctgtatatgatgatcagcgagctgtatctgaagaaagagaatcccgtgcttaactgggcttattccatgttcagccaactctacatcggacttccattcgctttactgaatgtattagctttccacaacgatccggaatacagcagcataagttataaccctattctaccactatctatctttattttcctttggctgaatgacacaggtgcttattgcatcggttcgcttatcggaaagcacagattgttcgagcgtatctctcctaaaaaatcatgggaaggttctatcggcggcggagtagtagcgatcggagtagccttcatacttgctcattatttcccagtgatgtccatgccggaatgggcagggctggctttagtcgtagttatattcggcacatggggggatttgacagaatcactgctgaaacgtcagttgcacgttaaagattcgggaactattcttccgggacacggaggaatgctcgaccgttttgacagttctttaatggctatcccggcagcggtcgtttatttgtatgcactaacctggttctaatccaatcgctttatcggattatcaaacaaaccaacatcataaaaagaaaaggtcgggaacttcataggaagtgctcccgacctttttcacatacagcgaatcatagttagggatattcctaaaataataaaatttaaggcaactacttcattgcgaattagttgccttttttgtatctttaagcattccccccaaaaaacggtttgacggccaaaacgggggtaatctaaaataaaaacacatggtaaagatacaaaaaatctcagaaatcgaaccttgtttaggttttaccgagttcgatatgcttaaaaaatatcgtcaaagttttgcaacgagtgaattaggtcgactccattctctattccctttctcggaactggcccgacaaatgcatttgaagtcctctgctttgggtcgtaaaagttatttttctcccgaaggtaaaatagccttgatggtcttgaagtcctataccaacttttccgatgcacaactgattgagcatttaaacggtaatattcattaccagttgttttgtggtgtccagattgatccgcttcatccactaaccaatcctaaaatcgttagtgcaattcgtcaggaactagcgaatcgccttgatgttgagtccctccagttcattcttgccgagcattggaaaccttatcttgagaaccttcatgtctgtatgaccgatgccacctgttatgaaagtcacctgcgttttcctactgatgccaaactcttatgggaaggtattgtatggcttcatcgtcatctgtgcaaacattgccgtacattgcacatacaacgtccccgtaacaagtatcttgatgtacgccgtgcctatcttgcttatagcaaactgcgtaaacgcaggaaatcacagactcgtatgattacacgaaggttacttcaattattggaaaagttacttgaccagctggagcagcttcattcatcctacaggaacaggcttgcactatcctctgattaccaaagacgtttctcggtcatacagacagtccttgagcaagggaagaatttatttgcaggcaaaaaagtgtccaaccgtatcgtgagtatcgaccggcattaccttcgccccattatcagaggcaaggaaaccaaatccgttgaattcggagccaaagtcaacaatatacagatagacggaatctcctttatagaacatatctcctttaaggcttttaacgaaggagtacgtttgaaagactgtattcatctgcaacaacaactgaccggggttagggttaaggcgcttgcggcggattcaatctatgccaataatgccaaccggaaattttgtacaaaatatcatataagtacttcctttaagcgtaagggcagagctgccaaagatgagccgcttcggagaatcttacggtcggaactcagccgcgaaagagctacccgcctggaaggaagttttggaacgcagaaacaacattactcactggccaggataaaagctagaaacaggaaaacggaagtactttggattttctttgggatacatacagccaatgcggtatgtatgatagaaaaggtcgaaaagaaaaaaagaaaggcagcataatctgactaaaataacaggaaaaacaggagaggttttaacttcccctaaaaaagacatgtacataatgcatgggtgggaaggaaaaaacaagaatatgtaaacaatattctacaaaaaagatagaagactgggagagttgaacgaaaaaatcaagagaaaagctttgctttacgtgagcttttctcttgattttttagaaagaggaacatttactgaatatccctagttagaggttatcggattgaagaagtggaatgcacatccttcgccttttccggcactcctaccggatggtcgaaatcaagaacgatcactcttccttctccattttcttttgaatttatagtaactttaaaacctttcatcgtagtttcaccatcctcttccgtcggatagaaatcttccagattataggaaacccgtccccatccccaataaccggtcacatcatcatacgtattataacgcaactccagatgaacataaccgtctttagcaacatttaccgtctccggtgctgatgggtcaccaggttcaccgggttcagtcgtatccatcagattctgaacaaggctgatacgatgtttcgtcgaacgaggcaggttctgatggaaaataacattcaggtattttccccctagccacatatcaccttgataaatcacaatcggatcatttccaaattcctcttcttcttccgtagttttcatttcttccacccctttagtcaagacatcctgaatgccttccatttttacctgaacacccttctcgtctttcatatcagccaaaggattaaagaatgcaaccacccgttcaccatctaccggtctgtaccaaggaatggaagagctgaccggatcaatgattccccaacggtcaccctccagaaaataaccgccgccaccggttgtacgtacggtcgcccagtcccaactgaaatctccgatagaataataatcgtcgtcatcgtcacatgactgcaacattggcaccaatgccaacaatagaattcctaaaagccatttaaattttttcatgttagatcctttctttttcaaccttctgtcttataaataaaaaagccgtgcaaatattgcatcggctttacgtttattcagaaaaagaaagttattttttcaacagctccaacatcttgcgcgccgcatgacgaggagcgcctgccggacctagccgttcagccatacgctcatattccgccagcatttcactcctgcacttgtcatcttcaagaatcttttccagttcactctgcatattcttcactgtcatcgtatcagccaccaattccttcacaacctcacggtccgcaatcagattgaccaaagaaatgaacttcaccgtcagaatatgacgcctcaagaacgaaatcacttttccaatcggagtgtgataacaaactacctgcggaatgcggaacaacgctgcctcaagggtagccgtccccgaagtaaccaaagccgcatccgcgtgttgcatcagacgataagtctgaccgaaaataattttcaccttcgactctcctatatgctgttcgtaatattcaggagcaatggaaggagcgccagccagaacaagttggtagtcagggaaagcagaagccgccttcaacatatccggcaagttatcttttatctcctgttttctgcttcctgccaaaagtgcaataatcggtttattctccaactgattatccgcaataaactcagccgtatttttcggatgcgcttcctgataggccgtcacttcatccactgtaggattccccacataatggataggatagtgatgctttccttcaaagaactcgacttcaaaaggaagaatggagaaaagctcgtccacatcacgctttatattcttgatacgatattctttccaagcccatatcttcggagaaatataataatatacgggaatctgcgtctttgcgtggacaaatttggcaatatccagattgaatcccggataatctaccaaaatgacaacatccggattccaggaaacgatatcttccttgcaacgtctcatattggcaaagatagtacgcagatggagcaacaccggaataaatcccatataagccaactccttataatgtttcaccaacgtaccgcctacggcagccatcagatcaccgccgaaaaaacgaaattcagcttgaggatcttccaccttcaaagctgccatcagatgagaagcgtgcaagtcaccggaggcttcgcccacaatcagataatacttcatagagttgagagttgagagttgagagttgagagttggtagggatagatgaccaatagagtgtcatgctttctttttcaactttcaattttcaactaattaaaccatttattaagttcatcaataaagtgatatgccgtcacatcgacagtcgtcggagtgatggccacgtagccgtttgctaacgcccaatgatcgttcctttcattttcaggttcatgatcggtaaattcacctgtcagccagaaataattcggatcgctcagacgagggcaagcagcccactcgttcgtccaacaccctttggcctgttcacaaatctttattccttttatatcagccgtatccgggaaattcacattcaagcaagtcaaaggaggaagccctttttccagtatcatcgcggcaattttgcgtatataaggtcccgcagcttcaaaatccgcatcgggagcatgattacacaaagagaatccaatggaaggaatcccattcagacaaccttcaaacacaactcccatcgtaccggaataatgtacattggtagccgaattatccccatgattaataccacccactaccaaatccggtgtccggtcgagtactgtattccgagccagtttaatgcaatcggtcggggttcccgaacatttgtatacagtcagcccaacttcttttttgaccaattgataatgaacaggttgtgtcaccgtaagcgcacatccgctaccggaacgcggtgaatccggcgccattaccacgatttctcctaatggacggagaaacttaaccagctcactaatacctttagccataatcccgtcatcatttgaaacgagtatcaacggcctcttattttccatatatccaatcctttccttttttaattattcgcacaaaagtagcaaaaagaagccggaatgccaacattggtcaaatataatccattgaagtttcgtaagttcaaccgacaaactcaattcgcctgcggtcattttccggtcagaacgactttctcagccggatacaagccggacattgagttattcatgcggcttgtttaatacattatacagcttacttaatacatttatacggtaggtttaatgtatttagagggtaataataacccgttttacgtatatgagccattcggttcacgtacgaaaacctgaaagtccacgtacatcatccgaacgaatcacgcacgtgaaacgggaacgcaatgccttccaaatacattagcagtaccccgtctgtacgttacatctaccggctttggctttaaataccgcatcatatacagagaacataaccactaaacagtcaaaaaggactttcttaatacataggaatacaaaagtcagattacgcatcaaaacactaatagtcaatcatataatacacgcgaatgcccaaacagtaatggattaaggtgataataaaaggccttatttttcctgttatcaccttattatcaccaaattacatttaactatcagcatgttaagtctaaaaagtgataataaaaagagagttttaaaactctatgaaagcaacggaatctcctcctctcccacccgtttacaaatcttaatcttctgcaagcgagcaaaaaaaggaatagatatccaatataaatatgtatatttgcaaactcataaggagaaaaacagatgacgaacctgcaagattttgtaactgtttcgtccgacagttattaacaaaacaggtgacttatcaacagaaattgcaaagtttctcttttttcgtaggcgctctaaggatttatcacttatttcgctgccaataaatttagagaatatgggaaaaattattgctttggccaatcaaaaaggtggtgtaggaaagacaacgactacgattaacctcgcagcctcacttgccacactggaaaaaaaggtactcgtgatagatgccgacccgcaggctaatgcctcttccggactgggagtagacattaagcagtcggaatgcactatctatgaatgtattattgacagagccaacgtacaggacgctatcctcgacacggaaatcgattctttaaaagtaatctcttcgcacatcaatcttgtaggagcagagattgaaatgctgaacctcccaaaccgcgaaaagattctgaaagaagtgctcactcctttgaaggaagaatatgactatatcctgatagactgctcgccttcattgggacttatcaccattaatgccctgacagcggcagattctgtgattatccccgtacaagccgaatatttcgctcttgagggtatcagtaagctgctgaacacgatcaaaatcatcaaatcaaaactgaatccggctctggaaatcgaaggattcctccttacgatgtacgactcacgtctgcgtcaggccaatcagatctacgatgaggtgaaacgccacttccaggaattggtgttcaacaccgttatccaacgaaatgtcaaactgagcgaggctcccagctacggtgttccgaccattctttatgatgcggattccaccggcgccaagaaccacctggctcttgctaaagagattatcaaccgaaataaataagagaagaagatatggcaacacagagaagaaatgcattaggacgcggacttgacgccttgctctcgatggatgatgtgaaaaccgaaggttcttcttccattaatgagatagaactggcaaagattgctgtcaatcccaaccagccccgtcgtgagtttgacgaaacagctttacaggaactggctgattcgattgccgaaatcggtattatccagccgatcaccttacgcaaaatatcggacgatgaatatcagatcattgccggagagcgtcgttaccgcgcttcacaaaaagccggactgaaaacaattcccgcttatatccgcactgccgacgacgagaacatgatggaaatggcgctgattgaaaacatccaacgtgaagacttgaatgccgtagaaatcgcacttgcctaccagcacctgcttgaccagtatgaactgacccaggaacgcttgagcgaacgtatcggcaagaaccggacaaccatcgccaactatctgcgtttattgaaactgcccgctcccatacagatggctttgcagaacaagcagttggacatgggacacgcgcgtgcgttgatttcactgggtgatccgaaactgcaagttaaaatatttgaggaaatacaagaacacggatattcagtccgcaaagtagaagaaattgttaaatcattaagcgaaggagaagctgtgaaaagcggtacgcggaaaataactccgaagcgtgccaaacttccggaagagttcaacttactgaagaaacaactctcaggctttttcaacaccaaggtacaactcacctgctccgaaaaggggaaaggtaaaatcagcattcctttcggcaacgaggaagagttggaacgtatcatggaaatcttcgacacgctaaagaagtaaatgacaagaaaaagtaagaaatatcagttactcgtcatcaccctgcttctctgtattttacaggtggcagggattgatgtgtatgcacagtccactgtcaccccgatgaaaagggacacgactatcacgcaacgggaagccccgaaagcccgtgcccgcagacatcgtgaaccggctgtacaagattctttgaagaaagactcgatccggattgttccctccaaagagcttgtacccctcgacagcctgtcggccgccagtatacaaatagccgacagtctggatgcagccaacaagaaagaattgaaaaagattgagcagccggcatccatcatggttaaggcagacagcgtgccgcccgcaaaggatatcaacaaaaagatattcatcccgaatccgaccaaagcaacttggctggcagtcgtatttcccggcggcggacagatttacaaccgcaaatactggaaactacctattatatatggaggatttgccggatgtgcatacgcattgagctggaatggcaaaatgtataaagactactcacaagcctatctggacattatggacagcaatccgaacacaaaaagttacgaagacttgttgccgcccaacgccacctacaacgaagagcagttgaaaaatacaataaaacgaagaaaagatatgttccgtcgttatcgggacctcagcatatttgcatttatcggagtttacttgatctctatcatcgacgcatacgtagatgcggagttgtccaacttcgatatcacccccgacctgagtatgaaagtagaaccggctgttattgacaataacaaccaattccgctctaccagtttgaagaacaaatcggtgggattgcaatgtgtattacgattttaaaaaacacaatttagattgatcttattattgaagcatgaagaaattagttaactattgttcgatgattttccttttactagtggcaacatcgcaagtaaaagcgcaaagtgtagatgtagtgattcgtgaaaatggaactgagcgcaaagagagcattgacttgcctaaaagtatgacatacccgctcgacagcctgttgaatgactggaaagccaaaaactatattgacttgggtaaagattgcagcacagcggaaatcaaccctctgttcagcgattcggtttacatcgaccgtttgtcgcgcattccggctgtcatggaaatgccctacaacgatatcatacgcaaatttatcgatatgtatgcaggacgtttgcgcaaccaggtttctttcatgttaagcgcttgcaacttctatatgccgattttcgaggaagcattagatgcatacggacttccattggagctgagataccttccgattatcgaatccgcgttgaatccttcagccgtatcgcgtgccggagcttccggtttgtggcaattcatgatcggtacgggaaagatttacggactggagtcgaatagtcttgtagacgaacgtcgcgacccaatcaaggcgacttgggctgccgcacgctacctcaaagagatgtatgatatttacggtgactggaatctcgtgattgcagcctacaattgcggtcccggcactatcaataaagcaatccgccgcgccaatggtgaaactgactattggaagatttacaattacctgcccaaagaaacacgcggatatgtaccggcctttatcgcagccaactatgtgatgacttattattgcgatcataatatctgcccgatggaaaccaacattccggcaagcacggataccgtacaagtcaacaagaacctgcacttcgagcaaatagccgacttgtgcaacgttccgttggaccaaatcaaaagtctgaacccgcaatataagaaacaaatcattccgggtgataacaaaccgtataccctccgcctaccgatcgaagccatcagcacttttatcgacaggcaggatacaattttcgcacatcgtgcggatgaattgttccgcaaccgtaagaccgttgccgtgaaagagatcagtccttctacacgaagggctacgacagcagttgcaggtaaagggaaaccaacctattacaagataaaaagtggtgacactttatcgtccattgccgagaaatacggagtcagagtgaaggatatacagcgatggaacggaatgtctaacacgaagattgcagcaggaaaacgattgaaaatatacaaataaacagtttcccgcttgcaccgttcggaaatttgcttatttttgcaaaactaagcaaatgagaggataacaattatggataatctgcccccaaaagaaatagctgatgaagatatgatcaatcaggcgttccagcaactactgaatgattatctcagcacaaaacatcgcaagaaagttgaaatcatcacgaaagctttcaacttcgccaaccaagcgcataaaggtattaaacgccgttcgggtgaaccttacattatgcacccgattgccgttgcaagtattgtatgcaacgaaatcggtttgggctcgacctccatctgcgcagccttattgcacgatgtggtagaagataccgactacaccgttgaagatattgaaaacatcttcgggccgaagattgcccaaatcgtagacggactgactaagatatccggtggaatatttggcgaccgcgcctcagcacaagcagagaacttcaaaaagttactgcttaccatgtcgaatgatatccgggttatccttatcaagatagccgaccgtttgcacaatatgcgcacactcggttcgatgttgcccaacaagcaatataagattgcgggtgaaacgctctatatttacgctccgctggccaaccgtctggggctctataagataaagaccgagctggaaaacctgagcttcaaatacgaacatcccgaagaatatgcagagatagaggaaaagctgaacgccacagccgccgaacgcgataaggtctttaatgatttcacagcccctatccgtacacaactcgataagatgggattgaaataccggattctcgcccgtgtaaaatcaatctattccatctggaacaagatgcagaccaagcatgttcctttcgaagagatctatgacttgctggcggtccggattattttcgagccccgcaatatggaagaagaactcaatgattgttttgacatctatgtatctatctccaaaatatataagccgcacccggatcgcctgcgcgattgggtaagccatcccaaagcaaacggctaccaggcattgcacgtgactcttatgggtaacaacgggcaatggatcgaagtccagatccgtagcgaacggatgaacgacgttgccgaacaaggctttgcagcacattggaaatacaaagaaggaggaggcagcgaggatgaaggagaactggaaaaatggttgaagaccattaaggaaatattagatgacccacaaccggacgccatcgacttcttggacactatcaaactgaacttatttgcttccgaaatatttgtgttcacacccaaaggggaactaaagactatgccgcagaattcaacggcactcgacttcgcattctccctgcataccgacatcggtagccattgtatcggcgctaaagtcaatcacaaattagtgccgcttagtcacaagctgcaaagtggagatcaggttgaggtattaacttctaaatcgcaacgtgtgcaaccgcaatgggaagtttttgcgaccaccgcccgcgcccgcactaagatagcggcaattctccgcaaagagcgcaaagccaatcaaaagataggtgaagaactactgaatgagttcttgaaaaaagaggaaatacgaccgggagaagctgtcatcgaaaagttgcgcaagttccataacgccaaaaatgaagaagaactgttggcagcgattggcagcaaagcaatcattctgggggaagctgacaaaaatgaactgaaagaaaagcaaaccagcaactggaagaagtaccttactttctcttttgtcaacggcaacaaagacaagcagcaagaggagaaagaacctcaggaaaaagagaagatcaacccgaaacaagtgctcaaactgacagaagaaagtttgcagaaaaaatatatcatggcagaatgctgccaccctattcccggtgatgacgtattgggatatgtggatgagaatgaccggattatcattcataaacgccaatgccccgttgccgccaagctgaagagcagttacggcaaccgcatattagccacagaatgggatacccacaaagaactgtcattcctcgtatatatatatataaaaggtatagacagcatgggactgttgaacgaagtgacgcaagttatctcccgacagcttaatgtgaatatccgcaagctgaccatcgaaaccgaagacggtatatttgagggtaaaatacagctatgggttcatgatgtggaggatgtaaagactatctgcaacaatctgaaaaagattcagaatatcaaacaggtgagccgtgtagaagagtaaattctatttttaaacgagaattatcgcagattaacgaacgcaaagagaatatgaacaatctgcgcaaatctgcgtttaattcttattattcttataccatgccgtctttacttgcgaccatctaattctcctttaatagccagaagctcttctttaatcgccttcaaccgattcatgatctcataattccggacagtagcttctttattatctttcaaacgttggcgagcgcccggaagcgtcatgcctttctctttcaccagatgatagatgagcccgattgtttccacatcttctttacgatattggcgtattcctctaccggcagtcttgggggaaatctgcggaaactccttttcccaaaaacggagcagagaagtattgactccgaacatatcggcaacttcccctatggaataatatagtttcagttctttatccgtattaagcataatacccctgtcttttttttagaattaatcgaataccttaccgtggttggcagccaactgaatcatcttttcgtaatcctcagcacttaaatccatgaaataatagttcaccggattcaccacctgtcccttcacgtgcacttcataatggagatgcggcccggtactctttcccgtactgcccacttttccaatcacctctccacgcaccactttctttccgactttcgtattaaacccctgcaagtgagcatatcgagtgagatatccaaagccatgatcaatctcaatggtattgccatatccggtttcccaccctacctttaccacagttccgtctccggtagcatacacatccgttcccggatgagcggaaaagtccattcccgcatggaacttcgtcgtaccgtaaataggatcaatacgtgtaccataaccggaagccgtctgacgaaggtccttattggaaataggctgaatggcaggaatacatttcaacatttcatcatgattcttgcacatatccaccacgtcatcgaaagatttcgattggatatagagccgtttagatagaacatccaacttctgagtagtattcaccaccagtttcgcattcgctaagtccatcagttcctcataacggttcgtacctccgtaaccggcctgacggatggcgggagaaacgggatcggactgcaggattacccgatagaggttatcatcacgctgctgaatatcctgaagtacccccatagcatcgtccaaacgacgggaaagtacattatattgtgccaaaagacggctgttttcaattcttaattccttctccgatggagagccgaagataagaagcaacacgataaaacagcccgctcccacccccataccatagaaaagccgacgcaaaatactaagcgcacgctgccgtacggtggggtaaattcgatcgtatgtctgcgtctgtggattatagatatagtaaactttgcgcatctttttgaaaatatttcgcttgttaatacggcaaaagtaataaaaacgagctatctttgcactgtttttacgaatttatgagctgtgatttatgatttattggagattcctcccttctctcatatcccacagccacatagttcataattcataactcataattcttcattatatgttgactgcaaaagagatcagagattcattcaagaatttctttgagtcgaaaggacaccacatcgttccgtcggctccaatggtgattaaagacgaccctaccctgatgtttaccaatgcgggtatgaaccagtttaaagatattattttgggcaaccacccggcgaaatacaaaagagtcgcggactctcagaaatgtttgcgcgtaagcggaaagcacaatgacttggaggaggtaggacacgatacttaccatcataccatgttcgaaatgctcggcaactggtcgttcggcgattacttcaagaaagaagccatcagttgggcatgggaatatctggtagatgtcttgaaactgaatccggaacatctctacgcaaccgtattcgaaggaagtcccgaagaaggattgagccgtgacgacgaagccgcttcttattgggaacaattcctgccgaaagaccatatcatcaacggcaacaagcacgataacttctgggaaatgggtgatacaggaccttgcggcccttgttccgaaatccacatcgaccttcgtccggcagaagaacgtgccaagatttccggccgtgacctcgtaaaccacgatcatccgcaagtaatcgaaatctggaatctcgtattcatgcagtataaccgtaaggcggacagcagtctcgagccgcttcccgcaaaagtgatcgacaccggtatgggattcgagcgtctttgtatggcactccaaggcaaaacgtccaattatgatacggacgtattccagccaatgctgaaagcgattgcagccatgtcggacactgaatacggaaaagacaagcagcaagatatcgccatgcgtgtgattgccgaccacatccgtaccattgcgttctctatcacagacggtcagttgccttccaacgctaaagcaggttatgtgatccgtcgtatcctccgccgtgccgtccgttatggctatacattcctcggacagaagcaagcattcatgtacaagttgcttcctgtgctgattgagaatatgggtgaggcttatccggaactgattgcacaaaagacattgattgaaaaggtaatcaaagaagaagaagaatcattcctccgcacattggagacaggcatccgtctgttggataaaacaatggaagataccaaagctgccggaaaaacagaaatcagcggtaaagacgcctttaccttatatgatactttcgggttcccgctcgacttgacagaactgattctccgtgaaaacggtatgatcgtcaacatcgaagagttcaacgaagagatgcagcagcagaagcaacgtgcccgtaacgctgccgcaatcgaaaccggtgactggatcacactgaaagaagggacgaccgaattcgtcggttacgactatacggaatacgaagcttcaattcttcgctatcgccagatcaggcaaaaaaaccagaccttgtatcagattgtactagactatactccgttctatgcggaaagcggtggtcaagtgggtgataccggtgtgttggtaagcgagttcgaaacaattgaagtgatcgacaccaagaaagaaaacaaccttccgatacatattaccaaaaagttacccgaacatccggaagctccgatgatggcctgtgtagacaccgacaaacgcgctgcctgcgcagccaatcactcggccactcacttactggacgctgctctccgtgaagttttgggtgaacacgtagaacagaaaggttcgttggttacaccggattccttacgtttcgacttctctcatttccagaaagtgaccgatgaagaaatccgcaaggtagagcacattgtcaacgccaagatacgtgccaacattcctttgaaggaataccgcaatattcctatcgaagaagcgaaagagctgggtgctatcgctctcttcggcgagaagtacggcgacagagtgcgtgtgatacagtttggatcttccatcgaattctgtggaggtacacacgtagctgctacaggaaacattggtatggtgaaaatcatctccgaaagttccgttgctgccggtgtccgccgtatcgaggcttacacaggagcacgggtagaagaaatgctggacactattcaagacaccctcaatgacttgaaagctctcttcaacaatactccggatttgggtatcgctatccgtaaatacattgacgaaaacgcaggtttgaagaagcaggtggaagacttcatgaaagaaaaagaagcagccttgaaagaaagactgttgaaaaatatacaggaagtaaacggtgtcaaggttattaagctttgcgctccactgcctgcagaagtggtgaagaacattgctttccaacttcgcggtgaaattacggaaaacttgttcttcgtagccggaagcacggacaatggcaaaccgatgttgacagtcatgttgagcgacaacctcgtagcaaccggcctgaaggcaggcaacttggtgaaagaggccgccaagctgattcaaggtggcggcggtggtcaaccgcactttgctaccgccggaggtaagaatgccgacggactaccggcagcagttgaaaaagtgatagagctggcaggaatctaaaatagaaaactgaaagtctagtttataataaagagaaacttgggggacaacaagtttctctttattgtttgaggatagtgtcttattatcataatcacatgacaaaaaacatatatggaaccgaataaaagtaacataatcatataccaaaccgaagacgggcaaactcgtatagaagtaagaatggaagaggagaccgtgtggctttcctaacagcaactatccgatctttatcaaacttcaagaacccgagaaccaatgtggtggaacacatcaaacatatttatgaagaaagagaatcagatgaaatatcaacctgtcggaaattccgacaggttcgaatgcaaggagcaggtaatgtcagccataatcaagcgatggataaagcgacccaagaataccacaaattcgaagtacgcacactgtcacctgtcgaacaggaatatttaagaactattcaactgctaaataaaaaagctaaagataagaaccgagagaaaccgacaaaataaattcattgttataagacatctagaaaagattttctatctttgccaacagattaattattttcttatccttcaaataaattaaataagtaatcactaatacctaaagagcaatgagaacgcctatttatctatgcttgctgttaacctgcatgctggtttcctgtacccctacacaagaaaaacacgaaacagattacacattgtacgtaaatccgttcatcggaaccgacttcaccggaaacacgtatcccggtgctcaagctcctttcggcatggtgcagctcagccctgacaacggacttcccggttgggaccgcatctccggttatttctatccggacagtaccattgccggattcagccacacccacctttccggtaccggagcaggagatctgtacgacatctctttcatgcctgtcacccttccttataaagaagcggaagcgcctctaggcattcattccaaattttctcatgaagatgagagtgcctacgcaggttattatcaagtacgattgaaagactacaatatcaacgtcgaactgactgcaaccgaacgttgcggtatccaacgttacacctttcccgaagcccaatccgccatcttcctaaatttgaaaaaggctatgaattgggacttcactaatgattcttatatcgaaaaggtagactccgttaccattcaaggctaccgcttctctgatggctgggcacgcgaccagcacatctatttccgcacccgtttctccaagcctttcgagaaaatggaactggacactacggctattatcaaagacaacaaacgtatcggtacagccgtcatcgcccgcttcgacttcaataccaaagaaggtgagcaaattctcgtcaacactgccatttccggcacaagcatggacggtgcagccaaaaacctgcaagcggaagtccccgaaaacgacttcgataaatacctggctgaaacgaaagcgaattggaaccgccaacttggtaaaatcgaagtaaaaggcagtaacgaagacgacaaagtaaacttctacaccgctctctatcattcgatgattgccccgaccatctacaatgatgtggacggcgcttactacggtcctgataagaaagtgcaccaggcagacggctgggtgaactacagcactttctccctgtgggatacctatcgtgcagcccatcctctcttcacttacacagagccggagcgcgtcaacgacatgataaaatctttcattgccttctacgagcaaaataaccggttgccggtatggaacttctacggaagtgaaacagacatgatgatcggctatcatgccgttcctgtcatcgcagacgcctatctgaaaggtatcggtgattttgatgcggagaaagcattgaacgcttgtgttgcgaccgctaatctggacagttatcgcggtatcgggctttacaaagaattaggatatattccatacaacgtgacagaccattacaacgctgagaactggtcattatctaaaaccttggaatatgccttcgatgattactgtattgccgaaatggctaagaagatgggcaaacaagacattgcggacacattctacaaacgttcccggaactatagaaatctttataacccggaaacctctttcatgcaaccgcgcgatgacaaggggcgctttatcaaaggtttcaaagccgacgactatactccacacatctgcgaaagcaacggatggcagtatttttggtcagtacagcacgatatcgacggattgatagaccttgtaggcggcaaaaacagatttgccgagaaactggatagtatgttcacctatcatccagcagcagacgccgaacttccactgttcagtacgggaatgatcggtcaatacgcacatggaaacgaaccgagccatcatgttatctaccttttcaactcaataggcttcaatgaacggactcaatattacgtggcaaaagtaatgaacgaactttataagaacgagcctgccggtctttgcggcaacgaagattgcgggcaaatgtcggcatggtatgtattcagcgcaatgggcttctatccggtaaatccggtcagcggcaagtacgaaataggaaccccgctcttcccggaaatgcagttgcatctgacaaacggtaaaacatttaccgtactggctcctaatgtaaacaagaagaatatctatatacagtcaaccaaagtaaacggacacccctacgacaagacgtatatcacccatgaacaaatcatgagtggagccaccgtagaattcgagatgggcagtaccccaaaaacaatcggagtcatattcgaagaaaaacggccttaagtatatctgaactaatatctattgagagaatgaatgaaaacttcgatgtaacctacaaagcattattccgcaagtactaccccagcctcatcttctacgccacccgcctgataggggaagaggaggcggaagatgtggtacaggatgtctttgtggagctatggagacggaaagacagcatagagataggcgaccagatacaggcttttctctaccgtgccgtctacacccgtgccctcaacgtgttgaaacatcgcaatgtggaagacggctactgtgctgctatggaagaaatcaaccaaagacgtgcagaattctatcagccggacaacaatgaagtaatccggcgaattgaagacagagaactccgtaaagagatctacaacgccattaatgaattgccggacaagtgcaaggaagttttcaagctaagctatctgcacgaaatgaaaaacaaggagatagccgatgttctcggtatttcactccgcacggtagaggcccatatgtacaaggccttgaagtacttgcgcagccgcctcgatccgctttggataattcttttcttatttttatgagaagactgataagtgtttttatgtcctgaattgtattattaatatgaaggaaaagaaaatgagtaatctaagtgaagatataatcaacagatatctgacaggacaatgttccgaagaggaacttatcgaagtgaacgcttggatgaaggaatcggaagaacatgccctccggttatttcgtatggaagaaatttatcatttaggtaaattcggccgatataccgatggacaacggatacttcgtgcagaaaaacagctttataagaaattggacgaagagcaagggaaacggaataaaatactgcgcatacatcattggatgaaatatgcagcagtcattgctataatattcgccatcagcggtggaatcggatattggtctcataatggatccgaccagcaaatgatggttgcagttgccggtgaaggtattgtgaaggaagttgtcctgccggatggtactaaagtctggctaaacaactcggctaccttaaaatacccgcgtgagttttccgaaaacgagcgtaatgtgcatttggaaggagaagcttacttcgaagtaaccaaaaaccgccacaagccattcacagtacaaagtgacgccatgtgcgtacgtgtattggggacaacattcaatttcaaatgcgacaaacgttgccggatagccgaagccaccttgattgaaggtgaaatcgaagtgaaaggcaacaaagaagaaggacaaatcatccttactcccggacagcgtgcggaactgaacaaaagtaacggacggctgaccgtgaaacaagtagatgccaagttagatgcagtatggcataacaacctgattccattccaaaaagcggatatatttgcaataaccagaacattggaacgtttctatgatgtaaagattatactgtctcccgatatacaaccggataaaacttactccggtgtactgaaaaggaaatccaacatcgaatccgtattgaaatcattgcagaactccatacctattaattataaaattgtcggaaacaatatctttatttctcccaaataagaagtacaaggtatcacgacaaaactaaaaagttattaataccatgaaattgaaaacattcctaacagtaggatgtttaggaggtttattcacacttagctcctgtacagcccccacgaatacgaaagactatagtgctcacgtcaaccctttcatcggtaccggcggacatggtcatactttccccggagcagtagttccgcacggcatgattcagcctagtccggacacccgaattgacggatgggatgcttgttccggttactattatgccgactctactatcaatggcttctcccacacacacgtcagcggaacaggttgttgcgactacggagacgtactgtttatgccaactgtcggcaaacaacaatacctgactaccgatcctcaaagtcaaatactagcctatgcttcttctttttcccacgagaatgaagtagcagaaccgggatattatgctgtttttctggacacttatcaggtaaaagcagaaatatcggccaccaaacgtggagctatccaccgttatacttttcccgaaagtaccgaatccggtttcatcattgatttagattacagcctgcaacgccagaccaactcggaaatgaaaatcgaaataatcagtgatacggaaatctgcggacataaaaaaacgacctattgggctttcgaccaatatattaatttctatgccaaattttccaaaccattctcttatacattgattgcggattccattaccatggatgacggtaaacggcttcccatatgcaaagcgctactgcatttcgagacaaagaaggacgaacaggtgcttgtaaaaacagggatttctgccgtcgacatggaaggggcacgcaagaatgtcgaatcagagattccgggatgggatttcgataaggtacgcaaagacgcacgtcgggcgtggaatcaatatctgtccaaaatagacattactacctcggacaaagaagataaagccatcttctactctgccctctatcatacgggaatcagcccgaacctgctcagcgatgcggacggacgttatttaggaatggatctcgaagtacatcagggagatacgataaacccggtgtatacggtattctcattatgggacaccttccgtgcattgcatccgttaatgacaattatcgcccccgatttgaacaatcaatttataaattcactgataaagaaacaccaggaaggcggaatatatccgatgtgggacctggcttccaactataccggaaccatgattggttaccacgcagtccccgtcattgtagacgcttatatgaaaggataccgtaatttcgacgccaaagaagcctacaaagcctgtctgcgcgcagccgaatatgatacaaccggcattcaatgcccggaactggtacttccgcatctcatgccgaaagcgaaatattataaaaattccatcggctatattccctgcgaccatgaaaatgagtctgtagccaaagccttggagtacgcatatgacgattggtgtatctctatttttgcagaagcaatgaacgattttgaatccaaagccaaatatgaacgttttgccaaagcatacgaattctatttcgacaaatcaacccgcttcatgcgcggacttgactcgaaaggagaatggcgcatcccgttcaatccgcgtgcatccacccaccgcaacgatgattattgtgaaggaacagcctggcaatggacttggtttgtgcctcatgatgtagacgggttggtcaatctgatgggcggtgaggatgcattcgcccagaaactcgattcgttattcacagccgattcatcactcgaaggtgaaacgacatcgtcagacatcagcggacttatcggtcaatatgcacatggcaacgaacccagccatcatgtgatccatttgtataattacgtaaatcgcccgtggaggacacaagaactggtagatagtgtctatcgcagtcagtatgccaacagtgtagacggattatccggtaatgaggattgcggtcagatgtctgcgtggtacgttctcaactccatggggttctatcaggtgtgtccgggaaaaccggtatattccatcggacgtcccgtgtttgacaaagcagtgatcaatctgcccgaagacaagacattcagtataatagtaaaaaacaattccaaaaagaataaatacatcgaaagcatatcactaaacggcgagtctctgaatactccatttttcaaccaccaagacatagcaaatggtggaacaatggaaatcaatatgagcgacaaacctaataacaaaacacttataccatgagaagaacattactaattgcttgtgtacttggttgtacactctttgccaaggcaaaagattggacgcagtatgtaaacccgttaatgggttctcagtctactttcgagttatcaacaggtaatacttatccggccattgcgcatccttggggaatgaacttctggactcctcaaacaggaaaaatgggagacggatggcaatatacctatactgccaataagatccgcggtttcaaacagacccaccagcccagtccatggattaatgactatggtcaattctccatcatgccgatagtcggaaagcctgtatttgacgaagagaaacgtgccagttggtttgcacacaaaggagaaacagctactccttattattataaagtatatctcgccgaacatgacatagtgacggaaatggcacctacggagcgtgccgtccttttccgtttcactttccctgagaatgaccattcatacatcgtaatagatgctttcgacaaaggttcgtatatcaaagtgattcccgaagaaaacaaggttatcggctatactacccgcaatagcggtggagttcccgaaaacttcaagaattactttatcatcgagttcgacaaaccttttacctataaagcgacggtagccgatggcaatctgcaagaaaatgttgccgaacaaacagctgaccatgccggagcaatcatcggcttccgtacacataaaggagaacaggtgcacgcccgcatctcctcctcttttatcagcttcgaacaggccgccacaaacatgaaagagctgagcaaagacaatatggaacaactagccaagaaagggaaagatgcctggaatcaagttttgggcaagatagaagtagaaggaggaaatctcgatcaatatcgtacgttttattcatgtctgtatcgttccttactttttccacgtaaattctacgaactggatgctaccgggaaacctattcactacagcccctacaacggacaagtattacccggttatatgtataccgacacaggattttgggatacattccgttgcctgttcccattattgaacctgatgtatccttccatcaacaaggaaatgcaggaaggacttatcaatacgtacaaagaaagcggcttctttcccgaatgggcaagtcccggacacagaggatgtatggttggcaacaattccgcctccgtcctagtagatgcctatatgaaaggagtcagagtagacgacataaaaactttgtatgaaggcttgcttcacggaacagagaatgtgcatcctcaagtttcttcaacaggtcgcttaggacacgaatactacaacaaactgggttacgttccatatgacgtaaaaatcaacgagaacgctgcccgcactttggaatacgcttacaatgattggtgtatttataaactagccaaagagttgaaacgtccccaaaaagaaatcaaccgctttgccaagcgtgccatgaactataagaaccttttcgataaagagtctaaattaatgcacggacgtaatgcagacggtacattccaatctccgttctctccgctgaaatggggtgacgcctttacggagggcaatagctggcactatacttggtctgtattccacgatcctcaaggacttatcgacctgatgggcggaaaagatgaatttattaccatgatggactccgtattcgccgtacctcccgttttcgatgaaagctactacgggcaagtgattcacgaaatccgtgaaatgaccgttatgaatatggggaactatgcacatggcaaccagcctatccagcacatgatatatttgtacgactatgcaggtcagccctggaaagctcaatactggctacgtcaggttatggacaggatgtacactccgacaccggacggctattgtggtgatgaagacaacgggcagacttccgcctggtatgtattttcggcattaggcttctaccctgtttgtccgggaacggacgaatatatcataggtgctccgctgttcaagaaagccacacttcattttgagaacggcaacagtctggtcattgacgctccaaacaacaacaaaaagaatttctatatcaactccatgagtttcaacggaaccgattataccaagaattatctttgtcatggagatttattcaaaggtggcactatcaaagtagatatgagcaaccaaccgaacaagaacagaggaacgaaagaagaggatatgccttattctttttctaaagaataaaaaaacttaagacataataaaatcctatttatcaagattccggctgataaaaaacaacctgaaagtatcttcttactttcaggttgtttttatcttctcttaattactttttcactacctttgctcacacaaacaaaattcatgagcatgaaagaaaaacttgacttttcagaagttccttatcaatactcgatgtgccttaaccggcaatgtccgaaagccgacatatgccttagacaactcgccgaacaaagtataccggaaaaggtcgaacattggacaattattagtcccaagcgtttaactactacaaaaggagattgtccttattatcgttccaatatcaaagcgagctatgcaaaaggattcatcggcatcttggaaagtctgcctcataaacaaatggaaaatgtaatcatacatttaatgagttttttcagtcgaagaacctattatcgtgtccgcaaaggtgaacgtttactctctcctgccgagcagcagcaagttttgaatgtccttaaatattgtggtgttttacaaccacctaagttcgatgagtatatcgaagcttatgattggtgacaagctttaaatgctatgacagtaacattctattggcacagttatgccatcgaggtggcacgcttgtgacaaggtgatagcacagtcatgccactacggtggcacaaatcattaaaaccaaggaaataatgccaccttgagatgttcctccgtatgatatccgtgtaaccctacatcccccaaagcctatcccgactacccgctttttggctatagcttatagcaatgacttgtacgacttcttgtcgcactgaatgcttaaagacacaaaaaggcaactaactcgttataaattagttgccttatttttattattttaggaataacccttattaatacatctgaagtaaacagaaacaaaaatctcctttttctttgttttgtatcaaacaaagaaaaaggagactgccttatacaaatgttatatttatctcataattgactaaatggaatcgcagaaataccctctatgtgaaacctcatctttaatgaatgaaaagattccccatatacgcctgccatcattttttataatctctaaagttaccggctcattctggtaatatatataattaggataaaaataactataatatgagaaagaagcatccatcttttttccttcactcttatcaccgctaaacgttaataaggaataataaacattgtaatattcccatccataagttacttgcccattttgttgctcatttttaaagctaactgccaatcctcctataatttggtcattgtcatccaaataatagcgacgcgagttatcggcaacaatcgcttgtatttcttcttctgtataagtcttgtctgtcggaagaacacgtatgatacaagtcgccttcaaattcagaatatcagtaaccgtaattgtagcaacaaggtctgtatccgaattcttaagtatacctgtgattttaactgctcctaaagcagttacggaaacttgtatatcctgattatcagagacaactttatagccgccgttaccatctacaacgtttatcgttacagcgaacgactttccaacagcaccttctgcttccacattcgtttcgtctagtttgagaacatcagtacgatgcgctgatatacaaacgtcaaatacagatatcatgcccaaaacatcagtaacggtaacagctgcagttgtaggagtttctatgtcttctggctttcccattatggtaatcgttccgctttccgaagcagaaacagttactttcggattatcagatacaaccttataaccgccattaccctctattatattaactgttgcatacgctgatatattaaggagagattcaatctccacttctgttttatccaattctattacatctgtaaggcctaccagtatcggtttcttttcataataaccatttttatcggataccacgatataagttttaccaatactgataccttttatcatgatctttccgtctacaacttccgcctttgcaatattttcattagtcgaaaaagcattgtattcgccaccaccttgcaatatttcaagctcagcgtcggtatcttctccgattttcacaaataatgcatcttcagcaaccatcaattcaggattcgaaggcggtgtatctattcccggttcatcatcattgccacagctgaaaaatgacagtaccacaacagtcatcaacatggttttatatataatcttcatactcatatctatttttattttcatatataatattattcccaatccttaggatatttcactccatcatatacaagttcatcatcaaaaaatacttctgcaatatcttgcatggaaggtaattgttgatattcaaaattcaatctatacggatccatagcaaaaatcatgtgcgtcttataccctccatcgaccatccattgcaattggctcttctttgctataaatctaccggtgtactcttgagaatataatcccatattacttttgggtagtcccgggaaagaactgctcatattaccggccaccccataatcacgcactgcataagttacatactcaccggattgtatcgtgcgaccatccacatatattgacggtaaactaaaaatagtaccataagcatatactacaatgtccttttcaggctgaagtttatgtacctcataggcaagacgcgaacaggccgatgcagccggtctgacaaatccgggaaccgtcaaatataaattataatcattataatcagcatattcttcatccaaaaaaataccatccaaattataggcatcgcacatcgccttaatttccaaagcaaattcccgacaagtttcaggggccagattgcataaacccgaaccatcatgatcgggcattatacccataaatactttcatcccatgatcctgtaaaggtttcagataatgctcatttttatcaagcaatgcctgtacattagcattatacttcattgtaacctggccggtctcccgattatacatcatgttgcctgagaacataatcaaagcgtcaatcagcaacttcttactattcttcaaggtgaaacttaaattattgagcggattggtgtcatttacttccatacaactgaagattttcactccgcttgctttgttgcaatcaggcatgccggttttgtctgtaacaaaaaccaaccaggtattttcctcctgcactaaatccaaattaccggaaatcacgtttattttcaaaggaataacatattttttatccattgaaagttcaccatttgagacaaaagaaatctgaagcggagaagatttcttttcaccggctttcacttccaataccgcttcctccggtaacattacttgtgattggggaaacaattcatacgaagcagagtttctgacattatagtcttcaagcacgttttcgtcataaacaaccgacacagcacaatccgatgtcgttttttttgtcagattaagatacaataacaaatcaccggatgatctgaattcaacatttgaggccaattgtttcccctggctatcagttaaatatcctaataaatcatcatgaaattcatataatttttcatcaacagtacccactgtcatgtcatcttctgtacaagaagaaataaacaggcctcccaacatcaggagagccatacattgcagtttcaatagattcagatatttcatattcttcatttttgatctacattattgatttttctccggtaattcaagaggcttccatgtcaaatccttattagcagtaagattatttccacttgcataatcagttatgctcatcccttgcccctcatcaaatttccaataagcaactaaaccctccgactttggatccacataataaaaatgattcttagcttgaatttcctccactgtcaaaacacgattccaaatacggcattcacaaatatcaccatccaaataacgcgcagcttcataagaataaccaatccagaaaccgcgtttaagttcagtttcttcttccaccggataagagtatccccaattcaccgtggtacgaatagttttattcccatatccccttgacacaccgtccacaaacatttccgactgcccggtatttccgtcataagtaaaagcaatatgtacccatttccccgtttctattgtccagttgggatttgtagcattagtggaagtcgtagcaagctgaagctgatttcccggaagtccctgatcactgaaacggagcagaaactttccttctattcccatcaaagtactgattttattattcagttcatcggcacgaacaagtgcttctaccgttattgtcttcaagcctatcaatacaccggcatgaagaaaattcggcttcaaccttctttcttttatattggccactgtattgattaatgcagcacctttaaatacataataaactgtacgtgcgctttccaaaagttcccaatcagactcagctacagttacaggcaatacatagaccaaattactgttcaacgccgtcaagtccttaaaatgcaatacaacatcagtagaaacaacacttcccttattaattatgacattcgactcttttacttcgtagtaatcctccggcagcgcaacagctgcatcataataaatctcattatatgttgtaaccaatgacggttctgccttatatacaatatgtatatcactctccaccggctggggaatggtagcctgaaaagtctgcaacatttcgtctacaccgggtttaagcaaatgtgttgcaacctttttggacacatctccggtaatcaccttgctgtcaaaacgctcggcatcgtcctgacaggatactacatttactgccaacagcaatacaaaaagactgaaaattgagttatatttcttcatattaaaaacctccttttatttaactgacggattaagcgatgaaattattttcttggtatatttatagtttttatccgcatagaagtagtcatttgagatattataaataccgacacctcccacctgtcttcctccttgaagcgatatcgcccattcagcaacgatatcagcagcaagtacacttcccagatatccggttatcttatcggaagtatccaacgatggcatagtaactaccattcccactggactatcatctacaccttccgccgttgcaagagaatattcataagtaagcatgtctttattagtaacttgtgttcccaatacccaaatcataccacactctttcaaaaaggttttgaagtacagattctgaggtcttcctttgaacgaaaccagtttacctgaattccggatatgccaatcctttataattccagtaaacatactctcattcattatatactcatctctttcttcctcagtcatatgagtacttttccgtcctgtataactcacacaaataccatcataattatattttagtacaattttcaacgcattcaacaaagaatccatcaggaaatcttcaaatctttctgatacaggttctacactcaaaacatccccctgcttcctattataagcaacttttatagaatcaaaacttatgtcataaatcactttcgtacctttttccatctggatttctgacatttctcttatttcccaatctgataagttatctggacatagcaaggacacaacatcaagactatcgggtaaatcaacaagatgctgtgcacgactgacggacttcttctcgctattatcaaaccatgcatacacttttttatgttccgtatcggctttgtattggcgtaagttctccaagtacttggtatataactcaggattctgctcctgaatgttaggttgtttgatatctataccttcaatatctgtccaatcactgcatgctcctaatgtgaagcttgtagtaaagaacaataaggttgctattttaaatttattcttcataatatttagattttattcatttgacaatctaggattgcagtcccaccatatgtgagtcgacattttatctcctcctggtaacgtactgacaatttgctctacattaactttattcgtattatattcttgttgcggatatttcaaccgacgggcaaatttaccttcagcaatctcgttgcttttgttattaggagtggatagcaatctgggataaccggttctgcggaaatctgcccatccttccaaacttaacgggaaatttgcaatccatttttgcgtaatgatacgttccagattaacttcattgtcagctcctgaccattttacagaaactgcgcttcccggtaatgttacagtatatgtgtctttaggatctttataactgctaggtgctgtcgttccttccaaatagctttctacgttactaaccccatgttgaccaaatgacaaacggatacctgctttataataattttccggtgtgtctttggtatcccatcccaacagggcagcttctgctctcaggaacataacttcggcagcattcatccacattaatggtgctgtagccgcaacattcatatttgaatacattttggcatcaacagcagtatgctcgtttccaatacgtaaaccatgataaccgtttgttatcgatgaaccggcaaatgtgctcttcaatgcataaacagagcgacggggatcttcataagcattcatgtatgtaagtaagtcggcaccgattctggagtctccccaaccgaaaatagtataaaacggattgagggaaactttcataaatgcattatcgtcattattctccattacaccaacctggccattttccgtactgatagcttcttttaccatttgttctgccaatgtagcatccgcatagcgaatacgtatagccatacgcagttttagtgaattggcaaactttatccacttttcaactttaccaccaaagacttgatcagcattcggagaaaagtcatttgtacggttggcggtcaaagtagtgatggcatcagataattcctgaaacattttggtgtaaacatccttttgtgtgtcaaaaggagctgtcagtttaccatcctgtcctacctgtgaataaggaataggaccatacacatctgtaacacgaacgatggctgttacttttagcacttccgctactgccaatgggataggatcggtagtggatttttttacttcagcaagattggagtaaatttcaggcatgatatccagatagacctttccgttccaatcttctgactgattaaaatatgagaacgaatttccccatgttttagagtctgccatatagccgctgaaaacaccgcccaacaaacattcggagaactgtgccagatgttctcctacaggcacgattacactttgcatacccacgagtgctgcccccaatttgtgggcatcccgttccatttcgtcatcggtcacttcgtatgggtttttattataatccatataattgtctgtacaggaagttattgaggttatagtcaatcctcctaacagaaataattttataattgatttattcattgtactttaataaaagaggttaaaacttgaatcgaacgttgaatcctaagctgcgtgcgctgggagtcatgaagttatcaatcccttggtaatagttgccggtagttgcgaccgcttcagggtcaaatggtgctttacaatacaacatccaaaggttacgtcctaccaatgataccgtgatgtctgcaattccccataatttatttttaggaatagtgtatccaatagacgcttcctgcaaacgtacattagttgcgctatatgtatagtattggggaataccgttctgtgctccgacaaccgaataccatttttgtgcattaatcacatcactgccatttacggtaactccaccgaaatcgcgtgcggcagccgaagcttcagatactccgtaatagtcaagataagactgagttgcagaataaacaatgccgccaaaacgtgctgaaagcataaaaccgaagttcagattcttccatttgaaatcgttacgccatgaaagattgcatttagggaatacactgcctaacttaatatcttctgatgctacactggcaacttctcctttttcattcacatatatgttgccgttactatcacgttgcagatctttaatggagtaaaggtctcctaagctgccaccttttttcagaacaaatttagcatctcctaagccacctacttctaaacgatccaatgttatgatagcacctgtttccggatgtttgtaattttccatcaattcaagtatttcatttttgttggcactgaaagtaacagtggaaccccatctgaattttccattccaatcgttgtcgtatcctaaagataactcgatacccttattgcgtacactacctgtttgtacataaattgtagaatattgagaagacactgagatgtttggttcgaatgtctggttatatgtcttagttgtgtacaatcctaagtcgaagttgaaatggtcaaggaaacgtgcagtaatacctatttcccatgaatttgtcttttccggctttaattcatacattggataatgagtctttactgcccatttttgtgctttctgatcccattcgtatgtaggatttgccagaaaacgtgggaaaggaagacctactgaagcataagaagcccttaacttcaagaatgaaatctgcttaggcatcggtaacagctctgacaaaatcaccgaaccaccaatagaaggatagaagaaagcactctttacagaattcggaccagctaattgtgaaggccagtctgtacgtcctgtcaatgtcagataataggtacttttatatcctaattctacactggcgaaaatagattgtgtctgttcacgataaccggattgcgagcgtttggtcttgtcattatccaaatggaaaacattgaatacattggcgataccttttgtatcactgataggaccttcattgctaaatacatcttgctgcatatctgaataagatgcaccgagattagcttgtaggcttaatacttctttaaatgttttgttaatgttgaccatgaagtctgcataagtctgtttgtcattggtttggctgattccataaagaccgttctttgaattttctaccagaatttcattactggttgcatataatttgcgggtatatctggaatccgaattatcaacacgtacacgacctgaaacgcttaaccaatccaatatcttgtaatttaatgctgcactcaacatgtaacgatctttatccgtttcacgtaagttacgataggcgatccagtaagggttttgcccggttagaccggaaaaatcctgtggccaatattgagtgtagattttacgtgtggtgtcatagcgttcgtacatcttaatgtcgttccagtcatcaccacgtggaaataaataagcggtgactagaggattggagtaagtcccttgattgaccatattgcggtcgttttgtttaacgtaattggcgcttacgtccaaagtcatcttgtctttcaagaaagaagtagtatttcggaatgtaaaattataacgattataatcattattcggcaccatgccgtcagagtttattgcacttgcagaaaagtaagtttgattacgttctgttcctgtagaaagagcaacagtttcggtcgtaacaactcccgtttgtaaaaaatcatctacaggagaataacccatataattcgaagaattgagtttatgcccccaacttttttctaccgaagaggtattggacaacaaatcccccgttccgtaacggttttggaattccggcattctgaaagggcgcagaaattctgtattttgacttacagttaattgcagtcgtccttcttttccttttttagtcgtgatgacgattgctccattggctgcatgacttccgtagagtgctgctgcggcggcacctgtcagtacagacatggattcgatatcttccggattgatgtcggcaatagcttctgttgttcctttagagtcattttcttgtccgccttcacttcctaaattgaacatgggaaccccgtcaatgacatataatgcattgctggattggtttatggcttttgttccacgcatcacaactttacttgcaccaccaacaccggaagatgaactgttgattgtgacgcctgctactttaccggacaaagcgttgatgaagttggcgtctttattggtgaggagttcgtcgcttttaacttcttgcacattataactcaaagcttttgtcgcccgtttgatacctaaggctgtgactacaacttcatcaattacttgtgtgtcatccattaacgttatattcaaagaagtttgaccgtttaatggaatttcttgggttttgtatccgatataagaatacacgataatagggctattgcttttagtagtaactttgtaattaccgttcaaatcggtgatagcaccatcggttgtgcctttaaccaaaatactgacaccaatcaatggttcgccttttgaatctaatacctgccctgttatagtgcgttctttgtttgtttgctgttgattggaattcaaatcttctttttccgacaaatagattatattatcatctatcttgtaggcaatgtttttgttgtttaaaagtttattcaggacttgctccaatgaagcgtcttttactttgagaggatccacagcagtagttgacagtttgtcattgtagaaaaactgatacttggattgtgactgaatttgcttgattacagctcctaaagttgtacggggagttgataaggtcaactgtgcagtagcccattgtaaaggaactgccataaacaggagaatcaataaagttcgaaatagctttggctttcgaagcgaatgtttgctttccatacatttaatttaatggttataactttttaaaactctataaaggagagtgccgactttctctccttctgttaataaaacaataatgatataataaacacttagtctgttttctcttttttttctaaaaatgaaaatattgcaatgtattgttaaacagagaatgattaaaataccaagtacttggagaacttacgccaatacaaagccgatacggaacataaaaaagtgtatgcatggtttgataatagcgagaagaatccttccagttatgcacaacatataacaagtctacctgacagcattgatattgtcggtttgatgtatccttcagagttggcagcttttgaaaaagaagaaataatgactttacaacaaaagggtacaaaagtagtttacgccatcagttatgatgagatacataagcaatatgaggacattatttctacccaatcagaagctgaaaatgaaaatacatttgactattttctttcaaaagaaatagaaaagcaattggcatatgctgccccctttgatggaattatactaaagtttatcggacaaaatccgaaatatatgacagccgaagataaagctgcttacactgccagtcaaaatatctttttcaatgctgcattaaactggattaataaaaatgagggaaaattcctctctttacaaggaaaacctcaaaatgtagtagataagaatattctatccaaattccttcatctcatcatagagatgtaccaagtaacagataaaaataaatttactcttgccattcaagactgtttggaaacaggagtaccaacagaccgtttcatcatggctgtttcaactccttctttggacacgtctgacacaagtacaggcttcataggcacagaaagggctattattgaaactgcttattggataacagcagatactcaagaatatgataaatgtggcatagctattaataatgtccaaaatgattattatcaaacaagcgggaattaccacaatgtgaaaaagaccattaatataatgaatccagcccccaccaaataattaaactattatgaaactacaaaaattatatggcattacgttaggattattgactttcatctctacaggatgcaatgatgatatggaaaacttctccaataatattttcatgagttctgttagtcctgaaaacatcttagtcaaatctaacatagaatccgacgaacgtactttccagttggaaattgcaaaaccggaagaaagtgatattaattttacaatcaaagtagaccctgcattagtatctgcttacaaagatatctactatacaaatgatgtggaaatgttgcctgaaaaacattactctttctcaaatatggaaggaaaaatatttgcaggaagtgttatctccgcaccaatcacagtctacttcaaagaaattaatcaattgaatattgacaaagtgtacatactccccgtcagtatagacaatgctaatattggcattttagcttcagcacaaactttctattatgtatttaaaggagcgtcactcatcaataaagtagcgaatattaaagaaaacaatatctatgtagaatggaaaaatcctgaagcagttaacaatttaacaatgatgacagcagaagcattaattcgcccacacagctttgaccataacattagtacattaatgggaattgaaggcaaattcctattccgattcggtgatgatggcgtgccagcgaaccacttgcaaatagcaggaacctcaagtgctacaaacatacacattaatcgggatgtaccattggaagaatggttacacattgtcatcacttatgacgctgaagcaaaaaatttaaaggcttactacaatggagaattagttactaatagtccaatgaatattggcgctattaactggggaattcctcattctgacgaatctaatggcaaaccacgttgcttctggataggttattcatacaataatgaacgttggttagatgctgatattgccgaagtacgaatttggaaccgtgtattaagtgaagaagaaattaatgcaaaagatcatgcatacgaagtagatcctaactctgaaggattagtagcgtattggaaactgaatgacggtcttgatgaaataaaagattattccgtaaatggtaataatgcaaccccttcttcaacactgacttgggtagacgtagctcttccggctaaagaggattaataatcaacaattttaattagaattaagtcatgaaatatacaagatttatcaaatcatctttttggattgcgctacttgcctgtacaagtaacgtatttaccgcctgcgaagatgacattactatatcatctgaaaataactcatttggtaatatagaaggtaattttggctacgtaaaatcagccgccggagcaaaagctctcactgccatagccattaatggtgacaagcatggtacaggacatttatactttgaactgaacaaagccaccaataaagacatcacagtaacatttaaagttgatgagtcagcgctaaatacctacaatcaagtaaatggcaccaactatccaatgtatccgacagataaactttcattggaaaatgaaggaataacaaccattcccgccggaaagcgcaaatcctcttctgtagagttggatattcaacctggaggtacaatcggtacaacgtatgcggtagcagtatcagctactgcttctgacggaattgaaacttcgagcaataacgaatcttatatttatcttgtaactccacaagctactctacctaatacggaaaaaggaagagtcaaaacaatctgttacatagaggtaaataatgaaaatatattgaatgcaggtgaatataccatggaaaacagtaagaaaccattcttcgatatagtcaatgtttttgccgccaatattcgtttaaatgaagagggaaagccatatgtacattgcaatccgcaagtaacttttgttttggaaaatgctgataagctaattcgtccgttacaacaaaaaggaataaaagtccatttaaccattttaggcgaccatacaccggcgggcatgagaagtttaggggatgaagccgctaaagattttgccaaagaactaaaatcatatgtggacatttatggatttgacggtataagttttgatgatgaatggtcaaactatgaacaagtgggagggcatcccggattggtagttccatcacaagagcaatacagccgcctgatttacgagtgccgacaaataatgcctgataaacaaattggggtatattggtgtaaacaggaaaatggtgaaccttctatcaattatccattaggagaaattgaaggtaaggatgtaaatgatttgttagattatactgtttttggaaactataatttatggaatgaattatcacatattgataaaaccaagcaatgcccatacgcaataaatgtgacagaagataatttttatcctaattcagtctatttgtctaaaatcaaaaacgaatggggatactttgctatttataatttaaaagcatcaaaagtttatagttcaaagtttaatgaaataggtcaaacactatataatgacaacattatatggactgaacaagtatatggaagaactgattttactccttcacgttcatcagctattaaagattacaactattatttaggaaattggaaaatctcaacagctcaacaatataattggacaggaagtaagtgggaaaataaatttagcaaaatggagttcaacatcagaatagaagaaaacattaaaaatgaatcctattatgtatatggatgggcaccatatggcaaattgctagaacagtatccgttaaccatgctatatactaattctgatactaatccactcagtatcccaatgccacaagttctccattattcagatgccacagatccactaatgtggaaaatgtgttgggccactcctggacgcacagccaattcatggacagtaggaggaaaagaaggagaattcagagcaatactaaacagcgacggttcaattaccttaaaaccatttccattcaacgataatagaaactgtacagctgtcccatattgttctaatgatggcggaaatacatggttatacactcatactattttccaagaagcacatccgacaggacttaattacgaattgacaaaacaataaattatccaacacaaattaataggggtatccgaaaggataccctcttactattcaaattagctattccacctgcccctccggataattcaccaaatacaacgttttcgttgcccgagtaaaagccgtgtacaaccaacggaaataatcaggagtcaaatactcgtccgtcatatatccctgatccaaaaacacattctgccactgtccgccctgtgctttatgacaagtcaccgcatatgcatacttcacttgcaaggcattatagtgcggatcgactttcatttttttcatccggtcacgtttattggcaatatcggcataatcctcaagcacagtataaaacaaacggtcattatccgctttcgacaatgctggtgaatctgaatgcaaagtatctaataatagattagcatccagttcaaaatcattctggtcgggaaatctcaaggtgacctccgcaaaatggaatccatacatctcacgagtgcgacggacacgacggacaacagcaatctcaccattggctatgaaatccatttccttatacttctctgtccaataatagttattcttggtaaccatcagcatatcgcccgtattcaattcatcttcacgccataggatttgcgcacgtatcccattattatataggttcgcacgtttattggaacggcaaataacgattgtctcatccatcccgtcgtgatcatagcagtttgtcaattcttctatcagttctgtgccaggcgcttgcttgatatcaggaaagcccgttatctttatcttaggtagagagtaacattcgtcttccgctatcaactgcctcaactgcgtagcattccacaaaataccggactcttgcacttggcggactacctgaatcaggctaatctcacggacttcaagcccatatcctttcaacgcgtcggcaaaaagtgccggactcaattcctctcccaccggaggaagctgtgctgtatctcccatcaacaaaagacgacacccttgtcccgaatagacaaattgtatcaagtcatccagcaaacgtcccgtaccgaacacgctgccggacagaccctcgttggaaatcatggaggcttcatccacaataaacaaggtgtttgtagcaagattgtcatttatggagaaattagtaaactcgttggaataggactgttgccggtatatcttcttatgaatggtgaaagcaggatggcctgcatacgccgaaaaaacttttgcggcacgtcccgtaggagccaacaagacagacttctgctgcaactgttccatcgttttcaccaatgctccgaccagagatgtcttaccggtaccggcataacctctcaagataaaaacttcatccgccagagtagataacaggaactctgaaagagattttacagcaatttcttgctctaaagttggttggtaaggaaaattttccttaatttgcctttctaaatagttatttatcatttttgtacgagaaaaaagttcgaggaactatcgtatttaaatatatttattctatttttgcgatgcgaatataacaactaaaaacataatttatcatgaaaacagtatttaatattgtattggtgctctgtgctgccgcattggtttacatctgctacgccagtatcatgggtcctatcaattttgaaaacgcaaaaaaagacagagaaaaagcagtcattgctcgtttgattgacatccgtaaagcgcagcaggaataccgcacgcttaatcacggaatgtatacagacaaatttgatacgctgattgacttcgttaaaaatcaaaaactaccgttcgtaatgaaaatgggtatgttgacagacaagcagttggaagacggactgactgaaaagaaggcaatggctatcatcaacaaagctaagaagacaggtaaatatgacgaagtcaagaaatggggactcgaaggtttcaaacgtgatactatgtgggtagccgttatggatactatcttccctaaaggattcaatcctgactctatgagatatattccttatggaaacggtgctcagttcgaaatgaatgttaggaatgataccgctaaatccggtgctcctgtattcttgttcgaagtaaaagctccgtacgaaacttatctaggtggtcttgacaaacaggaaatcattaacttaaaagatgttcagagcaaattgggtagatactgcggtttgatggtaggttctatcgatactccgaacaatggtgccggtaactgggaataatgattgattttactaaatcacaacaatatactttatccatccgtcttagtacggatggattttctttttctatctataacccgattcacgataattcgctgtcgacgatagagaaagagacggatacttccctgtctcttactgctaatctgaaagctactttccgtgaatcggactttctaaaccactcctacaaacgagttaacatcatgatggctgataagcgttttactatcgtgccactggagttgtttgaagaggaacaggcggaacttctattttaccacaatcatcagaaacgggaaaacgagacggtgatctgcaatattctcaaaaagaataatgtagctatcattttcggtatggacaagagtgcacatacctttctgagcgaacaataccccgaagcccatttctattctcaatctaccccgctcatcgattatttctccgtcaagagcaggctgggaaacagtaaaaagatgtacgtttccatacatcgggaagcaattgacatttattgttttgaacggggacatctgcttttagccaattcttttgaatgcacgcatacggaggaccgcatttattatctgttgtatgtctggaaacaattagagttcaatcaggaaagggacgaactgcatctgaccgggacgcttccggataaagaaactctgatgaatgaactgaaaaagtttatattacaggtatttatcatgaatcctgctactaatattgatatgcaggccttattgacatgcgaataaccggtggttaacggagagacgataaagcagtctgttttttatttcttcttaggggtaatgaagccaataggattacgcggcttgtctgccaatgctttttgcacctgcaattcggctaatgtctgatttatcaattccaattgcatacgagtgtcgtcattgatgtcgttgtagttcatgtaccggattgatagaaggacttaacagtaactgacgaacagcaacaaaagcacgcataatgcccatgtttatttgtatggccgtctttgatttccgttttttcatctgtcaactgaaacataaaatcaataggaaaacgatctgtattacgtttcaccgcttgatttaaagcgcggggttcaactccatacatttctgccaaatctctatccagcataaccttttgtccacgtatgtcataaatcttactctgtattacttcgagttgttccatcttattctactttggtgttattcttttagcacaattgaggcaggcgattgatatactgtcagacttgggctgtattctattggggaatatcttttctgcgaaagtaagcaaatgtgttcaatgtaacaagtaagcgccaatcaatatatattgctatatcaaaaagaatctgtatctttgaccatgaaaagtctaccaaaacagtctgattcatcaatgtcgttactatactgttacttccaagcaggggagactggcttttcattagtgatattcaatacattataaaaggttatgatcttatgcgagtaatcagcggaatttacaaacgaagaagattcgatgtgccacgaacattcaaagcacgtcccacaacagattttgccaaagagaatctgtttaatgtactcaataattatatcgactttgaagaaggagtcagtgcattggacttgtttgccggaaccggaagcataagtatcgaacttgtatcgagaggctgcgaccgtgtaatcagcattgagaaagaacctgctcatcacgcgttcatctccaaaataatgaaagaggtgaagacagacaaatgcctgccgatacgcggggatgtattcaaattcatcaagagtagccgcgagcagttcgatttcatctttgccgatcccccttacgctttaaaggaactggagacaatccccgaacttatcttccaaaacaatttactcaaagagggaggcttattagtattggagcacggaaaggacaataactttgaggaaaatccgtattttgtagaaaggagagtatatggaagcgtgaacttctctatctttcgggctacagcaatggagccaacaaacggacaatagactctaccgctttttgtctccacgaacgcttcacccaattctttaagaatatctgcgtgctttcccgttggtcttgcaggaatatctctttcatctcaagtgctgtgttcacatcgtatataaaggcattcacctcaaaattatgctcaaagctgcgaaagtccacattggtggagcctactgtagaaagcatatcatccgaaaccataagtttggaatgcaggaagccttttttatagaaataaaccttcacacctgcttgcatcacatcagccaggtaggagcaggaaccaagatgggtgattctattatcggcatgttccggcaacatcaaacgtacgtccactccggataatgccgccgtctgcatagcagccaatatttgttcggtcggcaagaaataaggtgtttgcatatagaagtatttctttgcaccggttatcgctacggtcaatccctgcatgatttctttccaaggaccgataggttcgctggtaacgatctgtaccagtgaatttccataagagtctattttcgggaaataacgggaagcggttatcagagtacggtctacgaaataccaatcaagcagaaaagccgtctgcaaaccgtgtaccgccttgccttctatcatgatgtgcgtgtctcgccagattccccaagagaaaccgcgcatataacgttccgccagattcattcctcctacaaagcctacctgcccgtcgataacaacaattttcctatgattccgataattcaccctacttgtgaataagggaaagcggactttcaagaagctcctcacctcaatacccgcattacgcatctcctcaaaaaagcggttgggaacatgccagcaacctacgtcatcataaatcacccgtacctcaactccctgcatggctttctctatcaatacatctctgaccatacgcccgatagcgtcatcctcaaatatataatattccatgtgaatatgctgcttcgctttttgcaattcacgcagtaaagactgaagtttagtataaccttccgtatagacggctacccggtttccttcgaacggaaaggcttggttggtatgctggaatagtcggataagacgggaatattcgtattgcacttccgagcaatcttgcgccaagtattccgccatcggcttcttgagaagacggtcataactcttcctcccgataatccgttcgcgacgctggctgcgcccaaagaaaaaataaaagacaagacctacaatgggcagaaaaagcaagatcagtatccaagccatagtcttaaccggattccggttgtcaaggataatgatgacaatcgtaccgatgatagccccgaaatagagaatatcaaaagccaccgttgcaatctgaccaagtatgtaattccaatctatcataagaatctcttctaaaagcggatactaagcaacaaatatagagtaatttatcggataaacaaaaaagtcccggtaacaactctcgttcattacaccgggacttcctttttatctgtattcacttatcctcaaaaacgcatcatccgtcccggtccaccgccgtgtggtccacgcggtccacgatgaccacctccgtcaaatccgccttgacgcatattgccacgagctcctttatttccaaagacgttcagacgataagaaaaacgaagcatacagtagctgtttattccattatactcggaaacggaacgcatatcggccgtcaacgaacgactgatattggactgctgtctcagaatatcgtatatctctaaactgattgtcgcggcattaccttttaggaagttctgggcaatctgcgcattccagataagctcattcttattcatgctggcgtcacgatagccacgacgtgcattgttggttatgtttgtagacaatgtcatactccaaggcaaagaaatattggtgcttgctccatatccgaatgtatatggctcctgattgttctccggacgcaactcattacgttcgaaattatagttgatcgaaccgttaatagtaaactcaaaccaatcattacggaaagttccattcagattttcacccaaagtcaacgttgtactcgtgttcttatcattcacctgtgtactttcgttataaagataagccactgcattagtatagttaacaagagagaacgaattgatagtaaaacgtttatccttcagagccgtattaaatccgaacatacccattgcattccagttaccattaatattctctggttttactgtcaccccaccggttgtctgattataagtagtagaattggtaatgctgttttgagtcatattaaggaaggcgtgcgccatcattccacgttgtttgtctccattataagtattatagaacaaccgcatagagtgagaaaaagaaggtttcagtcccggattacctctacgaacatttaacggatttgagttatcttcaatatccaagaggttttccatacttggctgactagcacgccctcgataagtaaaccgcaattggctcaccttagagaaacgataacggaaatcgatattaggcgcaaaattgaacacctttcttttgacaatcgtatccacatcatcctttctataagtcaacgttgtgttttgtggctgcaaagatactccaaagttcaaccgatatttctcacggattatgttcaaccccgcattaatatcgtgattataatatttatactgagcatatttactcagactcatatccttattgctttcgtaaccttcaggtagtccatcaccataattccaaatccagtcttgtcctttatcagcatcgggaagcagactatacgtacttctgtcactttcgctatatttgtattgaaacttataccggaactgcaaaaaagtagcctttgcaaccggttcgttataagtcagttctgccgtataatcataattttgagtcggagatgttatatactgcttacgttcatcatccgattttcccgctgccgtatcaaaatagcgtgttaacgactcgctaaactgttcactatcattatctccataactaaatgtgccacgaaaagttatattccttccctgattattcaatcttctgttcacttgtaaagaagcattagctgacagactattactttcagtcgaagactcgctattgctggcattcacacggatatcatccaaaggatcatccgtcgtattccaaatacttttatccagaaagtcattaggattggataccaaattgaatgggtcactcttaaaagttcccgactcggatttagagtaactgtcagactttccatacgaaaaattcggacgaaagattatattggtcagtgtatcaggcttccattccaaacggaagtcagctttgaagttcgtatttttacttcgattcttgctatttgagttcgagtaagaatttccattctgcaagaaacgttccgaatagttggtagaaagcgcatcacggtcgctaaagttataacgggcactacctcctaattccaatttctccgactgggaagcaaagttgactcctaacattttggttgcagtcagtccattactgtttcggaaacggggtccaccacctccggaaaatccctgatcgtttacattattagctgaaccaatcaaggagaactgactgttatcaacaaaacgattcaacatcaagttactcccataacggtcttccgtaccgacagccgcactcgcatttccaaaccagccttggttcattcccttcttcaccttcaagtcgagaaccgtttcttcttctccatcgtcaattcccgtaacacgcgccaagtcagatttcttatcatacgtcttcagtttatcaatcatgttaaccggcaagttcttcagtccggttttcacatcaccgccaaagaattccttaccatccaccataatcttcttcacttccttaccattgatcttgacattcccctcatcgtcaatttccgcaccgggaagttttttcaccaattcttcgagcatagctccttcaggggtacggtaagcggaggaattatactccaatgtatcttctttcacagtcacttggggagcttcggcagtaatcaccgcctccttcagcataacagcgtcagactccagcgctatcgtccccacacgcttttccgtcatgttcgcataaagatgaagaggtacatactttgtgaggaaaccgatataggataccttcaaaagatatttcccggccttcactttgggaagagtaaaccaaccttgattattactggcaataccggcagcataagcgctatcgggcaatgacaacaattgaactgtagcctgtgccgccggctctttcgagtcggactctacaacacgtcccgaaacagtaatcaccttattttgtgcaaaaatagagaaggtgctcagcaatagcaacaccaacccgactgaaaatcttttcatttaccttatttacgattatattagtagcaatagcaatgctcttttgacaaataagatcgtaaaaggtttaatcgggaagataattatcttttaaagaatcgctcaacgagcgcttttttcagaccaaactccagacaaagcacattaaagactaggaaagtaagaaaagaagaagtatcaacattgatgacatctccttgcataacgcgccataacatccctccaaagacaaacaggaacgtcagaaagatcgcattccgaacagccgaattacgaatctgcaccgtttcacgactttcatgcttactaaaagcaaagattatcaataaacatcctgccatcatcagcaactttgtacattctttataaaacaacagatttctgtcggtcaccatcccttgcatcactagaataaaaggaatgaacagagctaccaacaagacaacatatcccaaaggacgacaatagacaggtaataatgctttcataattgaatgattgaacgttttaacgagacaaaagtaagcaaaaaagataattttatatacatttgcagacagaaaagcaaaagaatcatgagtaaacaagaagttattctctgtgaaagcttggaaacaagcctgcaccgtgccatcgaacagtgtccgcacgacaaattattcattcttacagacgagcatacccgctctctctgtctcccttccctaaaggaaacatcattgctgaaagaggctgttgaaatatgtatcggagccgaagacgtacataagacgttggatacactcgcctccgtctggatggcattaagcacgcaaggagctacccgccactctctgcttatcaatctcggaggggggatggttacggatttgggtggctttgccgcagccactttcaaacgtggtattgcttatatcaatatacccactaccctattggctatggtggacgcgtctgtcggcggtaaaacaggaatcaacttcaacggactgaagaacgagatcggctcattttttccggccaacagtgtgctactcgaaacagaattcctgcgcacactggatgcgcataacttcttttccggatatgcagaaatgctgaaacacggtttgatcagcaacgtagaacattgggcagagttactcagtttcgataccatcaatatcgactatgccgctctcaaaaggctggttggcaagtcggtgcaagtgaaagaagaaatagtggaacaggatcccttcgaacgtaacattcgtaaagcattaaacctggggcatacggtaggacacgcattcgaaagcatggcattggcggaaaaccgtccggtactgcatggttatgcagtcgcctggggaattgtatgtgaattgtacctgtcccatactaaagtcggttttccgaaagagaaaatgagacagacaatccggtttatcaaagacaattatggagtattcactttcgactgcaagaaatatgaacaactatacgcattcatgacacatgacaaaaaaaatacttcaggaacaattaatttcacattattgaaagacatcggagacatctgtatcaaccagactgccgataaggataccatctttgaaatgttggacttttaccgtgaatgtatgggaatttaattcccttagcccaagtgagacattcgatactgagaaagcgacattcccgtatgttttctgaagaaacgtcctagcgaagactggttggcaaaatttgtcctaatggctatctcctgaatattcatatttgtattcttcaacagtgtttttatttccaatatgacgtattcaacgatccagtctttcgcagactttccgctcgtctccttgataaccatagtcagatatttggaagtgatacaaagtttatccgcataaaaggccacatccttattctctttaaaatgcttcatgataagctcgaagaatttattagccaactcttccttacgtatatctttcctatcagtcttcaaagtagcttccttctgataagcgttgaacagctcgagatacagatatcgcagcagatgaactatcagttcccgtctatatatatcctgagatgtaacttttccttttatcatccccagaaaattatagatccgaagaacatcagattccgtctgcgaataccaataatggtttcgcatataaaagaaaaaatgtggagaaaatcggggagctccacttaacgcatcgctaaacaaggaagatgatatgaccattgttacagtcaagaaatcttcgctaggatcactaaatgagacaaactgtccgggcaacagtattatcagttccttcggctgtatccaatgtacgtcctcatgtacagtaagtttcgcttttcccctcaaactatatacaatcaaagcagattggatattggaaggataggaagtcagaggaaggtattttagattctggtaaaatttaaagtcatcacccaaaacatatatctctaatgtctctgtattattaatgtctaacatttaacgcctttctaatctaaactagtcttttctacaaatgtataacatccccttataccaaagcactatcagtggaattatggtattattctacagaaataatatacctgttatttacattaattcataaacaaaactactggtgaattgtttatccgtacctcgacactttaaacctgccatacctcatttatcctctaccaaacataagaaaagatttaaaaccgcacaaaaaaaatcaccgcacaataaaattcaaagaatttatttgctaattaaaaataaagcactacttttgcatccgcaattcggggtgtagctcagcccggttagagtacgcgtctggggggcgtgtggtcgctggttcgaatccagtcaccccgacattgagaatcagccatttacaaacagtaagtggctgatttattttttagaggaacacatttggaacaataaacccgtatttatcaagaatagccctatagtaatgaaagaagatccgaaacatatccgaatcagtgaatacaactatccgttgccggatgaacgtatcgccaagtttccgttgcccgttcgcgaccagtccaaattactgatctaccgccacggtgaagtgaacgaagacatttttacttctttacctgactacttgcctaaaggaagcctgatgatattcaataacacgaaagtcatccaggcccgtcttcattttcgaaaagaaacaggtgcgttgattgaagtgttctgccttgagccgattcagcccaatgattatgtactgaacttccagcagacggaacacgccgcatggctgtgcatgatcggcaatctgaagaaatggaaagacggggaactgaaacgggaaatgacagtgaaaggatttcccatcactctgaccgcaacgagaggagaatgcagagggaccagccattgggtagacttcacctggaataatgcggaagttacttttgccgatattcttgaagtattcggagaacttcctattccaccctatttgaatcggaatacagaagagagtgataaagaaacttatcagacggtttattcgaagataaaaggatcagtcgccgcccctaccgccggactacatttcactccacaggtattggatacactgcaagagaagggaatcgaacttgaagaactgaccctgcacgtaggtgcgggaaccttcaaacctgtaaagagtgaagagattgaaggtcacgagatgcatacggaatacatatcagtcaaccggagtaccatcaagaaactgatcgaccatgacggttgtgctgtcgccgtaggaacaacttctgtgagaacacttgaaagcctttaccatatcggagtcactctcgcagagaatccggacgcaacggaagaggaactacacgtcagacaatggcaaccttacgagaagtacgaccagatacctccggtagttgccctgcagaaaatactggggtatctcgaccgccacggcatggaaacacttcacaccagtactcagattatcatagcaccgggatatgattataaaatcgtaaaggcgatggtcaccaatttccaccagcctcaaagtaccctgctgcttttggtttccgcttttgtaaaaggcaattggcggacgatctacgactatgccttaagccacgatttccgtttccttagttatggagactcttctttattaataccataatcccccgaatacaaaaacaatggcacagagcgataataaccaagaaatgttccctatcgtagatgagcagggaaatatcaccggaaccgctacacgcggagaatgtcatagcggcagcaagttgctccacccggtcgtccaccttcatatattcaatgccaacggagacttgtatctacagaagcgtcccgaatggaaagatatccaaccgggaaaatgggatacagccgtaggcggacatattgatttgggtgaaagcgtagatatcgctctcagtcgagaagcaaatgaagaattaggtatcacagatttcactcccgaacagcttaccagctatgtattcgagtccgaacgtgaaaaggagcttgtctttgtccacaagaccgtttatgacggagaaattcatcccagtgacgaactggatggcggacggttctggacagttgaagaaataaaagagaatctgggcaaagggattttcactcccaacttcgaagaagaattgcaaaaagtctctcttataccttctctatccaagtaattgtttcttcggataaaaaacacaggcggaaactacattgaaaagcagcaacgaacacttactatgtctgttcgaaagttatgattaccctactcaaggcatcgatttatggtttgacaaccaaacattaaaacgcggaccaatgcaatcatcgcaaatcgtaactcttctttgcgacaatctgcgttaatccgcgtttctactataaggcaggcgattaattatttcttcgccaattcattgattacatccattatcttctgtccgatttcttcggcagcctccatagtagaagcttcgctatatacacggataatcggttctgtattactcttacgcaaatgtacccatttgtctgcgaagtcaatcttcacaccgtcgatatcgttgatttcctcgttcttatagatttccttcactttagcgagaatagtgtccacgtcaatttccggagtcagatcgacacggttcttcgcaatgaagtaaggaggataagtagcgcgaagttcgcttaccttctttccttcgtgagccagatggctaaggaataaagcgatacctaccaaagcgtcacgaccgtaatggctggcaggatagatcactccaccatttccttcaccaccgataacagcattggttgctttcatcttcgttacaacgtttacttcgccaacggcagaagcattgtattccataccgtatttacgggttacatcacgcagggcacgagtagaactcaagttggataccgtattgcccggagtatgcttcagcacatagtcggcaacagtaaccaatgtatattcttcaccgtacatcacaccgttttcgcaaatcattgccagacggtcaacgtcagggtctaccacaaatgccacatccgcttttccccctttcatcaagttcatgatgtctccgagattcttttcaagcggctccgggttgtgctggaagtttccggtaggttcacaatatagtttctctacatgtttcacacccaaacgttcgagaagttcgggaagaatgataccgcctactgagtttacacagtcaatagccacacggaaatcagctttcttgatagcttcaacgtctactaggtcaagagccaatacgctgtcgatatgtttttgattgtaggtaagatccttgcgataagagcccaagtgatcaacatcggcatagtcgaactcttcagcttcggcgatacgaagtacctcattaccttccgccgcgttcagaaactcaccatgttcattcagtaacttcagtgcattccactgtttcggattatgagaagctgtcaggatgataccgccacaagcgccttccatcgttacagcgagttctgtagtcggagtagaagccaagtcaatgtccactacatcccagcccattcccatcaaggtaccgactactacgttttttaccatttcaccggaaatgcgggcgtcacgtcccacaacgatcttgttactctttaccgtacaagtcttacggattaaagtagcataagccgaggtgaatttcacgatgtcgagcggatttaatccttcgcccgctcctccgccgatagttccgcggattccagagatagatttgattagagtcataggttctttacttaaagatttatttaaatgttagtgtttctagcttcgtgctttacggaactcagtgatatcatagaagtaaggagttacgtactgttgagcagaagtatgtcccatctttgaaggaacgatcagacgcacgtgggcattgtcacgcaggtaaggcaatgccaaaagccatccttgaggtacggccgtactggcgtaataggacgaccagacatagtccatttcgatgaatgtaccggctgaataagtgtctgtcttcacataacggaatacggcaggataggcatacagctgtgaagcgtccatatactcttccataggtatattaaaagccgcaagttcgcgtgtagcgatgttggtctccgcataacgggtacaaacgatattaccgtctacgaacttatctttttctttgtccgcgtccgcatattctccaccattatcatcaccacgtccacggtctataatctgcatatatattccctcgctggtgaaagacacgaattcatcgtatgcgtccccattcgctttcgctttcgtcaccgtatcattcttttcgaattcctcgactgaaatcacatgaatcgcactatctttgatgaactggcttaccgcattcttctcatcttccagcatttccgcgtatgtcttcgaatcatcgcacgcctggaacagacttccggcagtcagcaaagagagaaataaaaatacaagtttcttcattatctgttatttagctatattccgcacaaatgtatctcaaaatcattaaaagttgaaagagcaatgttgaaagttcgtatcttttaacctttccatattcacttttaaccttccacctttagcttttggctgttaatagaggcttatatttctcaagcgctttctcgaaaacagcttttgcctcttccatcgttccgaaaaattcacctccggacgcattcaagtgaccgccaccgctaaagaattcggctgccaactgattgcacggaaaagtcccgaccgaacggagggaaattttaatcatcggtttctctgtatcttcccgcaaaaagcaggaaaagcgaacgtttttaatgctgagagggatattgacaaagccttcactatctccttttatatagtggaacttgctttgttcggctttcgtcagtgtaattaaagccgagttacaatccgaatagacggtcatgttcgacaagacatatcccatcagccgcaaacggctctcggaataggtgttgtacaccttacggtagatatcgtctttatcaatgcctttggaaaggagttcgctgataatgaagtagatctcccgattgttggaattataggtaaaaccacccgtatcggtcatcatgcccgtatagatacactcggcaccttctttagaaatctcgtcgaaatagcccatccggcaaataaggcggaacaccagttcggaggtagaggaaatcttcgggtaggacatcgttatcttacagaagtcttcgggaaacagatgatggtctatcagtatcttacgcgcaggagaagcagctacggcatccgccatatcttcgatgcgtttcagcgcgttgaagtccaggcaacagatgacatcggcctcagcaagcagtttatccgcaaactctttatagcggtcatacaaaagaatgtccttactgcccggcatccacttgaggaaatcgggaaacgcgttaggcacaatcacgttcactgtcttttcctgagaatccaagaaatgatataatcccagtgatgaaccgattgcatcaccgtcaggagatacatgagatactattactattttgtcagctcgctcaaaccatttagtgaaatggtctattttggcttgttctattactttcgtcaacatactctttttctttatcaaggtgcaaatgtacgataattctttgtacttagagcaaaaagcggacagaaccttcttccgataaggagataaaatgtaaaccgtattccttgcattcctccttaaaacggtctctacgatactctgagagggaggcatcgaagatgatacaaccgggaagaaagaatttggtaagttctttcaatcggccgtcatagcctttgcataagtaaagataatcaatatataacgtgggagttgtcgatttgttccgcaacgtctgccaatgattatcgtttacaatacagatattacatccatgaaatgatacaagttgccattgtcgggaaaatacgtcagtccgacagttggaggtgatttccgtcggcggtaaaagatgccggcgtttccaatagttggctgccacacgttccaatgcttttttgttcggtaacgtatccgcataacttatccaggaatctccactgctttctatgcaatgaaccgccggacaaccccgtacattataaaaggccaaacctctctgcggacggtctatccaaaccatcgtaacatgataaatacttaataaaagaacggaaagaagacagaataacaggtttctaagccgcctatgcaaacagtaacaggctgctccgaacaggaaaacatagataccgcaaacttccaattgataaagccagattccatcgacagacgagcaaggaagttgctccacccatctcacaaagaggttcaatccctccaacagttttctgacacctaccgctacccatatctgaagccaagaaaaaggagtcagaagaagcatgaaaatagcggcatacaggataatagtaatcaaaggaatgaccagcagattcgtcaaaagaaagtgtacggagaatcgggagaagtaaaacatgacaagcggagcagttcctatctgtgcggcaatagatacgctcatcaatccccagacggacttccccactctgtttcttacagtaaacaggcgataaaccggcctctggatcaataaaatggaggcaaccgcaaggaaggaaagctgaaagccgacatcaaacagtcctgccggatcacaaagcagcataaaccatgccgtcgcagctaatgtattcaaggagaatggttgacggccgaatatatctgccaatgccaggatggagaacatggtgaccgaacggactactgagggagaaagtcccgtaaaaaaggcgaaagcccataataagactaaaagagacacggaacgaacacatctgccggtccgtccttttcgggcaacaggtcgtagaataaagaaaagaaaagcatacagaagtccgatgtgtaacccggatagagctagaatatgactcgcgccggctatcgaatagctttcgcgaacagattcgcttaattcagtcttatcaccaatggtcaaagcagacagcacggccagttcatctccggtaaagcctaattgacggtaaagagctattactttctcacggtaagaatcggccagacaccgaagacgcaaatgaatcactccgtttgtctgcacagaacgcagtgttatccattttccggcagcgacatagcccgtcccactaatacctcttcgcatcaagtagcgggcataatcaaattcatcgaagttcttctgattagcaggtggggaaatgcgtgtagaaaccaacaattcatccccgttcttcaagcaggcggcagctgaatcctgtttcagatagagtatcgcttttcgctctaccggatgactaccgatagaatcataatattctttcacaagtaccctgcagagcgatgtacgctcccttggttgtggagtatccgttatcagagcccaataaattacgtcatcgtcaggaaaggtatattgtgtttgtcgcagctgccaagttattcccgtccatccgcccgcgaaacacaggactgtcaggactgctccgaaacaccaacgctgcgaataatgctcacagaaatgaaagagaaaagccaagattaacaggaagatggaagccgatactccccaaagaacatccatcgaacagtcgaaaaagcgttctccacaaaaaacgcctgctatccaagggataaccaggcgcatataaggatattgatggatgcaataattacaagtcatgtaattgatgaatcatcgcctccggatccggtgctgcaaagacggcattacctgccaccaacgcatcggctcccacctcaaccagtcgggctcctgtttccaaatttacaccaccgtctacttcaatcagcgctttcgatcctgtccgttcaatcagggcacgcagctcacggactttctcaaccgaatgttcgataaacttctgtccgccgaatcccggattcacgctcatgacaagcaccatatacacatcccggataatatcttgcagcagagctaccggagtagcaggattaatggttacggcaggctgcatccccgcttccctgatttgctgtatcacccgatgcaaatgcggacaagcctcataatgcacattcatcgtatgagcgcccaacgcctttacttcagggatgaatttttccggattaacaatcatcagatgcacgtccaacggcttcttactcaacttcgctacatacttcaataccggaaagccgaatgaaatgttcgggacaaaaaccccgtccattatatcaatatgtacccactccgcttcactgcggtttatcatttcaatatctttcgccaaatgtccgaaatcggcagaaagaatggaaggagcaataatcggtttcataattcttctatatttaaggtttatcacttcatcttacagccgtccgccaaacggtatccacgaagcaactcatctgttttcaaacgtttcttgccgggaagctgcaaggaaagaatggatacaaacccatccggcacggcaacctttatatatttcttgccatccgtcacaaccgttcccgcagagagctgatgcgattcgtacatcttttcagtctcgaagattttcaccactaccgtttcattttcagaagcgaccagttcactccaggcagcgggataaggcgataatccacgaataaagtcgtacaccttcttcaccggttgattccaatcaatccggcaagtatccttgaatatcttcggagccggacggagttcaccgacaaccgccatttcttcttgaggaatcggttttaccgttccattcaatatagcgtctaccgtttcaagaaccagtttccctcccaacatcatcaatttgtcatgtaccacttccacattgtccgtatccgcaataggcacacgcacctgctgaataacctcccccgtatcaatctcatgtttcaggaaaaacgtagtgattcctgtctccgtgtcaccattgatcaccgcccaattaataggagcagctccacgatattgaggaagcagagaagcatgaaggttaaacgtacccagtcgcggcatattccagaccacctccggcaacatccggaaagcaaccacaatctgcaagtcggctttccattcgcgcaaggcctccacaaaagcctcatctttcaacttctcgggctgaagcaacggtaagttccgctccaacgcatattgcttgaccggagaatactgtattttatgtccgcgtccggcaggcttgtcgggcattgtgatcacacccactacattataaccgccttccaccaactgacgcaaggcctccaccgcaaaatcgggagtacccatatatactattcttaagtcttctttcttcataatccaactatgttatcattaacttaaacgcaaagtctagtcttccgaaaaatgtaccagcacctgccgatatgagttaaatatcttcgatttagagacaaagccctcatagcgtccctcctcgtccaccaccggaagattccaggctttcgtatcgtcaaacgtctgcattacctgttccattccgtccgtatcgaatatcttggcaggagcggatgtcatcaatttgttaacagtgaaacgatgataaagttcttgccggaacatgatgttacggatgtcatcgagcaggacaatacccaacagttcgcccgtttttttatccgtcaccgggaacacattccgatgggaagcggcaatcgctttcaccagctcacccaaatccatctccggatgcacaactacaaaatctttctccaccacattctccatcttcatcaatgtcaacacagccttgtctttgtgatgcgtaatcagctgccccttctttgccaaacgcatggagtatatactatgaggctcaaatgcgataatcgtcaggtatgagctaacggatacaatcatcagcggaaggaacaaatcgtatccccccgtcagctcggctatcagaaatactcccgtcagaggagcatgcataacaccgctcatgactcccgccattcccatcaaagcaaaattcttttcgggcagataggcggagaaagtaaagtcattactgaaatgggaaaagacgaatccggcgatgcaccccaaataaagcgaaggggcaaaaataccaccgcaaccgccgccaccattcgtcgcgctagaggcaaatactttcaacagaatgatcaacatcagatagaccaacagcagattgccataaccataaaacatggagttgttcatcaccgtatcccattcggctgtggaagttccgttcagcaacagctcaatcgtatcgtatccttcaccgtagagaggcgggaaaaggaaaatcaacacactcaacatcacaccgccgaaagcaagtttcttatagggattattgagcttgccgaaaacgccctccaccgaattcatggcacgtgtgaaataaagcgaaaccaaaccacaaaagatacccagcagaatgacataaggaatacgttccaattcgaacgcctgatcgaggtggaatttaaacatagcctccgtaccggtagttatataggaaacggtagctgccgtgaccgcagaaatcagcaacggaagcagggacgacatggtaaggtcaatcatcagaacttccaatgtaaataccaatcccgcaatcggtgctttaaagataccggcaaccgcacccgccgcaccacaacctacgagcaacatcaacgtacggtgctccatcttgaacacacttcccagattggagccaatggcggaacctgtcaagacgataggcgcctccgccccgaccgatccaccaaaacctatggttatcgcactggcaatagtagacgaccagatattatgtcgtttgatgcgtccctgtcggcgggaaatggcatacagaatctttgtgactccatggctgatatcgtctttaacaatgttgcgtacaaaccagccagccaggaaaattccgactaccggatataccagatacaaatagttagctccggtcacattgaaattatcggtcagaaaattctgtatctgatgaatcaggaacttcaagatcaaagcggcaaaggctgtaaagataccgaccagaaaacttaatataaggataaactgcttttcctttatattcgcttcccgccacttgatacaacgctgtaataaactcagtttttcttctttcatttattcgcgaattatcttaatcactccacctttgtccaacttaataatgcttgagggtttcggccgactcacatcctcttgacggaaaccgacgatatagtccaccgccgacttgatttcatcgctgatctcactaaaattcgcagctccgggctgaccgctcacattggccgatgtggagacaatcgctttgcggaattgctggcagagccttcgggaaaattcttcgtttgtaacacggattcccacactgccgtcttccgccaacaggttcgtcgctaaattgcgcgcaccggaatatataatcgtcaacggcttgtcggcaacttcaatcaagtcccacgctacagccggtacatcctgtacataaaaatccaccttcacaggactgtccaccaacaccagcatagccttgctatcagcacgtttcttaatctcatacacacggcgtacagcctcttcattagtagcgtcgcagcctattccccatacggtatcggtaggataaagaatcactcctccttcattcatcacctgacaggcttttttaatatcttctatcatttcttgattaatttctgttgagaataacacgcaaaagtagtacttttgcgccgaattcaaaaagattaagtgaaaacaatggaagaaatcgtatttcaccacactctgcctatccagttgcgcttcaatgacgtagacaaattcgggcacgtcaacaatactgtttatttctctttttatgatttgggaaagactgaatacttcgcttcagtatgtccgggagtcgattgggaaaagatgggaattgtcgtcgttcacatcgaagcggacttcgtcaaacaaatcttcgcctcagaccacatcgctgtgcaaacggctgtctccaaaataggtacgaaaagctttcatctcatccaacgggtcattgacaccacaacgaatgaaataaaatgtatctgcaagtccgtcatggtgactttcgacctcgaaaagcatgaatccatccccttgacaaaagagtggatagaggcgatatgcaagtatgagggacgggatttgcgaaaatgaacccaagtattacaaaggcaaacatctgttgataatactatcaaaattactgccccactattgcttttcaccaattaattttgtatctttaggactcacgtccgtttgaaaataggtagtcaccttatagaatgatatttgtcactttataaggtgactattgtcattctgcaaagtgaccattgtccccttgtaaagtgacgactacccggctacataaaaccccactctttttcgcacagcaagaccttattcttcccactgcttgaagttaaacagccgcctcaagatattcgccatatccgtgttatctcttctgcccgaatacaaatgcgcctgtttccctacaacatacagaggaaccggagcgcctgtatgagatttggtagtccacccaatagaggcttttttatctagcaaggcgaccgcagccaccgccaaaggctcatctttagcatagaggctcactatatcttttgatttcttcttcaagaaagactgctcataacatatcaacagttccaactcttcatgtgtggtaatcgtaatctgttcccaaaagcccagattcttcttcagaaaagatttcatttcttcccaggaaggaacgactttggcagttttcattttcctcatagcattggtcaaagcttcttgcgaacactgctggtatttcagcaattcgatattcaggtttgtatcagaattacccaatcccaaacctccggtttcgtggtcggcagttacaagaatcaaggtctcatcaggatgtttcttgtagaattcataagccagacggatacattggtcaaagtcgatagtttccgtaacaaccgtagccgcatcatgggcatgagccgcccaatctatcttgccaccctctaccatcataaagaaacctttcttcgcggtttccgcaaagttgtccaaacaggcttttgtcaaatccggcagacccaaatctttttcagaccgatccaatgcatatttcaagcttccgctaaccgtatctgtaggaaacaggagcactttgtctttcacatgactacgattataagcgtccatcccccgatacatagtgtatcctttctgatgaaacaaatcataaagacaaggagctgacgcattacgcttgcttcgaggttgaagcaaccctgcccctccgaagaagtcgaaacctgagtttgccgcatccactcctatttcgtaatacatcgaacgatccggttgagaagcataaaagccaccgggagtagcatgatcaatggatgcggaagtgatgatccctattttatagcctttacctttcagttgacgtgcaagagacttcaagccatgttgtttctttgcatccattcctattacatagttagtcgtcttttctcccgtcgccaaagctgtggcagctgctgaagagcaagttatcaagtgagaggccgaccgtgtgcacacttgtgtcatcacgggaaaagtagggaacagtagcgaacgctcaccggtatctgtaccgactttctccgcatatatctgcgaagcttccacatgattgaaccccatcccgtcaccgataaataaaaatatgtatttcggagcctgcgttccgtatgccaatgtagcgcagactagcagtagtccgaacagaacaaacctcataggtcttgtcattctatctttcattttatatctatattaaaaaaggttagtcataaatatgttagtcatgaacataaaggatattaggtaccgtacgttctccacgatggtcgaaacgcttattgtcgcaggggtagttaacaatcccattgtccggtgcaccggacagccaaagagtagtagaacctcctccatcaagattaatcgcatctttgcctcccaggattcggatcagatgcgccaattccgggatacttacccctccggcatatttcggaaaacgtccgtccacggttatgaatagtatctttccgtctttggtaagggctaccgcactgcggggatgtttagtccggataaagtctttctcgcataaactccaatcgtaatagcgaccgtctttcaacatcaacggtccggaagccaatacgataccttttttccctttatattgcttttctatctgtctattccaagagattatcttcatttttcccttgcggatactaacggctccggtgacacgtctcgcaaactcacccaaagtagtggtatccaccacctggcggtctactttaaggaaacagaccgagtttcctcgcttcatatcaaagtaagaaccgtttatagctgcgatagcgccctgttccgaagccattctacttgtttctctcatcttatccgagacggttacaccgactttcaatcctgcaccgggatcaatttctatcaggctgatagattgggggacctgatataattgaggaatggaaacatacttatggataatccctttttggggactttctatcttccattgcgcagatacgattgccagcgaatccgatacagtttgccctttcactattcccaaagagcatacagccaagataatgccgagtaacaagcttcttttcatcataaacagattaataaatgtgttaagtataataaatcaattaagttattttattcagtgaggttattacctttcaatatccatacttctttacgtttcccatactgtgaccatgctttaagatccgaaggtatttgtccgctcaattggttatcatttactctgaatatccctttagaagcactcttctcaatcacagcaccatatccataagggatacttccatcgaattcattgtcatagaccataaattccatcaggtttttccaagtagtcggtttattactgccatctaacggaatcaccggaagagagccactcagatcattacaatatgctttaatcgtgacaatgcccggaatcttaatcaacggatccagatttccgctaaaagaattttcaaatccggcgggagttgctgtcggatgattggatatattaaagctggtcaataattgacattcccccaaagactccggcaaactgccacccgccgctgattcaatgatccacaaatttgtcaattgagacaaatgtcctatctcttccggaatacctgttatcttttgacgcttgaacttcagcactttcagttccgacaattcacataacggagtgatatctcccacaatgttattcggttcttgaatatcaatctgtaccactctcccattctcaaatttcacacccggccaatgagtcgcattcgtttccaaaggagcgtcaaagttccacttcttcacccaattatctccgttcgccccctcatagaacatcctcaaataatcaatatcttccaacggtttcttgtcctgagtaatggtcagcatatcggttaccccgttcgagcccttcaaatacagataagcggtgcggccgtcttccacatctttataaggatcgattttaagtttcagttccgattcgttcacaacaccgggagtgatcggctcaccatcggttatgtgtatccaatcgcagccttccgacaattcatacgtataagcaaccatcgtaacaaaaggaatcacttcttcttcgttccccttagctcccactttcaacgtacgcttcttcaaggcaatgccaataccttcctgcaccaccttcaactttgtttcagcaccttccacgatccaagcggatatttcggcttcacgagaggccacatccgtattcttggtcaccgacattttgaagcttccggatttcagtccattagaggtcagcaagtcaatccatgccgcagaagtcttcaccctccaagggagattcgattcgatatccactgtatattccttttcatccaaaggcaaattcaatgcctcatccacaaatttcaagtccggttccggcagagtcatacccgtatcatccgtaaaatcctgacaacccgacaaacctatcagcaaagacaaaagcccgattcttccgatacagctttgtccgcacaaagatagtattctatttagtatcatatattcagctatttaaaattcaaacaatcaattatcaatcacaaccagcagtccgtttgccacttccctttctactccaccattatcataaggccagttgcgtatggcaaaacgcccgtcctcaaatccggcaatcttacggatgataaaagtagaagaacctcctccgtcgagattgatagcgttctttgctcctaacgctttcatcaccgcacccatctcagcatatctcattccgttggagtaccagaagttacgcccatcggcaacgaggatatagaccacattatcatccgtcactccgatggcggttctcggttccaatgcggttaccgtctgaggaagcacattcccgtttgtcatcaaacgcacacgtcctcccacagcttcctgaatatcctctttgtacgaatcatattcatcatacgaaccgatgatcgcttttttgtttttcgtaatggcgaagaaagtacatacattatcagtcatcgtacctttcaaacaagtaccattccggtagtagattccttgcggtgttccatcctttgcaaagaaatcaccgttcacggcagccagtaccctgctaccgggcttatcgtatgccaaagcctgcaatgtcatctgctgcttggtcttcaatttgccctcctcattgggagaagacgctttcatcgtcagatgtgcctctttcaggtctacctccaatacaaacattttcactgccagccctgtggcagaaaggattttcatctcgagcgcctgtacgccgggagccagcgtgtaagtggagtccgagaagtactgtccgacgtatccatcacttccggcaattattttctgtcccagttccgtcttcgcaccctccgttgagaatacggtcagatcttcatcattgttgcaagccgtccacaagagacaacccaaaagcagaagagcggaatcatatatcagttttttcatcattttatctctttaaagtaagtataaacaataggtatcaatatccgggattcggttccagattcggattggaaatcatttcttttcccggaataggcaacacgtgctgataatctttcagtccgagtgtcgttttcgccgtattcgtacgtatgaggtcatagtacctgaaaccctccgccaacagttccttccgacgttcgtccagcacacattgcaggaattcgtccttgtctttcggatccacactttccagcccgcgttctttccgcaagtcattcaagcgtcccagtcctttcgggaatccttgtgcttccgcactgatgaggtacatttccgccaaacggctcatcactaccggatcagtcccggtctgcccgctcggatacttgttgatacaaggttcggatcccacattgataatggaaacttccttacgtttgtccttatcatcatacatattcatcacctcattggtaggccgatagacataactgccgtgattgggatgcgcataggtatagaacaaggtagagatagtgatattcgattcttccgccaaacactggaaagagaagatgacctccgtattggactttccacgaaatatcttatcaaaactgtccagcttgtatttgccgtctgttatcagcccctccgccagagtagccgcctccgtcaagtttccacgttccaacatcacacgggctttcaatgccaaagctgcatcacgggacacataataatagctggacgatgtgccgagaaaagcaagtgccgtctgcagttcttcttcgataaagctccataccgcctcttccgaatcgcggaaaggtttttccattgtattcactttctgaatagggacaccgccccaacgagtcaccagtgcgtgatagatgtatgccctgaaataatgcgcttcaccgataatcagattccgcagttccgattctggaagagattcgacgatagaaagtacattattcacttgataaagggcattataatacccgttccaactactggagacgattgaattcaatgaagaaagcactgaattgatcaagtccttcgcatttccggtgctttgcgtcaagtcaccacccaatatatcaaaagtgatgtaagattctctcgtcggagagttctgtaccttattgtacattcccatacgcaaagcggagagatcttggggagtcacgcttcccggtgatactgcggaatgagactcaatatccaacataccgctacacgaagtcagcaacaggcaaccgataaatatatatataatctttttcatcattgtgagcatttatgattagaaactaaggtttattccgaaattgaccgaacgggaaggcggcactccgtagagatcgactccgaagtactgcgggtccatatttttactcacttcaggatcccaaccggagtatttggaaaacaacagcaggttatctccctgaacatacaggcgaagtcccttcatccggatcttctgcaacatcacttgcgggaaggtgtaactgaatgtcaacgaacgcaggcggataaaagagccgtcctccagaaaacgggtggagttcttgctattatgtccacaaagcgtattaaccgcacggggatatttgttcgagcttcccggagcagtccagcggttctttgccgcatcctccgtgatggccatacgatatcccggacgggtggccgtcaccgcccattcggcatatacatcgttgccatacatataggtgaagaacacgtccagttggaaacctttatatttgaaagtattgttccatccgccaaagaaatccggattggaagaacccaccaactggcggtccgagtcattgatgataccgttattatccacatcatggtatttcacatcaccggcacgtactcccaagtcgtacaacggctgcggaacttcgccgtcatactggtaaatgccgtccatcttaaacagatagaacgctccgagctcctcacccaccttcaaggcacggttagagccaatcgggagcaggtcgtctcccaacaacttagtcagtttgttcttattgtgggaaatattgaaagaagaagtccaattcacttttcccagattcatgtgcccgttgatggaaaattccacgccataattgcgcatcgagccgatattactcgtgacactagtgaagccacttgttccgtgcagaggcatcgaatacagcagattgttcgtattcttcagataaacgtccgcaatcatattcaactttccgttccagaaaccaagatcgaaaccaaagtcgtattggtcggcagtctcccatgtcagtgtgttatttcccatactggtgacagccataccgctattatttccgtagttgatacctccggacatcagcggctgccatgcataattgccgataccatcctgattacctgtcttaccgtaactcaaacggaacttcaagtctgtccggtcaaacttccagaaaggttcttttgaaacattccatcctaaggaaacggaagggaagtatccataacggtccgaaggagcaaaacgggaagaaccatccgtacgcatcgtcatattcaggatgtaacggtccaaataagagagattgacacgtccgaagtaggattccatagcaaactccgacaaaccgcccgaagcgtcataaatctcggaagcggtgcccaccgtatcaaacaccggagaagggaatccgcgaccatcgatggaggaagtacgcgtggacatcttctgaaacgaatgtcccaacatcaagccggcttcaaaatcaccgaacttatcattataattgaagatattctctatcaatatgttcttcaccagccgattgtactcgacgatacgtccgccaccggctccatacgggtggttctcattataataaacatagtcatacgtatatccgatatcggtgctgacggagtttttcaagctgaacttcttatatttcaggtcagcgttgaatgtgcccagataacggtatgtgtcaatataggacacttcctcgttcaatatctgaagcggattgtgacgcgtcaactcatcggttcctcccaaataatagtcaccattcggcttgtacggacggtcgaaaggacgctgttccacagcacgggccacgatagtagaaccgatattggcacccggcacccggttgtttttcagataattgccactaacgttggcgccgacctccaaccatgaagtcatttcatgactgattttcgccttcaagttgattttggttatatcgtttgttttgatgataccttcctgataattgtagttcgccccgacataaaacttcgttttcttgctgccaccggagaaagacaagtctacattataagaatgtcctacctgagtaatcagatccagccagtccgtatccggcattccctgaaaaggatttgagataggaacgacataaccggaagtccctacggtatatccgttctgacgattgtagcgctccactccgtcattataggtctctacgtataaatcggaatccgcatatttgatccgtcctttattggcaaatttagagatgcccgtactgacattcaagcggatgtccgaacggccttccttgccggatttggtcgttatcacaactacaccgttggtagcccgcgatccgtagatagcagcagaagccgcatctttcagaacttcgatggattcgatatccgtcagattcaacactgccatcgaacttagattctctcccatgttaaatagagaagcgttgctgttgagaataggtattccgtccactacgtaaagcggctcattgctggcgctcaatgaagcggctccacgaatactcatccgttcggaacttcccaagttgccggaacctgtcgataccgtgacacccgctacgcgtccttgtaacagttcgctcggactgagcaccggacgcatattcgactctgtcggtttgaaggaactgatagcattggtaaccaatgctttgcgttgcgttccgtaaccaaccacaactacttcattcaatgcctttgaatcttcactcaacgtgacattgatgttctgctgcgctttcaccggatattccatactcttgtatcccaaaaaagaaaagaccaatgtagcatgctcgggcacttcaaggctatatttaccgtttatatcggtaatagtacctatcgtagtacccttcacggtcacattacatcccacaaccacctccccggaagcttccttcacaagcccggttactcttttcttgtgttgcgtgggagtcagtccctccgcttgcttcttggtaagaatgatgtgctttccttccatcgtgtaggagaactccgtacctttcaacgcatccatcaacagacttgccaccgtcccgttcggagtggaaatagccactttgcgtttcaggctaacctcacgttcgttgtaaataaacaaatagtccgtttgcttttcaatctgtctgataatctcagccagtgttgcggttcctttattcattctaaccttctgattctgcgaataactattcacggaatacgcctcaaaaatgatgaataacaggaaaaagacagtcaacctcataattcttaaaatttgagtacagtgtgtttttctatgggcaatacgcccacaccaaagattatttttcatatctttgcttcgagttattaagttaatacataaagatttgtaacaggtgcgagtctttcttgttgacttctcacatatcggtaagtgttgcagcacttaccgatatttctgttctggacgggccggttctctagctctcattttcggtgtttttttagattaaatactagggttaatagataattatctgattgttctcttcatccaaagtatagtcgaagccgacatacttctgcaatacctttaccacgtgctctatcccctctttctgacggaatttacccgtacacggacgagaagcaatttcaatgttcttgttgataatacgcacttcataatattgctccagtttcttgaatacagcttccagcggctcattcttgaaagaatacacacctatcctccacaagaaagcatgatccgacgtaaaggtctccttacaaagttttccatctctcgtttctactttctcattaggttgcagtgtgacttcattctgtgtatcgggctgatacacggtaaccttaccttctatcaaagaggtttcaaacaggtcggaatccggataggcggaaacattgaacgtggttcccaacactctgacgttatatttctccgtctcaacaatgaaaggatgtttctcatcatgcgctacctcaaaatatccttcgccttccaacagcactttcctctctttggagtggaatccggcagcaggatatttcaaaatggaattcgagttcagccaaacggttgttccgtcagccagaaccagactggctctttgcccagcgggaacggtcatcacctgcatttccgtagagtgttccaatcggtattcctgatattctttatgaagaataaaggcaagcatagcaacaacagcggctatctttatggaggtccggagataatgagtcacggtctttttcttttccggtttttcttccttcagattagcattccagacagtcgcatcatagatatggcgtagttgcatcaactgctcacggtgttcttcgctctctttcagccaacgtgccacttccttcttttcttcgggaagaacatcaccggcaatatatttatttaatagtttcgtgtccatacggttttgaattaaaatatcagcagttttccgccttgtatatataagacacgccactcgcgaagttcactagtggaaaaatgaaaaaagttagaaaaagaggaaagaggaaaggtaatccttgagacttttcctcaaggcttggagcgctttcccaatatgataatccgctcctttcaccgtaacatccaataatccggcaatctccttcaccgatttattctgataccggctcatcacaaatgcctttcttgtcttctccggcagttctcccaaagtacggtttacaatctcaacgatttcttccgagaagagccggttcggatcggaagagtccaacgatgcaatacggaaatcaagctcataaagttcatccgccaatatgctttcacgagcttccatacgtaagtgttcattgcgcagatggttcaaggcctggtttttaactacggtcatcagaaaagaacgaacatttttcacctcttccgtcttcatcgtggtccataaggtgatcattgcctcggaggctatgtctttggatagcatttcatcttgaagataagatttggcaaacaaaaagcagcgttgataatactctagatagatatcatcaaatggcatactagtgtttattgtattatccggtcttctcattttagcagtttctcatctattcagcttttcgttaacgaaacaaagatagataaaagaagttagcttccaaaaaaaatcttttgattcccctacccatttcaaaccccatgactgttaatgttacaaatcaattaatttaatcaccatgaaaaactatgcatcaaaaggcagacgaatcggattgttactggctatgctattcacaacatcctggatgtttgcccaagttaccgtgaccggtaatgttcggaatgagagagacgaaggggccatcggtgccacagtcttacttgtcggtagtcagaaaggagctattacagactccgaaggtaatttcaagttaagtgtaccgaacgcccaaacggcagtattacaaatttcttatgtcggctacgagacgcagacaatccctctcaaaggaaaaaccagaatcagagttatcctaaaggaagaggccaacgcgttgaatgaagtaatggtagtagcctacggaactcaaaagaaagagactctgacgggagctatctcttctgtcaaaacggatgtcttgctccgctctcccaatgcaagcatcgctacgtctcttgccggacaaatcaccggcctttcttccgtcgccacaagcggacaaccgggcaaggaagacccggcaatctacattcgcggagtaggttcattgacagaaagtgcttcggctccgctcatattggtagacggagtggaacgttcctttttccagatggaccccaatgagatagaaagtgtgaccgtcctgaaagacgcttccgctacagctgtattcggggtacgtggtgccaatggtgtaatcctggttaccacccgccgaggagaggaaggaaaagccaagatatccatttcttcctctgtcggcatccaacaacccacacggattctagaaatggcggacagttacacctatgcccaactctttaatgagatgaatgataacgacaaaaagccgaagcacgctttcgacgaatatacattggaacgtttccgactcggtgacgacccgatcatgtatcccaacgtgaattggcggaagtatatcatgaagagttcttctatccaaacccagcataaccttaacataagtggcggaacagaacgtgtccgttactttatctctatgggattcttatggcaggacggacttttccggcaatataaggaactggactacaataacaactttaactatacccgttacaattatcggggaaaccttgatttggacattaccaaaagtactttattgaaagttggactcggcggtatcgtcggtatcacccacgagcctaatgacaataattatgaatatggcctcttctcgctcatcaacatggcacaacctttcaacagtccgggaatcatagacggaaagctcgtcaccatcaatccgggaaagtatgaaggtatcttgatgaacaataatgcattggcacgctattacggacaaggatacgacaggaataccagcaataccatgaatatggacttgtcattgacacagaagctggactttattacaaaaggattatccgtagaggttaaaggtgcctataatacttcttactctttcctgcagcagcgtcacggttctgtcgaatcgtacactccttactaccaatcggaactggagaatcccgatttggatatcaaagatcctgcttataacaaaaccatcgtttaccgggtagacggacagaacaaacggctaggctatgccgaaaagacctatcgggggcgcaattggtattttgaagcgagtcttcgttacaatcggaaattcggcgaccataatgtaggcggattattgctctacaaccagaataaaagatactacccttccgagttcacggacgttccgacggcatacgtcggtttggtaggccgactgacctacgattacaaaacccggtatatcgcggaatttgacttcggatacaacggttccgaaaactttgcccccgacaagcggtttggtgccttcccggccggttctgtcggatatgtactttcagaagaaccgttcatgaaaaaacaaaaggtagtggattatttaaaactgcgtgcttccgtcggtttggtggggaacgataatatgaacgacaaccgtttcctctacctgcctaacggatggacagttgaccaactgggcaatgtcgacaattggggagcgtaccagcacggatacaacttcgggtacaacaacagtaacacgatgttcggagctatcgaaagccgtatcggcaacccgaacgtcagttgggagacagctttaaaacacaattacggtatcgatgtcaacttcctgaacaatcgtctgaaagtgagtgccgaccttttcttcgagaatcggaaagacattctgatcaagcggaagaccattcccatcttcactgatctgaacagtaacatcatgcctgtggtcaacatgggacaggtgaaaaaccatggatacgaagtcgatataaaatgggaagaccggattaaaggagacttccattattatatcaatgccaatgtatcttacagtaaaaacaagattatctttcaggacgagatagagccgaacgaaacttacctatggcgtaccggtcaaccggtaggaagtatcttcggatacgtggccgacggattctacggcgaagaggacttcacgaaagaaggagcattaaaagacgggctgcccgtccccgacgcagatgtacaaccgggtgacatcaaatacaaagacttgaataacgaccacgtcatcaatgaagatgatcaatgcaaaatcggtcatcctacacgtccgtcctatactttcggtctgaattacggagccgactacaaagggttcttcttcagcatgaactggacaggagccgccgagcgttcacttctgttggaagagttcttccggatacctttcggaatcaattccaacaatgcgttgatgcaattccatgccgacaaccgatggactcccgagacagctgaaaccgctactgtgccccgatttgcaacgaagactatgactcacaacagcaagacttcttcgctatgggtaaagaacggtaactatctcaagctgaagaccgtcacactagggtataacttccgcaacgtggctgccttgaaaagaatcggtatctccgaacttgccatcaaactaagcggttacaacttgctcacattcgataagttcaagattatggacccggaatgtacgccgggactgaccgattcataccctatcaacaagatctataatctcggagtcaacatcaccttttaaaacatcaatatcatgaaacgaaggaatatattacataccggcatggcagccatgctactgctttctgtcagtgcatgcgaggacttcaagttcggcaatgactttctcgacaagcccattacaaccgatgtcactatcgacaccgtattttcacgcaaagtatatgccgaacaagcgttagcggaaatctaccgttccttgcccgactttctccccacaggcggaagactatcttgggcgacactagagtgtatgaccgatctcggtgacacttccaaacccggcggtatacgtgcttatcatgcaggagacgtcaatgcctcctccgtaggttctctgccctaccgtctggatgtaccgcctgcagaggatggccctaccgtaggcatggcacccatgacgggcatacgcaaagcctatatctttctggagaatatcgaccgtgttccggacatgacagaccgtgaaaaaacgatacgcaaggcggaagctaaagccatcatcgccttccactacgtccaaatgttgcgttactacggtggaatgccatgggtagaccgctcttaccgcccggatgaagagatgaaattcacccgtatgactgtggaagagaccgtacaaaagaccctcgaactaatgaaagaagccgtacaggttttaccatggaacgtttctgcgtccgacgaaggacgaatgacggcggcagccgttctcggtctgaaatcgagaatgctccaatttgtagcaagccctctattcaataacaaagaccctttcatgagtggggaagcggccgacaagcattatgtgtggtatggcaacttcgacaagactcgttggcaaaatgctttggatgccggactggaatttctgcgcgccaataaggaaaacaacgaatattataaactcgtcaacacgggaaaccccagagaagactttatctccgcctatttcgaccgttacaatggcgaggtactgcttgcctctcatcgttgggttacttacaatgtatggggaaatgctttcaacgaactcatttatggtatgggtggcgccacctccaactatgcggatatgttcgaaatggccgacggaactcctttcaactgggatgatttcgctttaggagaaccgaataagtatgccaatcctttctttgacgagcataacaatccgatccgggatatccgcctgtatgaaacccttttcgtcaacggtgaccgtttcagaggacgtactctggaaatatacaaaggcggacgggaacaatgtgacggatattcggacgaactggccagagccacttacaacggttacggtatgcgcaaattcctgcgagaccggagtacggaagtcggcggcaaattctactcctgcccgcttatccgccttccggaaatctatctgaatatagcggaagccatgaacgaactggggaaagcaacagagaaagacgaattcgggcgagatgcttatgattatgtcaatctggttcgcgaacgggtaaaaatgccagcattgaccaatcagaaagtagcttccggactgcctttgagagaagccatcctccacgagcgtgccgtagagatgggatttgaagaggtacgttattttgacctggtacgttggaaacgttccgacctattcaaaaccgacatcgaacgccttgttatcaccaggaatgaagatggaagcttcgattatgtaagggataacaagatagccaaccctcgcggctggataaaacggtggacagaccgctacttcctcattcctattccattggatgaaatcaacaaaaagtacggactcgtacagaatccgggatgggaataaacaatcaacaaaagactaattaaaaatgaaagaacgtatgaaacgtaaatatatactaatgggggttgccatattatcctccgtcgtcgcaggagcgcaggatataacggacagcattgcccgaaagacacaggccgtctccacaatatcggccgatgaaatatcaaagaatgcaactcccaatgtatccaatacattgtatgggttgctaccaggactgtcagtcatgcagcagacggggtggacagacgatgcagctactcttttgcgaggatataataatccgctgattgtagttgacggattcgcacgtccgctctcttatctgaacacagcggaaatcgaatcggtcaccgtactgaaagacggtgccgcaactgccgtgtggggaacacggggagcaaacggtgtgattctgattaccaccaaaagaggagagtacaacaccaaaatgcaaatagatgccagttataagttcggtatggattttccaatcaaccaacccaagttcgccaacggatacgagtatgcgtcggcactgaacgaagcgctttattacgacggactggaaccacaatacacgcgtaaagagctggacgcgttcagaaacggaagtaaccgggatttatatgccgacaccgattggatgaaagaggggctgcgcaaacataccatcaacaatcagctcgatatctcctttcacgggggtggcaaacgtcttcgctacttcaccctgttaagttacaagaacgactacggtatcctgaatgaaacatacgccaaatattccgaccgctacaccgctcaaatgaggaaatacgaactgggactgcggatgaacattgacgtagatatcacaccgacgactctggcacaattcagtatgttaggacaactccgcgaacggaaacgtccgaatacaagtgagtatgacttattcgccgggcttttcaacacaccatccggtgctttccccatgcagacgtctcatggatattgggggagtaataatgtactgaaaacaaatccgatagcccgtatcgcagatatcggttatttcaaagaaaacccgcgaacgttgcaagccgacttccgcatccggcaggatttgtcactcatcactccgggattaagtctggaagccgccgtagcgtatgataacaatgccgtttacaaggaagaaggctacaagaaattccaatatgaagtcaatacgcctgtcagaaatgtaatcacagacaagatagaagcggattccaaagtgtatggtgacaacagtaccttgcaagtaaacaacctcgacatgacggaacaatacataaacgccaatctggaagccgctttgaagtataaccgttctttcgggaaacatgccgtcagcgctttaggttcgtatcgcctggaatcggagagaggaatcggacgtaacaatgcccacaaacggatgtatgtgaatgcttccgccggatacagctacaaagacacttatctgattcacgcactagtcaatcacacagggacaagtgtactgcccgacggagacaaattccgtacctatcctgccatatcagccgcttgggtcatctccaacgaaaacttcatgaagaaggctaccgtcattgactatctgaaactgcgtgcttcttacggacgcgccggatgggataacatcagttatgaactggaccgccaatattgggcatggggtggagcctattggtttggtgacgcaaacacccagtcggagggtatgaaagaggacaaactggctatgaataacttgacgctcgaagtgtccgacaaatataacatcggtctggagatgcggttattcaaaagactgaacctgtccgttgacgcctatatggataaaaggagcaaaatgccggtaagcggcagcaatgtcatttcttccgccatcggtatcagtatcccgcaacagaacaacggtaagaccgaatacaaagggattgacttgggaatcgactggaaagacaaagtcggcaaagacttcacttactacgtgggtggtacgctgaactatatccggactgaggtaatagaaaacggggaaggatatattccctacgactatctttccggcaagggacttcccgatggacagcttttcggtctggaagcaatcggttatttccgggatgaagcggatatcgccaatagtcctcaacagatgttttcggaagtgcgaccgggagatatcaaatacaaggatatgaacggagaccggatcatcgacgacaacgacgtgcatcccatcggacattcaagttccgtaccggaaatatattatggcctcaaactcgggttcgaatacaagggatttggtcttgacgctctatttcaaggagtggccgactacagcagaatgatgaatgtaagcagtgtatattggccattgcgcaataacaccaatgtatccgactggtatctgcacgacaaaatccggtggacggaggaaacgagagacatcgccaatgtaccgcgtctgacaacgctgaacaacagcaataacttccgcaacagtacccaatggctggtaaacggtgattactttaagctgcgcaatctcaacgtctactacaacctgccgcagcgctggatctcaaaagtcaaactagaacagtgccagatttttgcccgcgccaacaatgtgttctctatcgaccatgtgaaatacatgaactgcgaagatttcagtgttaactatccggacatgttctccgtatatttcggagcgagtatcaaattctaatagattgattgtatgaaaataactaaatatatcacaatagcttgcatagtgacttccctgtcgggatgcgactatctggatttcgatgaatccatcggtaagacacaggacgagatgtacacctacttcgagaatatctcaagcctggcaacctacatttattcccaactgcctcaagattacggcgccatcggcggtgctgtacgggatgcggcaaccgacaatgccgtatatacctggaacagcaacagtgtgtacgacatctataacggtaattggagtccactcaatcccatagacgacgtatggggtaactattataccgccatccgtgccgccaattcttttctggagaactattcactggagaagctggaacgtttccaatggaatcccaactacaaggaaaacatggaaaaggccaagatgtatgtgaacgaagtacgtgcattgcgcgctttctactatttggaactagccaaaagatacggtgacatcccgctgctgacccgtacttacggaattgacgagatcaacaccgtatcagagactcctttcgacaaagtaattgagttcattgccaaagaatgtagcgaagtggctccggcattacccgtctcgcaaaaggatttttacaacgagtccggacgggtaacacgtggcatggcattgtctgtcaaggcacgcgccctgctctatgctgccagcaaactacacaatccgtccggagagaaaagcaaatgggaaaaagctgccgaagctgcttatgatattatcaaagagaattggtactctttgccaaatattaacgtagacccactctacaatgtgaatgggggaaatgatattcttagttcctcacagcttatcttcgaacgccgcaatggcgcaagcaactcattcgagggactgaatctgcctatcggcttcgaaaacgggaacagtggaagcacgcccacacaaaatctggtagatgctttcgaaatgtccgacggcaagccgtttgattggaataacccgaaacatgccgcacggccttactcaaaacgtgaccctcgtttctataaaaccgttctttacaatggaagttcattcatgaatacccccatcgagacttacgaaggcggcagaaacggtgctcctctcaatggtgctacactgaccggatattacttgaggaaaaacatgaacgaaacggtatccctctctccgaccgacccggtaacaaaaccccaccatttcatcttattccgttatgcggaaacattgttgaactatgcagaagccatgaacgaattaggcggtccggattataaggttagcgacagactcacagcccgcgaagccttaaaccaggtacgtgctgctgccaatatgccacctatagaggacaccggtgaagctttcaccaaacgcttgcgcaacgaacgccggatagagctggctttcgaagaccatcgtttttgggacatttgccgttggatggacggggacgtagtaaaagatatctatgggattaaaatcaccaagcgaggaagtaagtacacctatacccgcacaaaaatccagacacgtatatgggacaggaagatgtacttgtatcccatcgcccaaacagaactttacaagaatcctaacttaacacaaaatagtggttgggagtaatcatactccctccactcccccttttttaatcaactaaaagtgagacaatatgaaacagatcattacttttttagtcttctggattagttttctatcctgccaatccgaagaaataaatatctatacccagcacgtgaaagagatatcgaaaaataaagacggatggaatctggtgtggtcggaagagtttgaacaggaaagtaacattccgaatgccaaaagctggtcactggcagctaaagaggcttctccttggaatcgctatatgtccgaaagctacgaccaagcttatgtgaaagacgggaaactatatctgatagccgaaaagaaagacggtgaatacaagacaggtggcgtgtggacgatggacaaagtaggtttcaaatatgggaagctggaggtttgtgccaagtttactagttttcaaggtggatgggcagctatctggctcatgccgcaagaacgacaatatccatcagtaaacaatagttatcccggtgaaatcgatatcatggaacaagtaagcatggacaagatcgcacaacattcggtgcatacgcattatacattagatttaggttatgacaagaatcctccccgtaacggatacggagaatatcgggatagcgagttcaatatttacggaattgaatggacagaggagaagattatctttacggtgaacggagaagagactttcagctatccgaacctgcatcttccgaatgaatcactcatgcagcaatggccgttcgatgtaccttattacctgattctcaactattcggtaggcggtgaggacgcatggccgggaccgattgacgacagaggactacctgcacacatggaggtggaatatgtccggtattatgagaaagaaaataaaggaaatgacgatgacgaggaggaagaaccttccgataacctcattcagaacggaaacttcgagaagaattttgcagaggatcagcaacccggtgtcttcagtgccgacaaaaccgatcaaagtggaattcttaattatcttgacagatggttctgccgaccggacgctccaagttgtaatatggctatagataaaagcgaaggagcgaacaacagttcacgctcactaaaatacgaagctacggaaataatggatgcagagaaagttaacctgtcatacgcattacaaaacgtaatggaaggcagatatacatttagttattacgttaagaccaatcaagacgatacgccatttacacttagcattgtcgtatgcgaaacagaagatgacatacctttggtattaaaagaaaatcagaagagtatcattttcaatccggacggttcacagtctctttctcccggtcccacttgggggcttgcggccacctgtgacaataaagccggaaaaggctggatcaaatactccgttacagtagatatccccgaaaatgtacttatacgattcgtattcaagccttgcgcctatgtaggagacatcaacacgcacgaaatctgggggaaaggcgcttggggtggtgttatttactggtttgacgaatttagtctgatacctgtagaataacagaaatcttattcaataggagaacgagagtgtgtcaaaatgcagattaatgcgaattattactcattatggcacaccctcacctctattcatatcttatctaatccttattaatatgcgaaagttcaacttgacaattttatttcttcttgcccttcttcccgtattatttgccggacagacaacccgcattccatatcggggtatctacgccgacgatccgaacggcactgccggaatatataatccggaaagaggtttccgcctggaaatagccgtagacatcgctaaaaaatgcgatgtgtggaaaccgcaggaatatccgggaattaccgactatttggaatcagagataaacaaatacgcttgcgacagtgtctcgttagttcaaacatatttttatctgcatggatatataggccgacagctacctccggaagcttttgccacaatggatgtctacttcaacaagttgcgccaacttggcaagaaagcattgctacggttcgcctacgaaacagaaccgatgggaaccgtctcgtcaggtcccacaatggaagatatgtttcgccatatgaaacaattgaaaccttacctcgagaaaaacaaagatgtcatactggctcttcaagccggatttatcggtgcatggggagaatggcacagttccaaacataatatcgaaagttccgatgcgaacaaacgtattatccttgaaaagatctgccggatgacccctcaagatcgggtggtacaagtcagagtgccggactacaagaacctgttacccaaagatagcgaagcctaccggaaaacctctttccatgacgactttatcgtagtagacccacacagatgggacggaaatatgcatgaaggtacgcccaacttcgaccagattgtagaagaaggagcattcatgcccgtagacggcgaactgccttggggaacgtggagcatgaacaaagagaacggagacgcgaacggctggatcatagacggcaaaaagacagcacgacaattatttctagagcattacacctcattaagcgtcatccacaattacaaagagcgcggtgcaccggacaagtattccatgatgtactggaaagaaacacccatcagcgaagaatacctgaaagagaagcacatgcccgtctctgacggatatttccggaaacacgacggcagtgcagtccaaagaaacgcattcgaatatgtgcgcgatcatctgggataccgtctcgaactgcaagaactgcaaatcgacacactcaagcatacggataaccatatcctcgacctttcgctcacactgataaaccgcggcttctctacgctgttcaatgagcaccctgtctacttcgtattagtggacgaacacaaccaagtgaaagagttcctggccaatgcggataccaacagtttccagccttatcgaccgggagataaaacctacacgcctttgattcacacaatcaaaggacaagtgaccctccccaagacggcgaacggcacttataaactcggtttatggatacccgacggttcccgacagctccaacacctttcccgctttgctatccgctgcgccaacggagatattccttggtggatttcgcccgaccgacgttatggaatcaatatcctcaccactctgcaagtgcctgtatcatcagcagtctccttttcatcagcaacagcctcacccaaactaccttatcaaagagcggatctacctattgaggagcgggtaaaagacttgttacaacgaatgactccggaagagaaactcgctcaaatcagacatatccattcttgggagatattcaacggacaagcgctggacgaacgcaagttggaagaaaaagcgcagggaatgagttgggggttcgttgaggggtttcccctgacggcagaaaactgtgcaaagaatatgctagccatccaacgcttcatggtcgagaaaacccgtttaggcattcctatctttaccgtagcggaatcgttacacggggtagtgcatgagggagccaccgtcttcccgcagaacattgctctaggaagtactttcgatacagatctcgcctatcgcaaaacatccatgattgccgacgagctccatgcggtaggtatgcggcaagtgttatccccctgcattgatgtagtgcgagacctccgctggggaagagtggaagagtctttcggagaagatccttatctctgcggaagattcggcatagccgaagtgaaagggtatatggacaacggcatatcccccatgctgaaacactatggtccgcacggcaaccctttaagcggcctcaacctcgcatccgtagaaaccagtatccgtgacctgcacgaagtctatctgaaaccgttcgaaatggtaatgaagcaagcgcctaccctcgccgtgatgtccgcctataactcatggaaccgcatccctaattccgcctcgcactatctgctaacagatgttctgagaaaagaatggggattcaaaggatatgtctactcggattggggagccattgaaatgctgaagaacttccacttcacagcccgcaattcggaagaagccgccttgcaggcactgaccgccggtctggatgtagaagcttcgagtgactgctatccggccatccccggactgatagaaagaggagagctgaaccgcgagatagtggacgaagctgtccgccgggtattgtatgccaaattccggatcggtctgtttgatgatccgtatggagaaaaatttgccaaaggggctattcactccgggaaagcgatagcgctatcgaaaaagatagcggacgaatcgaccgtcttattgaaaaatgaacggcagctactccctctctctatcggaaagttgaaatcgattgcagtcattggtccgaacgccgaccagatacaattcggtgattacacatggacacgcgacaaccgtttcggagttacccccttacaaggtatccggaaatgggcaggcacaaacgtgaaagtcaattacgctaaaggttgcagtttggtatctatggatgaaagtggaatccggcaggcggtcgaggccgccgagcaaagcgatgtctgtgtgcttttttgcggaagcgccagcgcggccttggcacgcgactataaaagttcgacttgcggagaaggattcgacctcaacgacctaaccttaacaggagcacaacccgccttgataaaagcggttcaagccacaggcaaacctgtcattcttgtcttagtaaccggcaagccttttgccattccctgggaaaagaaaaatataccggctatcctggtacaatggtatgccggggaacagagcgggaactccatagcggacatcctgttcggaaaggtatctccctccggtcggctgacattctcttttcccgaaagtaccggccatctcccagtctactataatcatctacgatccgaccgtggattctacaaatctcccggcagttatgactcaccgggaagagattatgttttctccgctcctgtcccgctatggtcattcggacacggactgacgtataccactttcgagtattccaacctacaaacggatcgagcgtcttatctgctcaacgataccgttcacgtacgtatagatttgaaaaacaccgggaagtgcgaaggaaaagaggtggtgcaattgtatgtatcagacgtatgcagttcggttgccatgccggtacgccaattaagagatttccgcaaggtagctctccaggcaggcgagactcaaattgtccgtctcagtattcctgtcagtgagcttaccattctgaatgagaagaatgaagccatcgtagaaccgggagaattcgagatacaagtaggttctgcctccgaccatattctcttacggaagactatccgagtgggacagcctcaaccggtcgtgaacaggcaggaacaggttctacccaaaagtgaacggcagataaccgtgcaaggagtcatcagagacgtgcaggccaccttgatccccgaagtccggatttatgagaaaacgaccggcaaactgttagggaaaagtgacaatcggggaaatttcaccgtaaagaccggcaatcgggagatactgcgctttcagaagaaaggttatcaatctctagagaggtttgttgacaatcaagaaaatataaatataaggatggattacggaaccgactagattttttataccatttacacagagaaagtccggcaccggggaaggaggtgtccggcaccgaggaaaacctcctccgccaccgagaaaggaaacagatggtaacggagggagttttcttattgtttcagcaattctaccaaagaggattctgtacgattttcttattcacctgaagttcatcgaagggtattggatgtagatacatcgcccgtttccaggggcggttttcaatcagtgtccggcgataaaaggattggtctgtacccaaagggcggtttctttctccgttcatattcatcccatgtacaaatcgctggtcggcatcctccccttctccgcaaatcatccagcggcggatgtcgaagaaacgctgtccctcagcaaaaagctctaccctgcgctcttgttgaatagccctgcgttgtaatttccggtcgcctatgatattctttttcccggtggctgccagctcacgatatccaagtaacccagcacgctcgcgtatcttatccaaataatcaataacacattcgtcttcgggatcaatttcattgcagacttccgcataataaagataaaaatccgccaaacggaacaagatggacggacgtgcccatttcttgatataatcaccggtgtacataatctgacgattcttgaacttataaagcaaatatccgtttcgaggataatcgccaaccgagttgtcgcttccttccccttttgcaaaaccggctccccagtcataattgaaacgtggctgtatatgccagcttttcccctcataagtgacagcagcatagaaacgaggttctctgtcggcatacatcgtaaagatattcttatcggtacgttttctatcgttgcacggattgacgacctccgtaaatccgctttcatcgtatccagtgcccggatcatcaatggtcagtccgtccttcatgaaaaaaccatcgaccgactcttgagtgacacaaacgtgcgcccatcctttatagaggtcacgcggagtcgtattctcctccattacaccatcctggcttccggtgtgataatagtttcttccggtagcccagattatctcatcattataagcctgaaacacctcataaacagaacggtcggcatctatggagccatcggtttggtaaaccttgtacaatctgtatccacaagcttccgcatcttccagtacctcttcgaggcgcttcttggctatcttccatttttccggatcataaggaggaaacaaatattctccatcattgtttttcacttctaaagcttccgcatatcctccgttgaacaatggagaagcagcatatacccataatttggcgcgcagcgcaatagctgccgaacgggtaggacggacaatctcattcaaattataccgctcattcccgtcagggatggcagcattaatcaatgtaggcggcaaatcgcccgactgaatcacctcttcgagcagtcgatcgatataatccaccaactcatccaccgtagcccggggaaaattcaaatccttactttccggatcaacctcttccgtcagtaacggcaccggcccataaagttcaaacagggaaaaataggaataggcaatcaagaacttcgcttccgctttcatacggcgtacactttcttccgtcaactgctgctcatcttccaccgctcccaacggcgttacccgtttcaagaaaataaaagcgtcacgtatctcccgataaagcacccaccagcgatggaggggagcgttactcgaattgtaaccagcttccatcagccgggaagaaggtccgctgcttatcaacgtttcaccacaaagagacgaccagacattggtgaacccactggcattgttaccgccggtacatgaatattcggaaatacaattaaaaagattggcgtgccattgccgtgtatatgccggattacggaataccgcttccagatccaacgactccgcgatctcattcgagacatccagataatcggaacaagccgccaaagccatgcaaagcgtaaaaccgagcgcccctatcattttcttccaaattcgttccatcttgtttccttcccttaatttaaataagtgacttttctgtttttaatgagtgaccttccgttttaataagtgatttccaacccaacagtaaagttcctgcaaagcggatatttagctcccgagttagcatttcccaattcagggtcccaatatttaatcttgtcccacaccgctacattattcccctgcacatagacacgcagattctccatcctcagtcgctggagtaccgttttatcgaattcataacctacttctatgttcttcagacgcagaaacgccgcatcacgcatccaccaggtactaggcaactgattgtgctgaaacgctcctgtgtgaagacgcggaaaaaacaccttttgattgaaaggtgcttcagccgaccagtggtcgcgtataatatcgcgggcggaaccattgtccctgcccgacgtaaaaggaatgatattactaggagaagcgatcagactagcagacgcatgagacactccctgaaaaaaagccccgacaaacagtccgttccaggaaagattcaccccgaatccatatacaatttccggtatacccgtagagtaaaatccactgtcgtaggtcttatcgtaggaatcgataatgccatccttgttcaagtccctatacttgatatcacccggagccacatttgccgaaggtttcggcaatccttccctcaattgataagtccgggaaccgtctcccctttccgtcacatcaaagtcatccggagtatacagcccctccgcaatataaagagattgctgaccaatagaggttcccacttgtgacatccaaccatatttaggagtaatttcatcacattcaatgatttcattccttgcatacgttacatttccgcgagcagaaagaccgaccggtccccactgatgtcggaaaatgagatttgcatccacccctttattcgtcgtaataccgaaattctgatacatcccggtccggaaacccgtaacagcggaaatggtctgccgctgaatcagaatatcttttctacggttactaaaatagtcgacagaaaaatcaatcctgccttcccacaagccgacatccaacccaacattcaacttccgttccgtttcccaactaagattcggactggcaaagctccgttcgtacaccccaccgacccaattggacactccgccaccggcaccgggcgtcagtccgagatcatatccgggaccgtctgtcgtgacttgtccccgatacggaaaacgcactaattcaccattttggctgaacacattgtcgttacccgctattccgtaagacgttctcagtttcagcttggtcaagctgttttccaccccctgcataaatttctcatgactgatataccaggctattcccactgccggaaatatcccccagcgatgattctgcgcaaaattctcactgccagtagctcccatgctggcttctacgatataccggtcatcataagcgtatgagatacgcgatacaaaactctgtttccgatagggaagccgcaacaatccttcttcctgctggtactgggtctctttctgcatatacagaaacaaagcggaaaggtcatgcttgtccgcaaagcgttgctgatagttcagagaagcctccagataaatccttttggctcccgaagtctctcccttgacaggatcgctcaaggcagtcccctcctccatcgttttcttctccagagtaccatcctctttccggcgcaacgcaaaataagttttaggagacttggttctcttcgtcgaggctccgaagtccgcatcaaaccccatcattcctttaaccaacaagcccggaagaagaaaatccatcttttgctccaaacaaaccttcgactggagatatgtatcccatgtcttggtatatccgctatgattgagcatactgtaaggctgcttgtcgtgtccgtagcctaaattactgtaaatagaagctgttccgtccgaataatacataggaataacgtgagtagggctatgggttatgtacgaaaatatctggtcggaactatacccgggattattcttcatcacatactgcccgctcaaatctacggacagttgggtagtctttgtgattgtcatatcaatgttggagcgcagattaaaacgcttcaagtcaatattggcatcatagtcctcaataggatttgaacgatagattccctcttccgtataataagctcccgaaacgaaaaagcgtgttttctcggaaccgcccctgaaattgatcgtataacgctggctttgggtgtgtttcttcagcaaatcagtccaatcaacggaaggatataaatcggtatccgctcccgaacggtatttttctataacctcatcggtcacttccggctgaaaatgatctttatccggatttccccgatcattccacaccgcctcgttatacatggacagatactcacaggcacccaacgaccggggcattctgaaaggagtggcaatggcatattgtgcgctgaaattaacgagagtcttctgtggccttccgcgtttggaagtaatcagcacgacaccatttgccccttcagctccataaacagcagtggcagcggcatctttaagtaccgtaaaagtctctatttcatctacatcgatatcttccatattacggggaacaccatccaccagtaccaacgggttggttcctcccgtatacgaactctgtccgcgaatgtaaaactccgcttcgtcatttcccggttcgccgctacgctgtacggaaatcacaccggcaatccgtccggcaatattggttgccagattacgttgtttcacgttcatatcccgcgattccaatgtctgtatagacgaaacgatgctggatttcttctgctgtccatatccgactaccaccacatctcccagtccaaccggtaattccatcatacgcacattaatgaccgggaccttcctcacgaccctttcctcgctattatatccgacataacgaaattccaaccggtcaccttccgtcacctcaatctgataacggccgtataaatcggaaacaacacctgtgcttttccctttcaccagaatattgacaccgataagcgggtttccgtctccatccgtaatcaagccgctaacgatggcggaagaaaaagcttccgtcatcgttggcgatttaccggcaatcttgcccgaaacaggttttggccgtttggaaatagcgatatagtcatcaatctgccgacagatatagctgtcgcccaatacggcatacaacgcttccaaaatatcggatgtctctatcttgacggtcaccggtttcttccggtcgagtacttcgttattataggcaatcttgattccagtctgcttggtgatggcgtccagtacggcttctaccggagtatccttaaaatcaagcacaatagtgtacttttgagcaagtatatccccatagagaacagcgcaatgcaggtaactgcctgccgtatacagcagcaggaacaacatcactatccatttcatcttaatcaaggtcagcataggctctattttgttttttcgtgacacagttctttcttacttcattctatcctccttttttttacattaatactctttccttgtttctccaatttaacatccgaagtgtagtttatcacttccaagagtttgtctatatccgtttttcggtctgcggtaagagaaaaacgggtgtgtttcaatgtttcatcctgataggtaacagagaaatcataccatcgggaaagtttctccaatatttcctctaaaggcatattcttaaagatgtatacaccgttgatccaggaagtataaagttcagtatccactttctccacagataactgatgacttttcttattatacgccaatcgttcggaaggcgttattgtccgttccgcaccattggccgtgctcacagctaccgatccctccactaatgtcgtactcgtactctcgctatcttgataggcacttacgttgaaagaagttcccagaacacgtatatccattccgttcgcctttacatagaacggtctttccttgtcaggagtgacttcaaagaaagcctcacccaataactttacttccctcttggttccggtaaaccggctcggatatgagagttccgtttctgagttcagccatactttcgtgccatcctccaacaccagtctgtacatttttcctcttgggataatcaggcggttatgaacaatcttcgctttatccgtcccgtcttccgcctcataagagagcaggttgtccgcatcgttctttatcaaagcctgatcacgcttcatcgtaaaggaccgcccgctcaaatcaatctcatcccccccttccaaaagcagggtaggctcattgtaagccatcatgtctatctcatccagactgtccgcacgaaaccaatctgtgataaagaacaatccgcttgccaccacaacagctacaacggccgcatagcgcacccacatagacagataccaacttttctttttatatatggtatggtcggccacctgtttccaagcccggtctgcatcaaattgtttgggtttacgaagagccgtcgctttctcatacatacgacgcatcccctcatattcctctctgttttcctcagactcacgcagccactcgtcaacaatcttttgttcctcattggtagcctcatgagctaatgtagaaagaatagcttgatagatcaattcctgtttcatcattttctttttatctttctgttactatgacaattgctttccctaaaatgggtaggcacaatcagctaaaaattaatattaatagtatcatcaggtctttcagttcttccctcatgacacgaaaagcctctcccagatggtatttcacggtattgaccgaaatatcggaaatttccgcgatttctttataacgaagaccggtgacacacttcagcaaaaatactttcctgcatttttccggtaacttctgaagagcggcatgtacctcctgtttatatctgaactcctcttcttcttgcagttgtaattgccattcctccgccagcacagtgaaaaaattctctttggcaatctctgacttatagtagttgatacaactgttcttgatagcacgataggcatacggaagaaaagtatcctccgttatagataagtgtttcttctcccagacggcaataaagaaattctgtacaatgtcctctaccgcctgctcattacagacaatgctattcgcataattacatagaagggaataatgctccctaaagagcttctcgaatgttttttcatcagtatctagcatataaatagagctttattggatgataaagtccgcaatattataaataaataaagtaacgaacaaattttccctttcaaattctttgcccgctttacttgtgtacttcgaatattattcctaatattgcaacgtgtttctcttctccaattaaaatcgggatgtttccacatcccctgtttgtctgtataaataagaaaagtctgcggtaatatttattaatttaactcataacagactttaaacatggacaagtttatctttataacactattccttgtggaaaacgtgttttcggtatgccttgcacaatcctatccttatcaaaaggaatccatccccgtcccccaacgggtgaaagatctattgtcacgcatgacacttgaagaaaaaatagcagaactgaacttaataccttattatacgaaagacgactccatctgccggtctctgatacgtgcagggaaagtcggcgcttttttgaaagcgaatggagcggaactaaaccgttctctacaagaggaagctctgaaacatagcaggttaggtattcctttaatctttcatgaagatgtcattcacggatatcgcaccattacccccattccactagccgaatcgtgtagttggaatccggaattagtagaacaaagtgctgctatggcagcgcgggaagccgctgcagcaggtatccaactgacctacgcaccgatggttgacatatcatacgatcctcgttggggacgtattatggaaacatctggtgaagatgcttacttgtgcggagaactggctgccgcaagagtccgagggtttcaagggaacgacttgacaagccctcatacgattgctgcctgcgtaaagcattttgccggttatggggcagtcatggcaggaagagactatcaagaaacggacgtatctctgcgcaaacttcaggaaatttatctccctccttttcaagcagccattaatgcaggagtagcaagtgtcatgtgcgcatatacctcctacgatggagagccgctgacaatgaactatttcatgaatgaagaggtgttgcgtaaacaaatgcagttcaaaggattgctaatgaccgattggacaacttttcaacatgcggtgacggaaggagctgccgacaacggacaagaagctgctgaaagaggcatcaaaagcggaatagacatggatatgagtgccaaacagtttatcgaattcctgccggagctggtaagaacacagaaagttccggagcaactgattaaccgcgctgccgcccgtgccttagaactgaaattccggttgggactgtttgataatccattcgcctattttaataccgaacgggaaaagcagacactttattctaaagaaagccaggaagacgcataccaaatggcttgtcaaagtatggtactcttaaaaaatgaagagcgcacacttcccttatccgattctaaaagaatagcactagttggtccattcgccaatacacgctaccatttgctgggttcctggaatatgaaaggagacagcaaagaggtaattacagtagaagaaggcttcaaagccttacgtactgatatcccgattgatgtacgggcttgtgacttctccggtattacaccggcctatttgtcggatgtttgtgctttggcacaaaaaaatgaaatcattatagcttgtctcggagaaccgtccaacttatctggagaagctgtttcaaccgccaaaatcgagttaccagatcagcagatgagattgctgaaagcattgaagacaaccgggaaaaaaatcatcgtagtgttattcaacggccgaccactagtattggatgaagtcatcaagaactgcgatgctctactagaagcctggtatcccggcactatgggaggaaaagccgtagcagccttactgacaggtatcgaaaatccctcagggaaactttcgcagactttccccagacatgcggggcagattcctattgtttataatgccagaagaactttttacacagtacaccacgccgacataccgcaaggagccttatttccattcggattcggtctaagttacacgcaatacaaatattcctctcccgttaccgataaaacagaataccgaaggggagattccgtcactgtacggataaaaatcaagaatacaggttccgtagccggcagagaaattgtacagctttatatacgtgacgaagtggctaccgtcattccgagagaaaaggaattaaaacgctttgcttccatccatcttcagcccggcgaagaaaaggagattcgttttactattccttccgcagattttagcatatacaataataaaatggaaaaggtactggaacccggaagctttaccatcggcatcggtcccaattcttctgaattaaatcaaactaaagtatatttcctttaatcacctattaaaaacaactcgtatgaacattagagtaaaagctatcgtcctcatcttctccggactttgcagtctgggaagcctgaacggacaaatcccgatgggagttacccattccgggcagtcaacctcgcaagctcctttcccattgacacagtacacggaactcaaaaatccggctccaacggacgaggaatcctggaaaggcctttccggcactcgttgtgcatggggagacacttacacccgatataagaaagaggtaaatccacgtctcaatcagaaaaagattgatatcaaaggatggaaaggagaaagagtcaccgcacagttggtagtttcttccgctatcgatttggataatgtttccgtagaaatagctcccctgacgcattcctccggtaaacaaagtatttcggcagaccgtattctgaaagggtttgtcagatatgtgatgacagatgaactgaacaagaaccaaaaaggtacttgcggtccccgaccggacttgtcacaattcgactccacactggtagctgaccctatcgaccatctcgccgctgctttaccgataaaagcgaagacctctcaaggatactggatacgcgtctggattcctgaagatgcaattagcggcaattattcatccgatgtacttataaagaataatcacgaagtgatcgggaagttaaaactgaccgtacaggttcagcaacgcacattgcctcaacccgatcaatgggctttccatctggacctttggcaaaacccatttgcagtggcccgttatcatcaggttcctttatggtcggaggaacacttcagaatcttaaagacagaactgcaaccatacgcggatgcaggcggaaaagtgattaccgtccccatcatgcatcacccttggggcggacaaacttatgatccatacgaaacgatgatcacttgggttcggaaaatagacggtagctggtggttcgactacacgatcttcgacaaatgggtggagttcatgatagatatgggaataaaaaaggagatcggatgttattccatgattccctggaaactgtctttcctctatttcgaccaagccaccaacagcatgaaagaattaaaatccaagccgggagagcaggcttatcacgacctatggttaagtatgctgaaagactttgctgctcacttaaaatccaaaggctggtttgacattacgcacatcgctatggacgaacgccccatgcccgatatgttgaaagcgctgaagattatccgtgaggcagatccgaatttcaaggtttcacttgccggctcactccataaagaactttccgacgaactgaatgattattgcattgccatcgcagagaaattcagtgaagagatgaaaacgaaacggaaagcagaaggaaaaatcacaacttactacacctgttgcgcagaatcccatcccaacacatacacattcagcaacccggcagaaggcgcttggatagcctggtatgcagcgaaagagaatctggacggatacctgcgttgggcattgaacagctggactatcgagccgttactggacagccgcttctacacatggggagccggagatacttaccttctctatccgggaggaaggacctgtctgcgtttcgagaatctggtggcaggcatacaggcatacgagaaaatccgaatcctgaaaacggaactgcaaacccaaaacaagactgctacactacgcaaactggagagagtacttgaaagttttgatgagctccaactgttaaagactccggcaaacgtcgtagtggaaaaagcgaatctgtttatcaacgggctctaggtttccgattgcttacagaacatattgtgccactctattgctatgagggtggcataataatttgcgtttcaacacaccatcatgaaatattttcgtcatatcttatcctacacttccgctttttttcgtacttttaccccttgttggaaagaagtgcctttctgacccttgagaacagaaaaagaaaaaagcaatatataaaatgaatcacaaatggaattatcgacccattacacccggacaggcagagacaagccagatattggcccaagaattagggattagcccgatacttggacaacttttggtgcaacggggaattacgaaagcggcagacgctaagaaattcttccgtccgcaattgcccgacctgcacgacccattcctgatgaaggatatggacgttgcagtagaacgtctgaacaaggcgatgggaaagaaagaacgtattctaatttatggagattatgacgtagacggcactactgcggtagcattggtctacaagtttattcaacagttctattcgaaccttgactattatatacccgaccgttacaatgaagggtatggcatttctaaaaaaggagtggactatgccgccgaaaccggtgtagggcttattattgtgctcgattgcggcataaaggctgtggaggaaatcacgtatgccaaagagaaaggaatcgactttatcatctgcgaccatcatgtgccggatgaggtgcttccacctgccgtagccattctgaatgccaaacgcttggataatacgtatccgtacacacacctttccggttgcggggtcggtttcaagtttatgcaagcgttcgccatcagcaacggtatcgagtttcatcatctgattccgctgctcgacattgtggcggtaagtatcgcatcggatatcgtgcccatcatgggtgaaaaccgtattctcgcttttcatgggttgaagcagctgaacagcaacccgagtactggaatgaaagcgatcatcgatgtatgcggactctccgaaaaagagattaccgtcagcgatatcgtattcaaaataggaccgcgtatcaacgcatcgggacgtatccaaaatggaaaagaagcggtagacttactcaccgaaaaagatttctcggtagcgctggagaaagccggacaaattaatcaatacaacgagactcgtaaagacctcgacaagagtatgacggaagaggcgaacaatatcgtcgccaatctggaagggcttgccgaccgccgctctatcgtgatctacaacgaagagtggcacaaaggagtgatcggtattgtggcttcccgactgacagaagtctactatcgcccggctgtagtgctaacccggacggacgacatggcgacaggttccgcacgttccgtttccggcttcgatgtatatagagcaatcgaacattgccgcgacctgctggagaactttggaggacatacgtatgctgccggactatccatgaaagtagaaaacgtggaagagttcaccagacgatttgaagaatacgtctcgcagcatattttaccggagcagaccagtgccgtaatcgacattgatgcggagatagatttcagagacatttcatccaagttcttcaatgatctgaaaagattcaatcctttcggtcctgacaatatgaaacctattttctgtacgcaccatgtctacgactacggaacaagcaaggtggtgggacgtgatcaggagcacatcaaactggaactggtggataataaatcgaacaatgtaatgaacggcattgctttcgggcaaagttcgcacgtacgttatatcaagacgaaacgctcgttcgacatctgctacaccatcgaagaaaacacgcataagcgtggcgaaatccaacttcaaattgaagatataaaaccgattgaataagtatcaggagatattgaaacaatactgggggtatgactccttccgcgacttgcaggaggagatcattaccagtatcggcgaaggcaaagatacattgggacttatgccgacaggcggtggaaagtccatcaccttccaagtgcctgctctcgctcaagaaggtatttgcattgtcattactcccctcattgccttgatgaaagatcaagtgcagaacctgcgcaaacggggaatcatggcgcttgccgtatattccggcatgacgcgccaggagattctcaccgcactggagaattgtatcttcggtgattacaaattcctctatatttctccggaacgtgtggatacggagattttccgcaccaaactgaaggcaatgaaagtctccatgatcacagtagacgaaagtcactgtatctcccaatggggatatgacttccggcctgcctatctgaaaattgcggaaatacgggaactcctgcccggagttccggtgctggcactgaccgcaaccgctacaccggaagtagtaaaggatattcagaatcgtctgaacttccatgaaggcaatgtcttccgcatgagttttgaacggaagaacctggcgtacattgtccgtaagacagacaacaagacgaacgagttattgcatatcttacggaaaataccaggtagcgccatcatttatgtccgcaacaggcgacggacaaaggaaatcaccgaactgctggtgaacgaagatattaccgctgacttctatcatgccggactggataatgcagtgaaagacctccgccagaaacgctggcaaaacggggaagtccgcgtaatggtagccaccaatgctttcggaatgggtattgacaaaccggatgtccgcatcgtccttcatcttgatctccccgattctccggaagcgtattttcaagaggccggacgggcaggcagagacgggaaaaaggcatatgctgtcattctatatgccaaatctgataagactaccctgcacaaacgggtggcagacaccttccccgacaaagagtatattctcgatgtttacgagcatttgcaatattactatcagatggcgatgggcgacggtttccaatgtgtccgcgaatttaatctggaagaattctgccggaaattcaaatactttccggtcccggtagacagtgcgctgaagatactgacgcaagccggttatctggaatatacggacgaacaggataatgcttcccgcatcctttttacgattcaccgggacgaactgtacaaactacgggagatgggaaaagaaaccgaagcgctgatacagacaatccttcgttcctacacaggggtattcacggattatgcctatatcagcgaggcttcactgtcgatacgcacggggctgacacgcgaacagatctataacatcctggtgacattgaccaaacgccgcatcgtggattatattccacacaaaaagacaccttatattatatatacgcgcgaacggcaggaactgcgttttgtacatattcctccctctgtctacgaagaacggaaagcaagatacgaagcgcgcatcaaggcgatggaggaatatgtcacttcagaaaacgtatgtcgaagccggatgctgctccgctacttcggagagaaaaacgaacataattgcggccaatgcgatatctgcctcagccaccgcgccacagacagtctgtccgatgactcctttgaagaattaaagaggcgaatgaccggactgctcattcaaaaaccacttactccggcagaaatagccaataacatggaagcggagaaagaaaaggttggagaggttatccgctatttattggaggaaggcgaatggaagatgcaggatggaatgatacatatatcaaaataagttattacatttgcaagtgtaactcaaaaacaacatatcatgccgaacttttttaaatctttcttctccgggaaatcggagacactggaaagtgaaaagcagaaaaacgaccggaaaagattcgagatcttcaaatatgacggtttgcgcgcgcaacgcatgggacgcccggattatgccgtaaaatgtttcacggaagcccttgccattgaggaggatttcgagacattgggatatctcagccaactctacgtccaattgggagaaacggcaaaggcccgcgaacttttggagaaaatggctgtaatggaacctcatgttaccaatactttcctgacattggcgaatgtatgcttcattcaggaagattatcaggctatggaagaggcagccaacaaggccatcgccatcgaagaaggaaatgccgtagcgcattatctgctgggaaaagcccgcaaaggccaggacgacgacctgatgactatcgcccacctcaccaaagctatcaccttgaaggatgatttcatcgaagcccgcctgttacgcgcagaagccttattgaaaatgaaacaatacaaagaggtaatggaggatgtagatgccatattggctcagaatccggaagaagaaacggcgatactcctacatggaaaagtgaaggaggacaacggagagtccgaagaagcggaaaaggattatcgacttgtcacggaaataaatcctttcaacgaacaggcgtacctctatctgggacgactttacatcagtcagaagaaactgacggaagctatcggactctttgacgaagccattgagctgaatccgaacttcgcagaagcttataaggaacgcggacgtgccaaattgttaaatggcgacaaggacggttctatcgaggacatgaagaaatcattggagctgaacccgaaagatgaagccggtttgaacggtgaattcaagactctgggagcaaagccggaaactcttccgggtatcttctaagtgtcctttttatattttttaggcaagaatagaaaaaaagtatcgctttttgtttgcatctaacagaaaattattacttttgccctagaattagaaaccaaagcaaaaacaaaggatcgaatgaaatcgtttacttatgcatattacttctttttttacttttactttagcaacaaagtagagcgggagtttgtatgtatcaagtgacagtgatgcttaaggactgaatagagaaatcaatcatatgaatcccgctccaatatggacgcgggatttttttatataaaccatttagaacaatgaaaaagatagcaattcaaggaacattaggttcctaccatgatatcgccgcacacaagtacttcgaaggggaagaaatagagctaatctgctgcgccaacttcgaggacgtgtttacttcgatacgaaaagacagccaggtaatcggaatgctcgccatcgaaaatacaattgcgggaagcttgttgcacaacaatgagttgttgagacaaagcggcacacaaattatcggcgaatacaaattgcgtatctcacacagttttgtctgccttcccgacgaaagttgggaagacctgacggaagtaaattcccaccctatcgccctgatgcaatgccgcgaattcctgaaccaacatccgcaactgaaagtagtagagggtgaggatacggcacgcagcgcggaaatcatcaagaacgagaacttgaaaggacacgccgccatctgttccaaagcggcagccgagcgttacggtatgaaggtgcttcaagaaggaatcgagacaaacaaacacaacttcacccgttttctggtagttgccgatccctggcaggcggatgaactacgccaacatcatgcaaatgctaccaacaaggcaagcatggtattcaccttgccgcatacggaaggcagtttgtcgcaagtattgtccatcctgtctttttataatatcaacctgaccaagatacaatcgttaccgatcatcggacgtgaatgggaataccagttttatgtagatgtggctttcaacgattatctgagatataagcagtccattgcagcaatcactccattaaccaaagaactcaaaacattaggcgaatatgcagaaggaaagtcaaatgtataaaatcgctcctgccgacagactggcaagcgtaagtgaatactacttctccaagaaactgaaagaggtagcacagatgaatgcggaaggtaaggacgtcatcagtctgggtatcggaagtcccgatatgcccccctccgagaaaaccatcgaaacattgtgcagcaatgcgcatgatcccaacggacacggctaccaaccgtacgtgggcatccccgaacttcgcaagggttttgccgcctggtatcaacgttggtatggagtggaactgaatccgaacacggagatacagcctttgatcggctcgaaagagggaatactccatgtcactctggcatttgtcaatccgggagaacaagtgctggttcctaatccgggatatcctacttacacttcgctgagcaagatactcggtgcggaagtcatcaactacgacctcaaagaagacgagaactggatgcctgattttgaagccctggagagaatggacctcagccgggtaaaactgatgtggaccaattatccgaatatgccgacaggcgccaatgcaactccggaattatacgggcgtctcgttgactttgcccgccgcaagaatattgtaatcgtgaatgataacccatacagctttatcctgaacgagaaaccgatcagtattctgagcgtaccgggggccaaagactgttgtatcgaattcaactccatgagcaaaagccacaatatgccgggatggcgtatcggtatgctagcctcaaatgctgagtttgtacaatggattctgaaggtgaaaagcaatatagacagcggaatgttccgtgccatgcaactggcggcagccactgctctggaagccgaagccgactggtacgagggcaataacaagaactaccgtaaccgtcgccacctagccggtgaaattatgaaaacactagggtgcacatacgatgagaaacaggtaggtatgttcctttggggaaagatccccgcttcctgcaaagatgtggaagagttgacggaaaaggtattgcatgaagccagagtgtttatcacaccgggatttatctttggcagcaacggagcgagatatatccgcatctctctttgctgcaaagacgccaagttggaggaagcactcgaaaggataaaaacaatgacacaatgtgctgacagccaacgtgccgataaatagaacaattaaatagtttagataacccaactgccaatggaattactagcacattggcatattgatacattattattatggaactcgaatcaattttattaccgggcattgaagctaaaagaccgattgtcattgccggcccgtgtagcgcagaaacagaagaacaggtaatggatacagccaagcaattggcagcgaaaggtcagaagatattccgtgcaggaatctggaaaccacgtaccaaaccgggaggcttcgagggtataggcgtcgaaggtcttgcctggttgaaagaggtgaaaaaagaaaccggtatgtatgtcgcaaccgaagttgcaacagccaagcacgtttacgaatgtctgaaagccggaatcgatattctttgggtaggtgcacgcaccactgccaaccctttcgccgtacaggaaatcgcagacgctctgaaaggcgttgatatccccgtattggtcaagaaccctgtaaatccggatcttgaattgtggatcggagccttggaacgtatcaacaatgcaggtctgaaacgtctaggtgctattcatcgtggtttcagcagctacgacaagaagatttaccgcaatctgccccaatggcacattcctatcgaactgcgccgccgcatccctaatcttcccatcttctgcgatcccagtcatatcggtggaaaacgcgaactggtagctccgctttgtcagcaggctatggaccttaacttcgacggtctgatcgtagaaagccactgcaatccggattgtgcatggagtgacgcttcccaacaagtgacaccggatgtactcgactatatcctcaatctattggttatccgtaccgagacccaatcgaccgaaagtctggggctgctacgcaaacagattgatgaatgcgatgacaacatcattcaagagttggcaaaaagaatgcgcattgcccgtgaaatcggtacatacaagaaagaacataatatcaccgtactccagaccggacgttacaatgaaattctggaaaagcgcggttcacaaggggaacaatgcggtatggatgcggaattcatgaagaaaatcttcgaggctatccacgaagagtctgtccgccaacagatggagattatcaacaaataaacaatagatatgagaatattaatactcggagccgggaaaatgggctctttctttactgatatattgagcttccaacacgaaacggccgtgttcgacgtcaacccgcaccaattacgttttgtctacaacacttatcgtttcacgacattggaagaaatcaaggattttgaaccggaactggttatcaacgccgcaacagtaaagtacacactggacgctttccgcaaagtgttgcctgtgctgcccaaagattgcatcatcagtgatattgcttctgttaaaacgggactgaagaagttctacgaagaaagcggcttccgttatgtttccagtcaccctatgttcggtccgactttcgccagccttagcaatctaagcagcgagaacgccattatcatcagtgaaggagatcacttgggtaagatcttttttaaagacctctaccagaccttgcggttgaacatcttcgaatattcctttgacgaacatgatgaaacggtggcttactcgctatccatcccgttcgtttcgacgttcgtatttgcagctgtaatgaaacaccaggaagcaccgggaaccacattcaagaagcatatggctattgccaaaggtttgctgagcgaagatgactacctgcttcaggaaattctgttcaacccgcgcactccgggacaggtggccaacatccgcaccgagctgaaaaatcttctcgaaatcattgagaacaaggatgcggaaggaatgaagaagtatctgacaaagattcgggaaaagatcaaataacccgtaatcggcaatcactgattacacataagatttaacggtcccctacaaaaaagttctttgcaggggatttttttatgtgtacctttgtatccgcaaaaacagatttacaggagatagaaagaatgatagatcaagctaccatagaccggatattggatgcggcacagatcatggatgtcgtttcagattttgtcacactacgcaagcgtggagtgaattatgtcggtttgtgtccttttcataacgacaagactccttctttttatgtctctcccgccaaagggctttgcaaatgtttcgcatgtggaaaagggggaaatgccgtacacttcatcatggagcacgagcagatgtcctatccggaagcactaagatacctcgccaaaaagtacaatatcgaaatcaaagaacgggaactgagtgatgaagaaaagtttgtgcaaagcgaacgggaaagcctgtttatcgtcaataacttcgcacgcgattactttcagaatatactgaagaaccatgtagacggccgtagtatcgggatggcttatttccgcaatcgcggctttcgggatgatatcatcgagaagtttcagttaggatattgcaccgacagccacgacgctttcgcccaagaagcaatacagaaaggatataagaaagagtatcttgtgaaaacgggactttgttatgaaacggatgaccaccgtctgcgggaccgcttttggggacgtgtcatattcccggtacacactctttcgggaaaggtagtagctttcggcggacgtgtgcttgccagtgcgaccaaaggggttaaggtcaaatatgtcaattctcccgaatcggatatttaccacaagagcaacgaactatacggtatctattttgccaaacaggcgattgtaaaacaagaccgttgctttttggttgaagggtacacagacgtaatctctatgcatcaatccggcatcgagaatgtagtggcctcttcgggaacagcgcttaccccgggacaaatccgtatgattcaccgcttcacaaacaatatgacggtgctttatgacggggacgccgcaggtatcaaagcttctatccgtggtattgatatgctgctcgaagagggtatgaacgtcaaagtctgcctgcttcccgacggtgacgacccggactctttcgcccgcaaacataactctacggaattccaggccttcatctcggaacacgaaacggactttatccgcttcaagactaacttgttgttagaggacgccggaagagatcccatcaaacgtgcggaactgatcggtaatctggtacaaagcatttcggtcataccggaagcgattgtacgggatgtgtatatcaaagaatgtgcccaactattacatatagaagataaactgttggtttcggaagtagccaaaagacgggaaacgcaagcggagaaacgggcggaacagacagagcgggaccgacggattgccgaaagggcagcctctatgccacaaggtgaacaggccggaaatatgcccgctcccaatggggatgttccattgcctcctgaaattgctgaggcaggatatacagaatcccctttcccgccacaagaagacaactatgcttcttttattccgcaggaaggaaaagaaggacaggaattttataaattcgagcggttgatattacaggccgtagtccgttacggtgagaaagtcatgtgtaatctgactgacgaagaaggaaatgaaatcccagtcactgtcatagaatatgttgtcaatgacttgaaagaggatgatttggctttccataatccgttgcatcgccaaatgctgtcggaagctgccgcacacatgcatgattcggcttttatcgcggaacgttactttctggcacatcctgacccgattatcagtaaattgagcgtagacctgattaatgtacgttatcaactcagcaaataccactccaaatcacagaagattgtgacagatgaagaacggctctacgaactggttcccatgttgatgattaactttaaatacgcaatcgttacggaagaactgaagcatatgctttatgcactgcaggacccggcgctcgctcatgacaatgaaaagtgcgactcactaatgcaacgttataatgagctgagaaccgtacaaagcattatggcaaaacgcttgggggatagggttgttctacactaactcccgtgctggatgagattcataaactcttcgcgagtctttgcctgattgaaagcccccgtaaagtcggaagtagtagtaatagagttctgtttttcaacaccacgcatttgcatacacatatgtttggcttccactacaaccattacacctaacggattcagcgtttcctgaatacactctttgatttgcagcgtcatgcgttcctgcacttgcaggcgatgagagaatatatcgaccacacgagcaatcttactaagtcccgtgatatagccgttaggaatataggccacgtgtgcctttccataaaacggtagcatatgatgttcgcagagagagaagaaatcaatgtctttcacaatcaccatctgactatattcctctttgaatttagcggaacgaagtacttcgtgcggatcgatgtgatacccttttgttaaactcagcatcgccttagctacccgttcgggagttttcaacagcccttcccgttcagcatcttcgcccaacaaagttataatactacgataatgattcttcaattcctccaaattcggagagacaatttcttctttttccaacatgacagatttataaaggaatattgatctggtctctcacaatagaaacctctttaaacataccggtagctttcaaccgacgcatcattgcgtccgcctcttcaatacttcggaaatcacccacacgacaaagccaacggggcgaaataaacgaagtatataccgacaactccggaaaatactctttgactcttgaagctacacgatcagcatcgttttttgcctgtcgcgtattattgcctgcatacgcctgtatccggaaaccggaagtctttatcaccttctgttcgcctgttgcaggacgctccatgccaatcagagcttcaatacggggatcctggtgaatggtcacctttccctgccccggcaccgtacgctccaaactcctgataatgccctgcgcctgtgcaccggcacccaccaaaagaagcaataggacaaataaaacaagttttctcatttgataatgaaatagttcaccacagattacacggattaacacagattttcattgaatgaagctaatctgtgcgagtctgtgtaatccgtggtgaaagttaattatgcattgaacgcatcaatgatacctttgaaatcagcaaccttcagagcagcgccaccgatcaaaccaccatcaacgtccggattagcgaacaattcttttgcattagaaggcttgcagctaccaccataaaggatagaggtattgtcagcgatctccttgccatacttgtcagcaacgattgaacggataaaagcgtggatttcctgagcttgttccggagtagcagttttacctgtaccgatagcccaaaccggttcgtaagccaagataatctttgagaaatcttcagcagacagagagaatacagaagccatctgtgcagctaccacttcattctgcttgttagcttcgcgttcttccagaacctcaccgatacagaaaatcggagtcagaccgttagccaaagccaatttcactttttcttcaaggatagcaactgtttcaccgtagtaagcacgacgttcagagtgtcccaaaattacatatttggctcctgtagaagcaaccatctcagccgatacctcacctgtatatgcaccggaagccttgtctgcacagttttcagcacctacaccaatcttagcaacgtctaccaacggagtgacagaagccaagtggataaacggagtacagatgatcacatcacagttaggcttttcgttagccaatgcttcgttcaattctttagccaaagcgataccctcttgaagggttttgttcattttccagtttcctgcaacaatgttctttctcattttgttttctttatttaaagggttaataaaacttttttttcgttctctacggcgaataaccagcacatccacgcccagcacaagcaacaacgggataacaaaccacaggaaaacatatcccactgtgtgaaaatcactttccaacttttgttgtcccaatggcaaattctccagtttatcggtcaacacgtattcgtccggaatatcctcgtcactccacttattcagaatagtcccgttcttaatcagcattaatcccggattggaacgcaccatcgtcttcagagttatatcatccatctgacagaaaggatactctgcaccagtcttgtctttccataattcgatttgttcttcgggtgaggaagtcaggcaataaaatctgtaaccatgttccaccgaataatcatatatttcattaatcaaatcaatattactgtcatccgcttcctcaatccggtgggcaaccaacaggaatgtatatcccatatcggtcaggacatcttccgtaatatcatctcctgtatccaaatccattatggaaaaatcatggatgggcggttcatagcctttttccttaagtacagtacgtgtatcgacaaatgtccaagtactgtccggatagttatccagcgtaaattctttcttttcgccattcttttccagcacaaaaatactttcatatacactcggtttcgctccatcgggaatcgtcatcccttccgatatattctttccaatcttatacggccggaagtctaatacaggcaaacggtccaagcaataaaatgacaaagtaaacacaaaaaacagtgtatataatgaaaccagccattccatcttcacgctaatgaaccggaacaccatcttcctatatcggaacgttccggcagccgcaagcaggagcactacatttttgccaaatgtctcccaattcgtcaaaacccaagcatcgccaaaacaaccacagtccgaaaccggatcaaagagggcaaggtacagtgtcagtggcgtcataaaaatcatcagcattaacgccaatgaagaagcgatcgtccttcgcgttccgaaaaacaaagagataccaataaagaattcgacagaagataacacgatacctcccaatagcgggaaaaatgaagggaaccaagaagccattccgaatgcagccagataatcctgtatcttatactggaatcccagtggatcaactgcctttacaaatccggaaaatatgaacgaagccgccagaataaagcgaccggtgttcgccaccacttcctgaatgatatgtaagttcttatccttcaaattctatctttatcaatccaaaaaccgaataattaatcatgtccatgtaattagcgtcgattccttcggacaccaatgtgttaccggacagactttcaatctgcttagtgcggtaaattttcatcaaaatcaagtctgtatacgaactaacgcgcatgctccgccaagcctcatcataatcatggttcttggcaagcatcagttccaatgccgcttgggcatacttatcataaagcgccatcgcttcttcattactgatgtcggcagattctgcatatcccaattccatctgaatcagtccgacaataccgtaattgacaatcgcaatgaattcagaacggattccttcgtctaccaaagtcactcctttagtttcaatactacgtatccggttggctttgataaaaatctgatcggtcaccgaagccggacgcaggatacgccacgcaggaccgtaatcgtgcagcttcttggagaataagtcacggcataaagcgatgacatgttcaaattgttgcttggtatctttcattttcttccaaatagtgcgcaaaggtaacaataattaagtaaaaacagaaagagggcactctaaattatattaaagtgccctcttctaaagatattgtattactgttttataagcaagatatttatgaacaacgcaagacttgtccgatgcgcaaagtcgttgtcggcttaatacggtttaacttacaaagcgtgctgaccgatacgccacgcaacttagcgatgcgtgacagggtatctccacttttcactttatgatagcggatagtgccatctgccacttgtgtgtcatgagaaccggcgcgtttcacacctttcgttttccggaacgtataggtatcggctacgatatcctgtttcgggaagtcgaacatataaatcggattgattgcaattcctaagaaacgagtctcaaaatgaagatgcgaaccggtagaacgtcccgtattaccacccagacctatcacttcaccggctttcaccaattgattttcttctaccaactgcttggacaagtgtccgtaaacagtctccaaaccattgtcgtgacgaataacgacatacttgccataacctctacgctcatatttcacgatacgtaccttaccatcaaaggcagccacgatagtatcgccgatattaaccttcaagtcaagaccgttgtgcattcttctccaacggggaccgaaaggcgaagttatctttgtactcggagtcggcatatggaatccggtcaggtcgattgtataagtttcgggaataatagcgtttccgtaagcatgtacatactggttattccagttaggataaagactaagggcaggatattcggactgttcggcacggatttgcttctgcaatgccaaagagtcaacagttttcaatttcttgtctatcggtgcttggcgggcaatcaggtcttgagagaaagagctcaaactaaccatagccgctacagccaccaatccggttttaataatgcagttaaaattcattcgttcttgtcaaatcatttaatattcgtcgtttgcatacaggtaatcaaaagtagcctgcttgtaatcgaatatttcttccggtttaaaaaatctcgttaattcaacagctgcggtttccggagaatcggaagcatgaactatattctcttgaaagctcatactgtaatctccacgaatggttcccggagcagccagacgtccgttagttggtcccgccaatgtacggactgtttgaatagcatccacaccctcaaaacaacaaacgatgacaggagctgtcatcatggaatctttcacacgttgaaagaatggcttgccgctaaggtgggcgtaatgttcgcttaacaattcatctgtcagttgcatcatcttcataccggccaaccgtaatcctttacgttcaaagcgatgggttatctcacctatcaatccccgttgaagggtacatggttttaaaatgaccagcgttttttcaagcataatactcgactttataaattggttaaactatacatttactaaaaaattcccccaaaggtagcattttccgatgaaactgcaaggaagtcattaactatttttcagacggttagccggtaagcgggctaataattatcccctaaactcctataaataggaagaataaggactaaatatgttttgcaacacatttacgtaaataaactgtatgtttaaccgtttttcagctaatggcagcccagttaacattcgttttccgcaatgctttcagttgtcgccacaaaatctcgttctccggattctgcgctgcaaagtcatgctctactatttcttcggcaatggtacggacatattgcagaagttgtccgtcgcgggctatatcggcaatcttcaggtcaaaagcgacaccactctgctgagtaccttcaagatctcccggaccacgaagttttaaatcggcctccgctatttcaaaaccatcattggtacgcaccattatttccagtcgtttacgagtatcttccgtcaacttataattagtgactaaaatacaataagactgttccgctccacgtcctacccgtcccctcaactggtgcaattgagaaagtccgaaacgttcggcattttcaataatcattaccgaagcattcggtacgtttactccgacttctatcaccgtagtagccaccattatctgtgcctctcccgaaacgaaaagctgcatctgctcgtctttctcagccggtttcattttgccatgcaccttgcaaaccttgcacttggggaattcttcgaggatatgttgatacccctcttcaaggttcttcaaatcgatcttctcactttcctttatcaaaggataaacgatataaacctgacgtccctcatcaatctgcttctgcactgaacggtagatgctctcccgacgattgtcgaactgatgcacagtggttatcggctttcgtccgggaggcaactcgtcaataacagacacatccagatcaccgtataaagtcatggccaatgttcgcggaatgggggtcgctgtcatgacaagcacatgtggaggttgattattcttactccacaggcaggcacgttgcgccaccccgaaacgatgttgttcgtcaataaccacgaatcccaaagatgagaaatttacagtatcttcgataacggcatgcgttcctatcaggatatgtacatctccggtcagcagtccggtaagaatagcctcccgtttttttcctttaatggatccggtcaacaactcaacacggatatccatgccgaaaagcagttcttttatggtttcataatgctgattggcgagtatctccgtaggggccatcatacacgcctgataaccattatccaaagccagcaacatactcatcaaagcaaccaatgtttttccgcttccgacatccccttgcaaaagacggttcatctgccgcccgctgcctacatcgttacgtatttccttcaatacccgtttctgagcacccgtcagctgaaaaggaagattcttggcatagaatgtgttaaatacatcccctaccttctcaaaaacataaccccgataccttctctgcctgtctttggcataccgaagaatattcaattgcacataaaacagttcctcgaatttgagacggtattgcgctctgcggagcaaatcggggttggcagggaaatgaatattccgaagcgcttccgtcaagggcatcagatgatgttccgccagcagtttgggcgaaagagtctcgggcaaaggctcctgtatctgctgaatgacagtagccatcattttctctatcgcatgggagttgaggaagctgcgcttcattttctccgtcgtattgtaataaggctgcaaacctacggacgaaagtttcagttcatccgatttgtctatatcgggatgcgctacgttgatacgtccgttgaacacggtcggtttaccgaaaatgatatactcttcgtgaagtttatatttgcctaagatgtactttattccttgaaaccacaccagatccactacacccgtcccatccgaaaaatgagcagtcaggcgacgctgccgtccttcaccgatagcctcaaagccgagaatctctcccttcaattggatatacggcatattgccatctatttcgtgaatgtaatagacgcggctccggtcaacgtatttataaggaaagtagtaaattaaatcgtgcaaagagtagattccaagctccttatttaatatagcggccctctgaggacctacaccggagataaactttatgtctcgtgtgactaaatcgaacatttacaaaagtgcactccctattttcaaatcgaaaggggtcgttatttttatattctcacggttgccttcggcaagatataccggcactcccattgcttctaccacagaagcgtcatctgtaaagaacggagtaaactcctgcgtatatgcccgcttcaatagttcagtatcgaatacttgcggtgtctgcaccagtttataatcattgcgactgactgtctcgctactattgccggtcaaatggcgtacggtttccactacatcgataacaggaattacagccttccttgtctccgccaaatcgtaacagttacggattacgtcgaccgagacaaacggacgaaccccgtcatgaactcccaccaatccggattcccgcaccaatgccaaaccattctttaccgaatgaaagcgtgtctctcccccatcggcaatgaggtgtcctacgtcaaaatgatattcttcacaaagctgtttccagaaatcctgttgttctttgggaagcactaatataatctgaagtgtagcctcatacttccggaatgcttccaacgtacgcatcagtacaggcttaccaccgataggaagaaattgtttcggaagctcactccccattcgcaaccccttcccaccggcgacaataatgacatatttcttcataaacggcttagcgcttaacacacatcgcttccgccaattcgtctactttctctttaccagccaacagctctacgatagctaaagcaaattccatagcagcgcccggtcccatacccgttataatatttccgtcacggacaacgtgttcaccgacacattccgcaccttccagatactgttcgaatccgggataacaagtagctttcttacctttcagcaatcccaatttgcccaataccatcggagccgcgcaaatggcagcgataggcttgcctttttccgcaaagctaagaatcagtttgcgcaatccttcgtgcttatcaagcgtagctgctcccggcattcctcccggcaacaacaaaagctcagcgtcaaagaaatcgcaattttcaaagttgacgtcgcaaagaagggacacatcatgtgctccgactacgatttcatccggtgtaacggatacgatttctacattcagtccggcacgtctcaacgtgtcaacagcagttaatgcttcgatttcttcaaagccatctgcaaaaaatgcgtatacagttcccatatataataatgtattaatgtgccaatatgctaatgtgccaattggctgcgcactgattgttaactattctctatctcaacttaaagttatacgtaatcgttccaatctgattcgtcattctttccaccgcctcgaaacgggctttctttgccgcatcttcggctgcttttcgtaagaaacggttcggagtattcgtatgcgaaagattgatactggttgcaatcacctgtccggcaggatttaccgtgatattcacaacaacccgtccctcttcctgtacattataaacaggtttcggcagactggtgcctgcacctaaagaacgtccgccgaggtcaaatgttccctcgcctcctattcctattttcgcaccggtagaagaattgccttctttgctgccttccgtacctgtgccaccggttgccgtccctttattgccggtcatttgcgctcccttaccaaaagcaccggcaactttcttccttgcggcttcttcggcagccttacgttcacgttccgccttttcctctgcaagccgtttggcttccgcagctttctcagcttcggtcttttccggtttcttcacaggttctttcggcttaaccgtctccttaggtttcaccgtctcctttttaacttcttctgttttcggtttcacggcgaccgtttcctcctcagtctgcgtcaacaggtcttgttctgaaggtagttccggctgtgtttccgcaggagctgccgcatcctcatccagcacgtccacatctaccagcgaagggtcgtcaaagccacgcgccgattccacattgcccatcatcacgggtattccacccgcatcttcatccggctgcggaacagtgaagctcaccagaatcaaaagagcaatcactgccacgtgcaccagcaatgcacccagcgctcctatgtattcacccttttttcttctgtccatcattcttatctgttttcgggcgggcgtgtagctagcaccatcttaaaatgattctcgttcgcgatgttcagtacccgtactatttcacggtaaggcactgattcatccgcatataatgccacatacatttcaggttccttctccgcacagctctgcaaaaatgatgtcaaatcattcaacgctacgggttgctccttctcattgccgaaagccgcatagaaattcaagtccttatcgataatgactctggtcagcggtttggccgaagtttgctgcttgccttgcggtaacagcactttaatagcattgggcgacaccacagtagaggttatcataaagaatatcagcaacagaaatatgacatccgtcatggaagccatactgaaattgggcgatactctatttcttctttttaatcccactttattagtgattaatggttagtgattagctgtcagctataaagttacttttgggcaggctcgttcaacaaatccatgaattccattgtgcgggattccattttgtttacgacacggtctaccagcatcaccagatagttataagcaaacatggcaataataccgacaatcagacctccgactgtagtaatcatcgcttcatagataccaccggaaagcaacgtaatatctatattcccgctacccgcattcgccatctcgtagaatgcgcgcaccataccggtcaccgttccgagaaatcccagcattggagcgccgccggagatagtcgccatcacggtaagccctttttccagcttcgcaacctcaatgttacctacattctcgatagctacctgtacatcatttatcggacgtcccaaacgactgatacctttttcaatcatacgcgccgaaggagtattcatcgtacggcaatagttgatagccgctttgatttctccgctatgaatataatctttaatccgctccataaacataggatcctctttcccggccctacggatcatatagttacgttcaaacaggatatagaaacagaccacagacagtacgcccagcacaaccataatccatccccccttgatagccatatcaagcatattcatttcaggagtgccaacttccgtcagtacagggttggcggtagccagcgagtcggccatattcatagccccttgagccaacaatatcattgcattcatcagcgtaaacagtttttatattcctgaatggtacgttccaatcctaaatacagtgcgtcactaatcaaagcgtgcccgatagaaacctcatccacccaaggaatgtttttatagaaatagtttaaattaacaagactcaaatcatgaccggcattgagaccgatgcccaatttacgagcggttttcgcagcttcgataaaaggggcgatagccgtttccgggttcttcggataattcgtagcatatggttccgtataaagctccacacggtcggcaccagcctttgctgcatattccaccatttccgaatcggcggcaacaaaaacggatgtacgaatacccgcactgttgaattggtcgagaacttccgtcagaagttccagatttgcttttgtatcccagcctgaattggaagtcaattgtgaagggtcatcgggaaccaaagttacttgatgcggctttaccttcagcaccaggtctataaactcaggcgacggataaccttcgatattaaattcagtccgcaacaaagggcgcaaagcgtatacatccgaatggcgaatgtggcgttcatcgggacggggatgaaccgttatgccgtctgctccaaaagactcacaatcaagggctaccttcaccacatcgggaacatttcctccccgtgcgtttctcagcgtagctatcttgtttatgttcacacttaatttagtcatagttctatgtaatatttgccgcaaaaatacaaatattattattagttgcctaataatacgaaacgcattctccgttcttttttggttatttaaagtagaaatccaagaaaaagtgccaaatttgcaaccgaaaccaatgatacagcttatgaaatttgccatcttcggaaatacttatcagcccaaaaagtcttttcatgccgccaacctgtttcaattattgaagagacagggagctgaaatatgtgtatgcagagagttctaccagttcttgatttcagaacaaatgaaaatcgaagccgatcaattactggatggcgatgattttacagccgatatggtgatcagtatcggaggtgacggaacttttctgaaagccgcccgccgtgtaggcaaaaaagggattccgattcttggcattaatacgggacgtttaggattccttgccgacatctctcccgaagaaatggaagagacattcaatgaaattcatgccggacggtacagtgtggaggaaagaagcgtgctgcaattgatttgtaacgacacacatttacaggaatgtccgtatgccttgaacgagatagcagtattaaagcgggacagttcctccatgatcagtatccgcacggctatcaacggcgcttttctaaatacatatcaggctgacggactggtgattgccactccgaccggatcaaccgcatactcattgagcgtaggcgggcctatcattgtgcctcactccaacactatcgccatcactcccgtagctccgcatagcctcaatgtccgtcccatcgttatccgcgatgattgggaaatcacactagatgtagaaagccgtagccacaacttcctcgtcgccatcgacggtcggagcgaaacctgcaaagagactactcaacttactatccgtcgggctgactacagtgtaaaagtggtaaaaaggttcaatcatgtttttttcgatacactccgtaccaagatgatgtggggagcggatggcagggcgcaataactcattttgtacccaccgacttaatttaatgtgaacgcctgggaaccgatcaagttgccgccttcgaaaatatccacccgatagtttccggcgtacaagaattcttccacatcccaaaacacattcacattctgctcttcgccattgtactcgatatacttcttaatggaataggtcaatgttcggttttcataaggaaaagtattggatgcactcttggtcaacacatcattatccggtttggtaatacgtatatagacagtacgctctccgttctcagccgttatattcttcacaatagtaaagctgatagccaatttcacgacatctttcacttttttcgccactttaccgcgtttattgcgtggttcgacacgaatattggtcgcatcaagctgggctgccaacatcactttcttatccagattcttcttttcttcggaaaggttatcaatctgtcgtgaagcctgattgtatttttgggtgacttccgcgatgacttgtttctgttgtaccgtcagtttattcagtgagtctatctgattgatatagccaatcattaccttgcgcaaggtagccaattccttcttcagacgacgaatctccgtcgcattcgaacttttcaccgtacggagttcttccaataatcgctgagtcttcaactgctcttgctccagcaactgagataaagagtcattggaaattgtcatctttaactcatcatattgttgtgcaaaacgagtatattcgttttccagatcctccttatctaattggaattcttgcaccaactcccggttagcctgtttttcagtaaataacagataggtaacaccgataatcgctatcactaatacggcaacagccgcaataagaatgccttttttgttcatagttccagtacgttaattgataaccgccgcaaaagtaatcatttcgcaatagaagtcaagcagaaaagcagagagttttttatatcccctctgctaatccatacaattttaacttattgatgggtagcaatcaaagaatagacttgtgccgaagtatgttcacgaataccttttgagatattatcaatttttctgttagcaacactgctctcccaatcggccaagtccttacctttttcaagaggtaacgtattatagtccaagacatttcctgatattgtatgatacgaactttatttctttctctgcctactattattaatttcactgcctatacttatttcgtttaactatagtcttccttgcgtatgactatagttatccgcaagggagactatagtcattcttgcggaacactatagtgcaacgaagtaatagtagcggacgaagtaaatccggataggcaagcaattattaaattatcatacctattatattattggaaactcagacctttaactaaaattattacggaaaaatttctttaatcaggattatcgttgtaattttgtcgcgctaaaagataaaacaaattatcaactttttaaatatatagtattatgtcaaaagtaaccgtagtaggcgcaggtaacgtaggtgctacatgtgcaaatgtacttgcttttaatgaagtagcagacgaagtagtgatgctggacgttaaagaaggcgtttcagaaggtaaagcaatggatatgatgcagacagctcaattgctgggcttcgacactacaatagtaggctgcactaacgactatgctcagactgctgattctgacgttgttgtgattacttcaggtattcctcgtaaaccgggtatgactcgtgaagaactgatcggtgtgaatgctggcatcgttaaatcggtagcacagaacatcttgaaatattctccaaacgctatccttgttgtaatttctaacccgatggacacaatgacttatttgtcattgaaatctttaggcttgccgaaaaaccgtattatcggtatgggtggtgctctggatagctctcgcttcaaatatttcctggctcaggctttgggatgcaatgctaacgaagtagaaggcatggttatcggtggtcacggtgatactactatgattccgttgactcgtttcgctacttacaaaggtatgcctgtaaccaacttcctgtcagaagaaaaactgaacgaagtagctgccgctactatggtaggtggtgctacactgactaaattgctgggtacctccgcatggtatgcaccgggtgcagctggagcatttgtagttgaatccatcatccacaaccagaagaagatgattccttgctctgtattcctggaaggcgaatacggcgaatcagatatctgtatcggtgttcctgttattcttggcaaaaacggtatcgaaaagattgttgaactagacctgaacgctgacgagaaagctaaatttgctgccagtgctgctgctgttcacaaaacaaacgctgctttgaaagaagtaggtgctctttaatccccttttacatttaatatattaaaaggctgttcttcatttcagaagaacggcctttttcttttcaccggaatcactaattttgctatatttctaaaaaaagctaattctttttgctttctcatagaaagcacatacatttgcatcgttgtttatgcaattattgtttaagccaacaagtacaaataaacagactatttccataaacaaattaccctcaaatccgcaactacgcgcctaatatgatacagaagcgaaaagaatctgcatcgttagtaaaaagggggcacagtgcatcgaatgtcaccataaagacatataaatgccccttaccccaccatgcgacttgaggcaatacgcaaaatcacgactataagttgtcggtgttatccaaagtcattctggaacacattggcataagcattgttgcatgaatagatattcagcacatacttccttgatgtcctgacccatttggctggcacagagatgaacttaaagacaaacgtcttgatgcggcttgttgctttgagtccgaacctcttcacgtcaagcctcgccatgatgaatttatagaagttgcgtatgagtgccataagcagaagaaacaccgtgttttctcccataaaggattttggaagcctgttccagccgaatccgttattcatatcatcgaagatgcgttccttccctccacggaggttatagaattcgacaatctctttctcggaagactcgtagtcatttgtaaggatgcagcggtaggtgtattctccttcccacaggtcgagttcgccgtctatccgcttctgtctttgaatcacaagacggtatgccttccctttccatttctcgatgagaatggaggccagctcaaactcaatgccgcccaattccactttcttccaacctctgagggcaaagatgtcattgtagagcgaactgcatcggttagcacggatatagaaggtcttgcagtgtttagcaatctcttccactatctcttcagaacacgagccgcaatcagctctgaaacggttgataataagcttgttttgttcaaacctttcaaagaacctcttcagcgtgtccttctggtggaaacggacatttgtgttgccgtcgctgttctcaatgccgacaatcaagttgccaataaccgccacgccagggcgataaccaaggaacttcttgtatgtaggcttcgcatcaaacttctcagcctctatgaactggtggtcgaagtcaacgtcatacccctcgccctctttcagctgccctgtggacaataggcaattgaggagcagtgtattcagcttgtctgccgtgttgaagtcgtaggtcttgccagtgtcggatgtgtaggaaatgttatcctgggtcagttcctttatggctctaagaatcgtgtcggcactgcatgtgcgaagtgtcggatgaagcgaaaggtggtacatcagatgagtggtgacatcctcgatgcatgagccgccacaaaaataaacgctcataagcgaacggatgatttcgctgtattgataaccatacagcctgcatctcataccgagggttgagtcgattacagatgagagtctggagtcaaattgctccattattgaaaatattcctccaaaaggagtgagtttctcggatttaattgctacctttgccatgtctgtcgggtttgatacatattttgatttgcaacactaagataggtgaaaaatctgacatggcaaattcctgagcaactttttgttgctcaggtacttaaaaagttatatttgtaatagtgttgcggaattaaggattacataaaaacagggttatttaaatagaagtatcaccttattaatatgcaagatgcgatgaaaaaactatttctcctgacaatcctattacacctgacttttatagtaaaagcgcaaacttcactaaacttggatagttgccgggcattagcgcttgccaacaacaaagatttgttgataagtcatgaaaaaataaatgcagcccattaccaacgaaaggcggcattcaccaactacttacccaacttttcggcaaccggagcttacatgagaaatcaaaaagaattctctctattgaacaacgatcagaaagcggcactctccggattgggaagtaatctggcaggtcccatcgggcaagccgcagccggaattatagcaacttatcccgaactggctccactcatatcctcattaagcgggagtttaccggcagccctcgaccaggcaggcaattctttggtggacgcgcttcgtacagacaccagaaatgtatatgccggagccatcacattaactcagcctttatatatgggcggtaaaatccgtgcttataataaaataacaaaatacgccgaagagttggcacgccaacaacataatggcggtatgcaggaggttatcatgagcaccgaccaagcctattggcaggtaatctcactggtcaataagaaaaaattggcagaaggttacttaaaacttctgcaacaactggatagcgacgtcgagaagatgatcgccgaaggagtagcaaccaaagcggacggtctttccgtacgcgtcaaagtcaatgaagcggaaatgacactaactaaagtggaagacggattgagccttgcccgaatgttgttgtgtcaactatgcggtctcgatctgagttcacccatcacgctggcggatgaaaatatggagaatattccattaattccgacagacactcatttcgatctgtccactgcatacgaaaaccgtccggagatacgcagtcttgaactggcgacacaaatctataagcagaaagtcaacgtaacccgcgccgaacatcttccgtctatcgcattgatgggaaactacatggtcaccaacccttccgtcttcaacagttttgagaataaattcaaaggtatgtggaatgtaggtgtcatggtgcagcttcctatatggcattggggagaaggtatctataaaacaaaagctgccaaggccgaagcacgcatcgcccagtatcaacttcaagatgcacgagaaaaaatagagttgcaagtcaatcaagcagcattcaaagtgaatgaagcaggtaagaagttggttatggcttcccaaaatatggaaaaagcagaagaaaacctccgttacgcgacacttggattcagagaaggcgtaattgccaccagcaacgttctcgaagcgcaaaccgcctggctatccgcccaatctgaaaagatcgatgcacaaatagacgtgaaactgactgagatttatctgaagaaatcattaggaactcttcaataagtggagagtaaaaagtggaggatggagagttgggagtaaaactcattatctggtaatttataaatagtaatttagtaattcattataatatggtaactacaaaatcacaaaacagcaatatgctgctggcttttcttactttactcggagttattgcaatcgttgcagtagttggttttttcatgcttcgcaaaggccctgagatcatacaagggcaggcagaggttaccgagtaccgcgtttcaagcaaagttccggggcgtattctggaatttcgcgtgaaagaaggtcaaagcgtaaatgccggtgatacactagctattttagaagcccctgacgtcatggcaaaaatggaacaggcacgtgcagccgaagccgctgcgcaagcacagaatgagaaagcaatcaaaggagcccgcaaggaacaaatccaagctgcttacgagatgtggcaaaaagcacaggcaggtgttactattgccgagaaatcataccaaagaatcaaaaacctgcatgagcaaggagttatgcccgcacaaaagttggatgaggtaaccgcacagcgtgacgctgccatcgcaaccgagaaagccgccaaagctcaatatacaatggctaagaacggagccgaacgtgaggacaaaatggctgcggaggctttggtgaaccgggcaaaaggtgctgttgccgaagtggaatcgtatatcaaggaaacctatcttatagcgcctgccgccggagaggtttctgaaatattcccgaaagtcggtgaattagtgggtacaggagcgccaatcatgaacatagccgaacagaacgatatgtgggtaacatttaatgtgcgcgaagacctcctcaaagatttgactatgggaaccgagtttgaggcaatcgtacccgctctggataataaaacaatcaaactcaaagtatattatctgaaagatctaggaagttatgccgcttggaaagcaactaaaacaaccggacagtttgacttgaaaacatttgaggtgaaagcttcccctatggaaaaagtagaaaacctccgtccgggaatgtcggttgtcattgacaaataagaggtcatgaaagaaagagaaaagaaatatatagctttgtggcaagtcatacaaagggaatgccgacggttggtttcacgtccgctctaccttttctgtatggttatcgctccactattctgctatatcttcttcactacattaatggattcgggacttccgcagaatcttccggccggtgtagtggatatggacgactcatcgacttcccgcaacatcgtgcgcaatctggatgccttctcacagacgggtgtcgtagcgcattacagtaatgtgacggatgctcgaattgctgtacaggaagggaaaatttatggatttttctacatcccgaagggattatccgtagaagcgcaaagccagcgacaacctaagatttctttctacaccaattattcttatctgattgccggctccttgcttttcagagacatgaaaatgatgggggaactcacctccggtgccgccgcacgaaccgctttatacgccaaaggggcaacggaaggccaggcgatgggatttctgcaacctattgtgattgatacgcatcctctgaacaacccgtggctgaactattcggtatatctgtgcaacacattgataccgggagtacttatgttgcttatattcatggttaccgtctattcaatcggtgtggaaatcaaggaccgtaccgcacgtgaatggttacgtatgagcaataactcgatttatattgcattggcaggaaaactactgccccatacggttatcttttttattatgggcatattctataatgtatacctgtatggtttcctacattttccttgcaatagcggtattcttccgatgatattcgcaacactctgtctcgttctcgcctcgcaatgttgcggtgttgtcatgataggaaccttaccgactttgcggcttggactgagtttcgcttccttatggggagttatatcattctccatctccggcttttcatttccggtaatggcgatgcatcctgttttacaagctttgagcaatctgtttccgttgcgtcactacttccttatttatgtagatcaagcgctcaatgggtacagcatggcttattcttggagtaactatatggcattactgatattcatgctgcttccttttctggtagttcaccgcttgaaagaagcacttatttattataaatatattccctaaatgaaagatataaaattaaaagataagatagtacaaggtatcaatgacctgttttatatctggaaacgggagtttcagacaactttccgcgaccaaggggtactgatattctttatactcgttccattgggttatccgctattatacagtttcatttacgataatgaagttgtgcgtgaggtccccgctatcgttgtggatgactcacattcatctctcagccgcgaatacctgcgcaaagtagacgctacgcctgatatccaaattgtttcatactgtgccgatatggaggaagccaaacagatgttgaaaaaccgacttgcgtatggtattatctatataccctctgactttagtgataatatagctaaaggaaaacagacgcaagtcagcatttattgtgatatgagcggattactttattataaatccatgctcatagccaatacagccgtttcactggatatgaatcaggatatcaaaattgcacgtagtagcaatactactgaccgtcaggatgaaatcaccgcttatccgatagagtatgaggaaatttccatattcaatcccactgccggattcgcagcttttctgattcctgccgtactggtgttaatcattcagcaaaccttattgctcggtattggcttggctgccggtactgcccgagaaaacaaccgtttcaaagaccttgttcccatcaaccggcattacaacggtactttacggattgtactcggaaaaggtctgagctacttcttgatttatatattggtagctttttatgtactgtatattgtcccaagaatattcagcctcaaccaaataggacaaccgtactcattagtgttatttgttgtcccctatttagccgcctgtatattctttgcaatgactgcctctatcgctatccgcaaccgggaaacgtgtatgctgatttttgtatttacatctgtccctttattatttatctccggaatttcatggccgggagccgccatacctcccttttggaaatatgtatcttacatcttcccgtctactttcggtatcaatggtttcgtgaaaatcaataatatgggagctactctaagcgaagtagcctttgaatataaagctttatggttacaggcaggcatttacttccttaccacctgttgggtatatcgctggcaaatccttatgagtcgcaaacatgcgatagagagatataaagaactaaaggagaaaactctacattaattcatttttgatataggatatcaagttgtactgacacccgggtgtcagacaagtagttcttgcagataaatgaggcagaatatataactcatcccaataccatataataagaagaaatatatcaaacattataatataaaaatcccccgttccagagagtatagaacgagggattttaaagagatattataaagagagtataatcctaattagaatttataacctacaccgatagagaagttcatgttcttcggagcaccgtcaccgtcaacaagtttggtcagaccaaattctccatctaaactaacaaagaacttattgatctcataagcaacaccaacaccaataccaaaatcaaacctcttcatatccatttgatcttcaccacttccaaaaagatctgcttctttaggaatatctagataatccaaaacatcttctacagaaattccacctaaatcaccctcaatatcagttttccacttacctgcaataccaaaagcaaagtatggaccagctttcaccacgatgttttggttatcagcaatcgcaaaacgagcagctgccaacacaggaatctctaaatacatcggattcaatttcgcagtagcagtaattccctcttcactctcttccattttagttcctttttgagtgaacatcaacgatggttggatagaccacatttctgtgaattgatattccgcacctacgcctacattaaatccaattctcatcttactatctttaaacgcatctcctgtaaaattactcatgttcataccaactttggcattccaagaaagctgagaataagaaacgatagaaacaagtgcaaatagcacaaaaatcaaaccttttttcatatcatttattttttaattcgcctccctctttccctttggtcagcattattaatagttttgtatctctagtgcggggaatttcctgaactttgttagagtatcaagacacaccgtttcatatttaacgtctgttttgtatccgcaaatatatttcatttattttatataaaaaaatcctagaacaactattttttgcataaatgttattaaagtgtgactatttaggcaaaaatagtgtttatcctatcatttttcgtgcttaataattttgtcgaaataatgtcattgaaacattcttgcaacaaacacacatattttattataaaccaacaggtagtcacaagaatattcttatatttgttcgttgtattaagaaacattatatagatatgagaagtttcgcatggattatcggtttgctactttgcaccgtttacggtgtacaagcccaagacagagtgattgaacgtcctccttttctagcctggagttccaatagcattgagattgataaaattgttatgggagatacagttaccaccctatacatcaaagcttattatcgccctaaatattggataaaaattgcgacaggcagttttctaagagacaataacggaatgctttaccctatccgcaagggagttggaatcacattggacaaagaattctggatgccggaatcaggagaagccgaattccaattattgtttcctcccattcctcaaaatgtaactagtcttgatttctcggaaggagattttgacggagcgtacaagatatggggaatacaactagatagaaacgcattttacaagcaaaaacttcctaaagaagcggtcaagcacaaaataaacaaaaaagcggcattacccacccctaagttagcttatgctaccgctactttgaaagggaaaatcctcgattatcagaaagatatgatgaaacagatgcggatgcatatagaaagtcccgcatcgaatatccacaacgaacagaatattataaaaatcgaggaggatggcagttttcaagcagaagtaaaagtaacgtccgtcacaagcgttgcattggagctgcctttcggctgggtggaatgcctgatagcccccaatgaagaaacatctctcattatcaacacaaaagaactttgccgtaggcagacacatctgcaaaagaaggataaaacattcggagaacctgtatacttcaacggatatctggccagcttgcaacaagaactggcttcagtagatattgatatcacattaaaaagtgttttttacatggatatgtacaacgccattgcagggaaaagcgcagatgaatataaagcctacgtattggaacgtcttccatccatccggaaagcgatagaacaatcttcctatagcaatgcatgcaaagaactattaaacatacaggtagatctggcagcaaccggaaaaatcgcgatgacagacagagagctaaaatctgcttatattgctgtaaataagttgaatagagaaaaagcaaacgaatatttttccaatacgcatattgatattcccgaaggatactatgacatattaaaggaatttacttccatcaataccctcaaagcgttatacagcaggcagtatgcatcaacaatctatctgatcagttttatgccgaactatcggaaaatacttaaagaaacgttaggaacgaatcaagggccattatttgattatataagattcaacgaactgtaccattctatcaaagatttcattccattgacagcagatcaggagatagaaataaagaagttgtcttctccggcgtataccgaaatgcttactcaaacgaacaaagaaacaataaagaaaatagaattgaacaaaaggaagagtggatttactatcaatgaagcgggagaagtctccaatgaagatttgttcccatccatcctttccaagtttcgcggacacactttactggttgatatttgggcaacctggtgcggtccttgccgaatggccaataaagcaatcgccccgatgaaagaggaattgaaagagaaagacattatctacctttacatcacaggcgaaacgtctcccaaaggaacatgggaaaatatgatttccgatattcacggtgagcatttccgcgtaaccaacgaacaatggaattttctgatgtccaaccttaacatagagggagtccctacctattttatcattgattctgagggcaatatcacttataagaagacaggatttccgggagtggaaacgatgaaaaagcagttactgaaaactttgagtaaatagttccgaatatggtatgaaaggggttttgaagtatccagaagaggattgtcataatgaataaacgaaacgcagattaacgcaaatatcgtagaagcaattttacaagttattgataaatatataattgaaataccctacgataatttgcgttaatctgcgttttattattcattacgatacagttcttttacaaactcttatttatgcatctctacaatcttggtaggagccatttccacattccgacgatctacctgacggacaacactagctgccaaggaaaggaacgcacgtccggtcacggaatcttcatccaatgcgacaggagtaccattatctcctccttcacagatgctttgcacgataggaatctgtcccagcaaaggaacattcatctcttcagccagcttctttgcgccttcttttccgaagatatagtatttattttcgggaagttcggcaggagtaaaccaagccatattttcaaccaaaccaaggataggtacatttaccttatcattggtaaacatattgattcccttacgggcatctgccaaagccactgcctgcggagtgctgacaacaatcgctcctgtcatagccaatgtctgaacaacggtcagatgaatatcactggttccgggaggaaggtctatcaggaaataatccaaatctccccaagccgcatcacctatcaactgttttaacgcattgcttgccatcccgccacgccataaagtagcttgatccggatcaacaaagaaaccgatagacaataatttcactccatatttctctaccggaataatcagatcacgaccgtctatacgctcggcatacgggcgcgcatcttccacctggaacattttcggcatggaaggaccgaaaatatccgcatcgagcaaacctaccttataacccaatttcgccaaagcaactgccagatttgctgacacggtggacttgcctactccacctttaccggaagagataccaataatattctttacctgaggaagcatcttgcccacctccggacggggagcttgcttactttctgtcgcaatcgtcacctgcacatccggagacacataggtatgaatagccgtctcggcagctttcaccattgatttcataaacggatcggtcggtttctcaaagatcaatgaaaaactgacagacataccgtcaatacggagattatcggcaaccatctccgcttctaccaaattctttcccgtaccgggatagcgcaccgttgccaatgcatccaatattaatttaggataaagagtcatgtcaattaaaaattaaatattaaaaattaaagagggagatgcgcaggctccttgagtgataggaggagatgcgtaggtccgatccatatttatgcagttctatttacttgtatttagtccgctacgcttgctgcggttataactgcgataagaatcaagttctatttccacatccggctcttgcaacttcccttcctgtggaagacggaatttgatatacttgatgtttaaaccacgatcgagccattgttgttcataataggtcttgataccgagaatatcatccaccaattccgagtgatataaatcttcggtcataaaatctactggaagccggttcgcctctatcatgtattttgtataagtgaacatgaaattgctgtccgtcttcaggtggataatgccgtccggtcgcaagaacttgcggtatctttccataaagtaagtggaagtcagccgtttcgtcgctttcttcatctgcggatcagagaaagtaagccatatttcgctcacctcaccctcagcaaagaagcgttcgataatctcaatattggtacgcaggaaagccacattcttcattcccgcctgcaatgactccgtagctccggtccacatacgggctcctttgatatcgaccgctataaaattcttctcgggaaacatctttcccaaaccgaccgtgtactcaccacgtccgcagcctagttcgagtacaataggatgatcgtttttgaaaaactcctcatgccattttcccttcatatcgaaaggcacgttatctatcgccgaataaggatactcgaagacgtgcggataacttgccatatcggcaaacttttctaatttgttcttacccatatcaatcctgattaggctgcaaaggtactgattttgacgtaatcggcaaaaagaaaaaagaagaggattattttcaccacagattacacggattaacacagattatttcttctttttaatctgtgttaatccgtgtaatctgtggtgaaatctgtattattctacgattgtcacccatccgtgtgtatccggttcgtcaccatattggataccacgcaacttattgtacagcttcgtacaaatcggtcccggctttccgtctttagaaataacgtatgattttccattctccaaatcatcgatacgctgaatcgggctgattactgccgcagttccgcaagcaccggcttcttcaaaagtctccagttcttcttccggtatcgggcggcgttcaaccttgatacccatatcttccgccaactgcattaagctcttgttcgtgatagacgggaggatggaagttgacttcggagtgatataagtgttatttttgataccgaagaagttggcagctccacactcatcgatatacttcttttcttttgcgtcgagatagaattcgcaggaataacccaagtcatgcgcttttttgttggcacgaagactggcggcatagttaccacccactttatagataccagttccgtgaggagcggcacggtcatattcgcgaatgataacgtacggattggtagagaaaccacccttgaagtacggacctaccggagtcacaaatacgacaaacatatattcatttgccggatgcacccccacttgagcacttgttccgatcagcaacggacgaatgtaaagagaagcacctgtctcgtatggaggaatgaaacgttcgttcagtttcaccactttcagaatagcttccttgaaacgttcagttggaagttcagccatcaggattccctgacaagtagattgcagacgggctgcattctcttccaaacggaaaatacgcactttaccgtcttttccacgaaaagctttcaagccttcaaacgcttcctgaccataatgcaagcacgtagctgccatgtgcagattcagatgttcgtcactgctcacttccagttctccccatgctccattgcggaaattaattctcacattgtagtctgtcttcatgtagccaaacgacagattcgcccagtctatttctttcatattgtaacgtattagtttatttttcttatgtattgattcgcaaaaatagcttttattcttcagattgccgcttttcttgcaataatttttcgacttccttatctgctttcgtcagtttttcggtgcagaaagctattatttcattggcttctttgattttctcacccaagatgtcaatatccaattcattattgtctatctggcgaacaatcttctcgagacgttccattgcttgaagataggtttctttttttgctgccacgatcgttatatttattaagagttaatgagatttgtttcttttatcagttccgataagacggctttgctctaccacagattgcgcctccccttttgagaaccgggtgaacaatctgtctcccgacttcaatgaggatgcgtccgttaccgccttcccatctttcagcgtgatgctgtatccacgacttaacaatttatcaggagaagcatcggcaatgcgttgttgcaaaagttccaatcggtgacgctggcgggacaataacgccattgtggcttgcgacagatcctttcgggctgtcagcaaggcaaaacgcgtctctgtcagtttccgctgtacaaggttcgggatacgagcctgcagtgtatccaatcttctccgctcccgctccaacagcatatatgctccttgccgaatgcgaacagacaaatcctccagacggtccgccacttccgcaacccgatgaatcaaaagttccgccgcagccgtaggagttttcactcgggtatgagctaccgaatcaagcactgtatcgtctcgttcatgaccaattccggtaatgataggaagcgggaactgcgcacatgcagcagctaataggtaagtatcgaaaccggacaaatcggaagtagcccctccgccacgaatgatgaccaccacatcaaaatcatcaatacgggcattgacgcggtctaatgcagccaacacagattcttccacctgattcccctgcatcaatgcaggaaacagttctgtgtaaaagaagaaccctccgggattgtgctgcaactgatgacaaaaatcaccgtatccggctgcagtagcggaagagatgaccgcaatacgttgaggaagctgaggcatttccaattccttattcaaggtcagtacaccttcttcctccaactgcaacagtatttcccgacgatgacgggccatatctcccaatgtataggcaggatcaatatcgagcacggtcagactgtaaccgtaaagttcgtgaaactggacggtcactttcaccagcactttaatgccggatgtaaacggttgcccggtcgtttcctcgaaatagggtttcagcaaacgataaatggtattccaaatcataccgcgtgctttagcaataagactattgttgcgaggatctttctgcacaaattccagatagcaatgacctgtcgtattggaacggacatcgctcagctcagcctgtatccaatattcatcaggcaggcattgctccagactacggcggacaagcgcattcagctccaaaagagaaagtctttctccaccctcccccgaagagaagggggctgaccgtttcaactgattcatagtgtttatcatacagcagccatcttatttcttttccttagaggaggagtctagataagccttccataagtcgggtatgccatagccataaatattgtcggggaaaccggctctgtcacccgaacggcgaacaagttcgattatctcttttgccgtcagcttcggacaagcctgccacagacaagccaccatcccacacataatcggagaagagaaagacgtaccgttggcacggctaagattgccattcgttcccatcacatccgatcccagaccgacagccaccacatcaggtttcacccgtccgtccgccgtatttcctacggaagaaaacggagccaactcacctcttttattaatggcgcctacagtgatcacattttccgcatctcccggaggggtaatcttcttccacgaacccgcaccggagtttccggcactgcaaacaacgaccattcctttatcggccgcatgggaagcctcacgtgacatcaacgcataatgtccgttcagatcacggtacctataattctttgtcggatcatcaaaggaataatatccgagtgatgtattcaccaaatccacacctacactatcggcaaactcaatagctgccgcccaatagtcctgttctactaagttctccgaatactcatcctcactgcgcaataaccaataagaagcttcgggagccgtaccgatcatgacattcggctgattcatcgccatacaggaaaggacagacataccgtgactgctttccgcataaatatccgcctccgggtttacaaagtcacgcacaccccgaatatcgatattcttcatcgcttcaatcttatctacattatggaatcccgcatcaataaccgcaatcatcattccttttcccttgaaacccgcatcatgaaggaggttcgccttgctcatctcaacctgggtgcacgcaggaccgtaaaggctgtctgtacgcagcggcttattaatcagcgaatctcttcgggtagctttttccatattacctttccatactctttctgcagaacgcacaaaaggcaaccgggcaatctcatctatcaatacactgtcattacaagagacagtaacgaaattctcccattttccggtcacaagtatgtgaactcctttccgacggatagcgtctacatatttcttacataccggcaaatcggtggaatcaatcttcaacccctgtttctttctccgttcaatagactttttggataagtacttttccggcttttgcaaagaataatcggtagcagccttgtctttcagattgatacgatacttcaaggtatctccgggagtaaattgggcgaatccacccaagcacacagttaaagtaagaatcaatagtataaacttcttcatcagttatctttattttatcaattaaaatccttcgttttccagaatcaccagacctattccacgctgtgaagcaatgaaagctcctcccaacactcgctttccatcataaaaaacagccgattgtccgggagctatagccgaagccgtttcaagaaaacggacaagcaaacgcccgtcttcaagacgtctcacccgacaggccaacggacgactgcgatagcgaatccgtactgtcaggttctcacactgaaacagttcttgctcgtccacaatcttatcctgctccgccaacatataatccgtcttcaactgctccgcatcgccaagcattaccgtattcttctgaggattgattttcaatacataagcaggctttccaagcgcgatttccagtcctttcctctgacctatagtataataaggcgcccctttgtgctgccccaactttacaccttcggagttgacaaaccatcccggcccgatctcgctatccaattccggacactgttcgcggagaaagtcgcggtaatctcctttaatgaaacatacttccatgctctccccctccttcgatttagcctcatagcctttctcagccaggtattcacgcacctttattttcgtataagcccccaacggaaagatacaacgccgcagcacatcctgtcccaacctccaaagaaaataagactggtcttttttatcatcgtctccagctatgatataaatatgcccgtttttctcttccaaccgtgaataatgtccggtagcaatccaatcacaatccaacttatccgcccattccgtcaacacacggaacttaaacaacggattgcacatcacacaaggattcggtgtacgtccctgcttatattcgtctatgaagttttttacaatagtctctttaaaaggtatacgttcatccgccacataatgttcaatacccatcctggcagccaactctctggcatcctgcggctcatctccccacacacgcatagtgactcccactatttcgtatccttgttcttgcagcataagacaggtagcggtactgtctataccgccactcatacccaccagcactctcttatttcgttctttcatctgatctttgaaaagttacatggatacaaatgtacgagatttcaaagagaattcttgcttttccggaagaaaatccttatatttgagatatacaaaagcaagaacaattatggctaacccaagattaccgggcatttccgaaaatgagcaagccttattgtatgccaaactgaatgaatacaaccgaggcagggcctctttcaaagaggcgggagtttacttggtggtattaccccgaccaggtaaacccaactattcgttatggctttattctcctctaccggaaaaacaatccatcctttacatacatgatttgtcaccggacatcaacgaatccctccgcatggcaagtactatgttctattattcaaggcgatgcctgattcttgtagattacaacgaaaagagaatgcaaagcaatggcgacgaccttatctttttcgggaagtatcggggacatttcctacatgagatattgaaagtggatccggcttatttgagttggatagcctataagtttacaccgagaatccccaaacaggaacgtttcgtcaagatagcgcaagcttatcactccgtacatttagacctcatgcaaaggaagtcgaaagagaaacattcagtaagccggtatttgggtgaactaggggaaaaactcacggacctcagattaaaagtcatacgggtgcgattggaagatgatccgtataagacaagaataaatggtactgtaccacaattttttgtaaagcaggtactgacattggccgatgcaagcggcaacctggttatcatgagtataccgtcaaaaaatcccagtgcggtttcatgcacactatccgggatagaacatgaataccgaccgggagaaatcatttatgtcgcatctgcgcgggtgtcacgccgatacgaaagttacggatcaaagtatacccgtatcagtcacgtcaaacttgttatgaccacgacagtttaatccttttctatcagtactgtggcataagccgagataccttcttcccgaccagtaaatccgagtttctcggtagtggtcgctttaatggaaatatcatcaacatcgatacccatcacgtttgccattgtctcctgcatcaaaggaatatgcgctttcagcttcgggcgttcggcgcagatagtcgcgtcaatattaccgaccttatatcccttggaagcaatcagttctacggtctttttcagaaggattttgctgtcgatattcttaaattctcccgctgtatccggaaagtgataaccgatgtcacgcatattcgcagctcccagcaatgcatcacagacggcgtgcaatagcacatcagcgtccgaatgccccagcaatccttttgtgtgttccagaagaacgcctccaagccacagctcacgtccttcaaccaattggtgcacatcgaaaccaaagcctactcttatcctcataatttaccttcctccatcagcggacatagaagtccaatagtttttccccttccagatatccttgcaaatgttgtccgatactgaccggacctacaccggcaggtgtacctgtaaatagcaaatcacctattttcagtgtcacaaattgactgacatacgctatgatgtcatccactttgaaaagcatatccgccgtacaccctttttgcacttctttaccgtcaatcaacagattgaagttcaaatgccggatatccttgtaacggtctaccggaacaaaatctccgatagccgccgaagaatcgaagcctttgcaaagttcccaaggatttccctgttcacggaattttcgctgaagatcacgggcagtaaaatcgatacccacagtcacggcgtcataatagcggttagcaaaacgaggagcgatgttcttccccaaacggttgatacggactaccaattccgtctcataatgtatctcgttagaaaagtcaggaatgaaaaacggcttgccgtcctttaaaatggcagagtccggcttcataaaaacgaccggttccgtatttacctgtatatgtcccagctcctgattatgctgagcgtagttcattcctactgcgataatcttcattatttctcgttaaaattcaatcggttaaacataacggccagatgcgcataaagagaagtgttctgtacgacaatattttccggcacgcgaatacggaaaggagtaaagttccacactgcttttattcctccgtctaccatcttatttgtaatttcctgagcgatattaataggtactgtcagcacaccgatattcacatcatattccttcatctttgcttcaaagtcatcagaatggaaaattggaattccacctaagtccttccctaccaattccggattgacatcaaaagccgccacgatttccagaccgaaatgacgcaaacccaagtcacggagtaacgcacctcccaaactacctacaccaaataaaaaggctttgtgcatattagtaaatccaagaaagctttccaaaacctcaatcagtgcatcaatattatagcccactctcgtacgtcccgatatgttcacatacgacaagtctttggcgatttgagaagcgtcaatatttatttccttagagatttgtgtcgaggagacatattgctctcctttttctttcattagttttatattggacagataccagggaagtctgcgcaaggtaggctccggcactttatccgcctcttttcgtatataagtgctcatacttcttacaaaatttggtattttgcaaaagtacattattttttgagactgacaaccctataacagaaaaccttaatagagattaaacaaaacaaggaaaacaggctcaaattttgcccttttccataagtttgatacttttgagaagaaataaatatgacgagtatgaaaaagaatgattggaaagatcgattgaacgttgtgtattctactaatcccgacttcggctatgagatggacaataatgaagaacagtccacccttgacaaagacaaacaaaacctccgggtttccattgataagaagaatcgcggcggaaaagtggtaacattaattaccggattcgtgggtacggaaaacgacttgaaagaattaggcaagctgcttaaaagcaaatgtggagtaggcggttcggccaaagacggagagataatgatacagggagacttcaagatcaaaattatagaactgctcatcaaggaaggctataccagaaccaaagggacaggcggttaatccattcaataaaaaaaggggagctttgacacctcccctccatatcttatttccgaagaaaattattcagctttcaaagtgaaacgtttgaagtcaacaatcttcaattcaggatcagcagcagtcaatacttctcttacagtcttcttaccgtccatgatatcttcctgattcagcaagcaaacttctttcaagaacttagccaaacgacccttagcgatattctgaatcatctgttcaggcaagtgtgcagctttctcagcagaaacagtagtgatgatttcttttgctttcgctacatcttcagctgtaatccagcccttagccatgttgctttccatgtgctcttcgctgtctacgtgagccgggttgatattagctttcttcaaagcagcctcaacagctttctgtacctgttcagcttttgttttctcaatagcaacttcgatttctttctgtttgatttcttcagaaacaccgtcctcatcaatagcaatcgggttcatagcagcaatctgcatagctacctgcttagccagttgctcgtcaacaggcttgttgaaagcaacaatcgtgcaaaggccatttctgttcatgtggttgtaaacagcagtgcttacaccttctacagtcatgtagccatccaattccattttctcacctgtgataccgctacggtcagtcaccgcatcctgtacagtaccgttacccataggcaatgcctttacttcgtccaaagtcttgcatttgttagccacagcaagatcaagaatatcctgagtcaacttcacgaaatcagcgttctgagccacaaagtcagtttcacacttcaaagcaacgataacagcacggtcaccggtagtcttagcaagaacacaaccttcagaagcctcacgttccgaacgcttagcagcaacagcttgtcctttcttacggataatctccattgccttgtcgaaatcgccctcagcttcagtcaacgcgtttttgcaatccatcataccagctccggtcattttacgcagcttggtaatatcagccatacttacagccataataatttcctttatttaaatgaataataatttcctaaacaaaaaatgtgccaatctgccaatcaagatacaagtgtataagcatactcttgcacgttagcaaattggcacatttatatattaagcctcttcgtcttccttgatgaaagcagcagctttagctgcgttgatagcttcttcgtcagacttgtcgagtctagctttcactgatttcttcttgcctttgttggcaggagcttcaccagcagcttccatatcgatcttttcagcttttctttcttccaaaccttcgatcattgcagcgcagcaagcatccaagataacttctacagatttagtagcgtcatcgttagcaggaattacgaagtcgatgtttgtaggatcagagttagtatcaacgataccgaacacagggatacccaaacggttagcttcgcgaactgcgatgttttctttcatcacgtcaataacgaacaaagcagatggcagacgagtcaggtcagcgatagagcccaaagtcttgtccaattttgcacgttgacgagagatctgaaggatttctctcttagaaaggttagcataagtaccatcgttagtcaatttatcgatagtagccattttcttcacagccttacggatagtcgggaagttggtcaacataccacccggccagcgttcgattacataaggcatattaacagattgagctttctcagctacaacttgtttcgcttgttttttagtagcaacaaaaagaactttcttgccggatttggcaatctgtttcaaagcttcagcagcttcgtctacttttgcaactgttttgtggaggtcaatgatgtgaataccattgcgttccatgaaaatataaggagccattgcaggattccactttctcttaaggtgtccgaagtggcaaccagcttccaataatgtatcaaaatttgttcttgacatcttgtttttctttaaatcgtttactttcttttttgttttttctaaaccaaccgccgggtagtccgcaagcagagtcccagtagtttagatactaaacatattcctctgtcaggcaacccattaacgcttgctgaactggaatcttctacgagctttcggctgtcccggtttcttacgttcaacagaacgcgggtcgcgagtcatgaagccttcagcacgaagagcagctttgtcttcagcgttgattttcaccagtgcacgggcgattgccagacgcaaagcctgagactgacctgtgaaaccaccaccacacaagttaaccttgatgtcatacttctcagcagcaccaatcttgttcaatggttgttttacaacatactgaagaatagttgatggaaagtactctgcaaggtctctcttgttaatagtaatctttcctgtaccttcgcttacgaatatgcgtgcgatagcacgtttacgtctgcctaatgcatttactacttccattatatcttatttatatgaattaatatcaatcatgttcgggctttgagcttcgtgcttgtgttcgctaccagcgtaaacatacaagttgttcagcaatttagctcccagaatgttcttaggaagcatccccttcactacttttttcagtaatctctcttcaccgttcggtttagcgatcaaacgagcaggagtcatttctctctgaccaccgggataaccagtatatgacaaatacactctgtcattccatttgttaccagtcagttttactttgtctgcattgatgatgataacgttatcaccgcagtctacgtgaggagtaaagttcggtttgtactttcctctcagcaattttgcaacttttgctcccagacgacctaaagtctggtctgtagcgtcaacaataacccattctttggttacggttgccttgtttgcagaaatggtcttgtaacttaaagtatccactcttaaatttgttttttaaatgttactactaaaatttcttcaccacttattagtcctccccggacaaaggacgactaactcgctatgaattaatctcttatcattttgtgataataatcggcttgcaaaagtacggcttttctttgaattggcaaacaaattcttcctttttttggatttattcggttgaatgacaaggagtagataattaaggtatacaaaagtacggcaccggggaaggcatggttcgccaccgaggaacacaggttggaaaatataaagcccgttgacccactattatattcccaattgatccatcaaaaaaacattggatttatgaaaagaaaaatgcattttaacccgggtcagttttagttataattatctaccacagatgttacttctttttggcatttatttttcttacagaatctccagtaagttcaatcttgtgtgcagagtgtacaattctgtccagtattgcgtcagctagggtaggatcaccaattgcatcatacctgctttcgacaggaagttgtgatgttattatgattgattttagtccgtgcctgtcttctattatttccataaggatcgacctttcctttgcgtccaacccaataagaaacagatcgtcaagaatcaacagtaggtacttttcatttttttcatctcagattctattgtacccttatttggggccattttaagatgtaccatgagctttgatgcattggaatacaacgtcttgactccattttgacacgcttcatatcctatggctgaagccaggtagcttttaccagttccagagctgcctgttataaaaatattctgtccatctcttataaaaccaagagaagcaagtctttcgagctggtttaggtctagattacgtttgattgtacagtctattttctccatatatgctttatatctgaagtttgcagactttatcagtcgttcaatgcttatattgcacctgtaatcattctcgctttccagaagccatttaagaaactcatcatttgtcataccatctgaagatgtagtcctgcaatcgtttctgtatgtttcaagcataccgtaaaaacgtagcttggagagtagttccattattctgtccatattttttcgacagttctatttgtcttattattacttgtcattttcatcactgtttttagagttaaaataatccttacctctgagatttttatgtttaggagtaagctcagggacctgtctctccatttagacatgatacttttcatcttcccggtttatcagaatgctttcaatttcgttgtatccaaacattttggattccattgctatctggcatgcaagaaccaatctgtcgcgcccaaaacgttccacaagacttaatatgacatcgaatgaacgtacggattgaatcggatattttttggcaacgtccactagttttatgtactcttccactaccgaatcgatttcacctgccttacggtatatatcatccattctacttctatattcatgtagtactcccggaagtttgtgggactctttttctgaataagtaaaaggtgtatcatccctgcgatgtgtcgttatatgtctgaatttatgatatatttccactatgtccccatcatacagcaattctacagtatcgccgatatactctttggggacactgtaatagtgactgttaagcgagacataacagtttctcatgacagtcgccgttttccggtttttgatataaaccttgtagcgggcaaagtgtgcagcctgtctttctcgacttcgaggaagcgctccctgcggctgtgactgcggttgtacatctttcggctgttcaacgcatctgtatgttttacagtctctatgttcaaggcttcaagatcattgaacttcaatcccatcatctttgaatagacctccctatagagaaatcttacagcattctcaaccaaggccttgtcttttggtttacgtaccattgccggaaagacaacacaaccgtaatggtctgcaaatgcagcaaagtcatcattgactacaggctcaatccctccgggctttattacgacagacttgagattgtcgggaactataaagatattctttcttctgcgatggtacagcctcataataagtaatctggccgcacggaagtatggcagcaaaaacttctacgggaaccttatcacctgtcttttcgtctgaaagataaagtttgtcaccggcaaaatccacatacatctgatcaccggctatatgatctatgcgcacaacgggcacttttacttctatttcacgtctgagatataggcaaaaagaataatagctgtaaccttgaggacgatttttcagatactcctcatacaaggaccttcttgttgttccacgagatttaagtcgtttaatgtactcaggtatatgttcttcaagatacttatactctgcagatctggatgatgcattatcaatatctacaccgaaaagttcatgcagatgctgttcgtccattttaacaggcgctccagttctatacccatatcttaatatatacggatataccgtttgactgtattgcgtgaaatcagaagagaagaactgatacttcggatactcattcctgactgatagcaacgaagaatgtgcttgattcttattttcatacttaaaaaatatttggtaaattataccgggttaaaatgctttttaatgtacaaaaacaagagtaaaataagatgtctctataggggcaaattctattataatctcaatggagcaatttagattataaaggtggggcaacagacttttataatagtggggcaacgggatttatattttccacctatatataaaaattgcgtacatatatcctttcacggataatgtacgcagttcactttatcggaatgtattttatttatataaatagaacatacggtccatcagttgccatttctccgctgaagtcgctgttgcatccgcctgctggaatatagacatataggcttcccattcagcctgacgaggcagggtggcgagacgcgccatcgcagtctcccaatcaaaatcaagcggtgtctcgactatcatgaacagacgggtccccaatatataaatctccatttccagaatacccacttcacggattccagcccggatctccggccacgcctctgcttcactatgacgctttacatattccgctatcaattcggggttgtctttcaaatccattgtctggcagtaccttttcaccggaactttatattcctgtactacataaccattttctttcattttctagtgttccttaattcaattatattttaattagttggatatatgttctttttatagctaaacagactagactatctcacgatgtcttccgggaacttggtcggcattcccagtctcttccaagtttcataataccaggcattgagttcgtttccattcaaatcgttcttgataaagtatttcagatgcaagtaatctttatccttgatttcgaattgcagaatattatcctgattgtccaacatcggaagatggatattcttctcgatactctctttataagaatcatccgtcagttgcttccatgttccatatcccgtgatgatagcatcggaaccgggaataatcgtgaagttcacaattcgtccgtcatcactcagaaccttgaacgtattactaggctttaaagatcccggaacatcaggagattcggacacatagtggcaaagctgccaaatgcctttcagatcggccaactggaattttgttttcttctgggccatcgcacctgttaccgccaacaacattattgaaagcatggtaaagaaatagagctttttcatgatagtattattttagttaacactctcgaatgcgtatgtccaaatataaagatttattttgagaaaagaaacagaaagctcataaaaaactcgcataaccagaagattatgcgagttttacataaatataccgaaatattagaattcagcatttcgcggtgtacgcgggaacggtatcacgtcacggatgttggacatacccgttacaaagagcaacaggcgttcaaaacccagtccgaaaccggaatgaggacaggtaccgaacttacgcgtatccagataccaccacatatccttcatcggaatgtgaagttcttcgatacgggtcatcaacttgttgtagtccgattcacgttcagaaccaccgataatttcaccgatcttcgggaaaagaacatccatcgcacgtaccgtcttgccatcctcgttctgcttcatatagaaggctttgatttccttcggatagtcagtcaggatgaccggacgtttgaagtgctcttccaccaagtagcgttcgtgctcggaagccaagtccaccccccagtaaacggggaactcgaacttatgacctttcgctacggcatcttccagaatcttgatgccgtctgtatagggcagacgaacaaaatcatctttcaatacaccttgcagacgctcaatcaagcccttgtcgaacatatcgttcaggaacttcacatcatccgcacagttatccaacgcccatctcacacagtatttgatgaactcttcagccaagtccatattatctgtaatgtcgttgaaagcaacttccggttcaatcatccagaactctgccaagtgacggggagtattggagttttcggcacggaacgtaggaccgaatgtgtaaatagatcccaaagccgtagcagccaactcaccttccaactgaccggagactgtcagacttgcctgtttgccaaagaaatcgtcatcataaatgatagagccttcttcgtttttcttcaagtcatacaagttcatggtggtcacctggaacatctgtccggcaccttcgcagtcggaagccgtaatgatcggtgtatggaaatagaagaatcctttttcatggaagaacttatggatagcgatcgccatattgtggcggatgcggaacacagcaccaaatgtattggtacgcggacgcaaatgagctatctcacgcaagaattccatggaatgacctttcttctgcaatggatatgtattgtcgcaagtacccagcacttcgatttcacgagcctgcacttccaccttctggccggaacctactgattctaccatttccccgttcacgctgatacaagcgccggtggtgatctgcttcaacatctcttcgtcgaaatcagccaagtctactacgacctgcaaattatttattgtagaaccgtcattcagtgcgataaagtttacttgtttgctacctctgcgggtgcgaacccatcctttcacattgaccatagcgccaatatccgtgcgcttcaacagatcaacaatttttgttctaccaatcttttccatttaacttattcttttattaacgttcttattcaaacgaacccatacggaggtagtttacttctgcttccgtcaggtaacgccagtctccgcgtcgcagaccttttttagtcagcccggcgaagaatacacggtcgagtttcactactttataacccagtgattcgaaaatacggcgaacgatacggttcttgccggagtggatttcgatacctacctggtcttttttaaagtcatctgtatagctgatagcgtctgcatgaatctcgccgtcttccaactggataccggctgcaatctgatccatatccgctttcgtcagattcttgtccagatgaacatgataaatcttcttcttcaggaatttcgggtgtgtcagcttggaagccagatcaccgtcattcgtcagtaacagtaccccggtggtgttacggtcaagacgtcctaccggatagatacgttcattgcaagcgccttttaccaaatccattactgtacggcgttcctgcggatcatccgatgtagtaaccgtatctttcggcttattcaacaacacgtatactttgcgttcaatgctaaccggttcttcgtggaacttaaccacatccgagcgtttgatctttgtgcccaattcagttactacctcaccgtttacagaaaccacacccgccgtaataaattcatcagcctcacggcgtgaacaaacaccggcatttgccaggaacttattcagacgaatcggttcgttcgggtccacaaactgttccttgtactcaatctgtttcttcacgctgtacttagcattcggatcataatcagcggtacgcggacgaggacggtatcctccttgacggtcgttgttgaatctcggacggtaacctccgccattgttgctgcgatagccgccaccttcaccgttgttgaaacggggacgatagggacggtcaccaccttcacggttgtaaggacgctgaggacggtcgccaccttcaccgttattgaaacggggacgatacggacgatcaccaccttcacgattgtaaggacgctgtggacggtcgccaccttcaccgttattgaaacgaggacggtaaggacggtcaccaccttcgctattgaaacggggacgttgaggacggtcaccgtatgaacctccttcactattgaaacggggacgttgaggacgatcaccgtatgaacctccttcgctattgaagcggggacgttgagaacggtcaccgtaagaacctccttcgctattgaagcgaggacgttgaggacggtcaccgtatgaacgctgcggacggtcgcctccttcattgttggcattaaatctcgggcgatacggacgattccctccttcacgattgtaagaaggacgatacggacgttctccaccttctctgttgtaagacctgttaccatcacggccggcacctgcattctcttcattgaaagaattttcgcgccattcttcgttttctgtgctcatttttttattcgaataaaattagactttggcctcacggcctatttaaaaacacgtttattatattagtaaacaattaaagccccgtataagtatggggagtgattgctcttaactcttttttaatatcttcgcttacattcaattcttcgataaactctttaatagaactttctgtaatagcctggttggtccgggtcaaagctttcaaagcttcatacggatgcggataagcctcacggcgcagaattgtctgaatagcttctgccactacactccaacagttatccaagtcacgatagatagccggctcgttcagcaacagtttgcgcaatcccttcaaagaactctggatggcaatcacgatgtggccgaaaggcacacccacattacgcagcaccgttgaatctgtcaagtcacgctgcaaacgggaaacagggagtttcacggccaaatgttccagaatggaagtcgcaatacccagattaccctccgcattttcgaagtcaatcgggttgaccttatgcggcatagcgctcgaaccaacttctccggctttgatcttctgcttgaagtactccatagagatatactgccagaagtcacggttcatatccaccataatggtattgatacgcttcattgcatcaaaaacagcagaaaggttatcatagttcgaaatctgcgttgtatactcttcacgctccaaccccaacttctctgcaacaaatctgttaccgaattgtttccaatcgtactggggatatgcaacatgatgtgcattgtaatttccggtagcgccaccgaacttggcagtaatcgggctggctttcaatgttgccaactgacgttccagacggtaaacgaacaccatcacttctttacccaagcgggtgggagaagccggttgaccgtgagttttggcaagcatagggatatttgcccagtccgttgcgtatgttttcaattgtgcaatcagttcttcaatcaacggatagtagacctgttccaatgcttctttgatagaaaggggaacagacgtattgttgatatcctgagaagtcagtccgaagtggatgaattccttatagtcatccatcccgcccatcttgtcaaattcttctttcaggaagtattctactgctttcacgtcgtggttagtcacactctcgatatctttaatgcgctgtgcatccgcttctgagaagttacggtagatattccgtaaagtttcaaacacgctgctatcgattccttttaattgcggcaagggaagttcgcacaaggtgataaagtattccacctctacctgtacacggtatttgatcagtgcaaattcagagaaataagctgccaaagctttcgttttgcctctatatcgaccatcaatcggggatatggccgttaatacatcaagttccatacgttttcttagataattatcagaacgcaaaattaactctttttcctgagttataaggcaaaaggataaagaaagtttgtataaaagcggtaagaaataaaaaaaagtctcacgaatttcttcgcaagacttctgttttgtgtgggcgttgacggattcgaaccgccgaccctctgcttgtaaggcagatgctctgcttcggcttcgaaggctaacgccttcaaagctaccagccagctaaacgcccttttcgcagtttttatacgatagtcttacgacctctttttgccactggtttacatattggtttacaccgccatgcaatcaagatagattaatactaaaatttatcgttaattactatatgcaaagataactctatttctccgtgtttgcacatagaaatcaataaaaaaacagcaaatgaatttcttcaaatgctgttttccaataaaacaacaggttatttactactgcttaacaaaataatcttcacgagtagatgaaccttctgtatatgaaatgataagagcaaattcgctaagtgatttaacagtgcaatatacggtatcatcatcaatgtagataagcgttaaggtattccctttttcatcgtaagaatacttgccctcttctactttttcattttccactaaattatagaatgtaccattagctgaaaaaacaagccctaatccgctgtcaaatccattttgtccaggaatatatgtatgaccgttgcttatggatttggtcattttccaagtacccaccaatggagaattactttcattttcatcatcatcattgctacaagaagtaaaacctgcacataaagcaataaccaataaagtcgcaaaaaatctaaatgttttcatattctgtaaataatcttttcgttaataattttatttgtagtataaactgctcaaaaaatgagttggctacttaaaagatagtagcaaaagttgtttcttaatgtctgattcgtagttatatatcgttttatctaccctgttccctttggatagtattacacaatgagaaaagcgtgggaactatcgaatattatcatcatgaggctctggactgcccttgcacaataataaacaatagcccacgccaaacgatatatagactatcttaacaagataggtatataacattgacgtgagcgttcttgcctactatcccgtgcaagtgaaattgtccagatttcatgataggataatatttaaaacgctcttcgttaactaatatgtcctttcagtcccaactcattaggtatctgaaattgccacaaagttacgaaaagcgtttgtaatagcaagaactattgtttattaaaagttgagagctatcccttctttataaatccatggtagtggaaaaattcaagaccacccatataaaaactaaatctctgaatttttccaccccaccgatatttcatgtttatggctttataaactgattttttatccgttgaacggtggaaataccaatactttgtagcttagctatatttctgattgaatagccttttcttagtaaagcaatgacttctttatattcttccttcttcttatcatccgttttggtcgaacctgtctttctaccaagtttaccacctttggcaatataatttgccctaccactattcaaacggtattggatattgcttctttcgatatttgccatttctgcaagtactgtcaccatgatagacgctattgggttaacttccccatttggttgcaaagtatataagcccaagttctgtatgtaaaccgatactttcgattcatgcaatatatccaaagagcgaagaacctgtaatgtacttcttcctagtcttgacaattcagacaaaagtagaatattcacagattcacgtttacagtatttcaaacattctcctaaaatctgtctttcctctattttctttgcacctgaaatatgctcctggaatatgtttactatttctatatcctgtgagatagcatatttctttaaatcctctatttgtctgctcgtgtcctgtctgtcattacttgacgaaacacgggcatatattacggctgttttcattttattctttgattaaattgataacatgaaagaatgtgttcaaaccaactttgcagatttatttgaacacatttctattttgaacactaacgaggtttattcgcttcttcaatatcccataagccaactaaaagaataagcaagattaacggaacacaacctgttataaaagacaataccacccaaaagagccaaacgagtatcttataataaaacatgattctttgttttatgtagttaataaaataggagaatacccatttctgaatattcccctgtttaatcaatcaataaaccacttatatttagtgtctccatgcaaagcggcatttattcccgttgctatttcggttgcatttaccgctctatccaagaatgaatctatataactgctcttgtttgctcctgtcaatagattatacaatttccacatactaatatcattccccaagctcccaaaattcttatcattaatatatgcttttgcgactgtatttatctgcgaatcagtgataagcattttaggaatatctttctgataaccttgtggcaatgattgataaagtctcattcttccaagtaattggcaaaattgatgttctgtgagatatgagttaccaagtgtttgcattaaatgtagatgttttgcaggttggtaactctgaaacatttccaatacagcccgatataaatctttggtattagtaacttccaagcaactaagaaaaccgtctgttgatacacacaagtttgtacaaactttacaagtaaagccaataaataccttaaacctttctgctcctttctttgaatacagatttgtgtgattataagctctcacaccaccaatagtaagagttagcttatttccgttcaccgtttcataaatcgtaggaatctgaataataaaagcacatctttcatagtagatagtcttatcactttcaagaagttgatttgcaggtttgtgtattgcttcgggtattcttcccttgataatgtgacttacacgaatatcgggcttgtcaatactttcaccactgaaaaatgtatttgcagcgtcataaacagtatcaataaatgcagggtgaggaattgtaagctcattatctttggcgaatacgggtgtaatacaatcttctttcaaatgttgcattgttacttccattgtattagcttccaagaaatgaggattctcttttttaactttgggttgttcttcgattattaccgcttcttctgcatattcaccaaagttgttttcctttctaacctgtggcacattgccaataatttgtagatttctcataacgaataaaattttaaatgatttataaattgattacgtggagaatagatatttcacttttcttccaactaccctagggggacgttagatgtcctcttttcacccgtacgtaactttcaattcagtaaatcataggagaagtaagctgatatatatttaagctcttatttttataggtaggggggggattatatataagtacctgtactttattgcacgcatatctttctactctccacaaatggaactactttagaccattacagaatgtggcataaccatacaaccaatgtttgaagaatgagtatcattcattttttagcttccccaattattcgtaaatttgtgtatcccatgaaggaaggattaccgtattgcattgagggcttattatctccatttcccaattactatcaatgtggtaaattcatttcttcgcagtctttcatagataaagccatgtttgatagattttattgcagtcgcctatatactagtattagacgacctttttcatttttgtagcataaccataaaaagtagggcaatttgacgtctgccctaccgcttgtggttatgaaaaattcttcttattacctaccatgtcagaagtatatacctatcaagaattacgtgaattagccttgaaacacggaatcagagataataaagtccatatcggtgtatggttacaaacacaaggctatcagaaacagagaatacagattaaccacattagaaaaacattttatttaaaatcccatgattgagacaagaatcccaatagcacctgacacaagtaccacccttacagatgaaacaacagaacacattgttaatcgcaaggtaacaatcaaaataaacagagattatttaaaaaagaaatatgcagaactatacgagcgactagcaaaactaaagctgccaccctcttacaagaagaaataatatcaacacaaaaaaccgcagttgagcacatttgtactcgcttgcggctatttttgtttttaattgggtagtagactactttattcgtcaaaatctctataatgggcttatttgtaggcattgacatatttttcagtgtctcatacttcaagtgcagtattagcctatataactcttaatctttaaaaatcagaacagatactctgtcatcctaaaaaatgaagttcatgcacacataaagtttaaattctttagtagtaggggaaaatgtgtgttataatatataattaatatcagatactttttccccactaccttacctatgtaaagctaagaatggcttgcaatactaataataacactgcactttgccgtacacagaaaaaatcatttttattgcatcctattctataaaacaggtagatacaagggaaaaaatactgtatattaatatactaataaagaacactttttccccttacttgggaattatgatattcccattatcatctatctctactattttatttactttcttcgtgggtagttttttctgcttagaaaaatcattttctaatagaatattttcagtatgtaaagttaagggagtagtaattgatactaaatcagcgccagcaagttttattatatacttgtcataagtctttttatctattccgattgctttgattatattttttctaatcagctctatattgccatattgggataatagaagcaattggataaagaagccctttatcgctgcatccagttcgattaatgcaaacttattggagatagtgatacactgttcttccattgcaggaatatgataaatattccgtctagttagataataaaaaccgttatccaccaaataaggctttatatccaaatattctttaaatatcttattaaaactgcttacagatttaccgccacttgttctttttaattcatctaaagtaattctcacattataccaatcatctcttgaaagagacaaacagaaaaatctataaatattggcaggtttgatttttaaagaaagaattgaataatttatagttgctctatctttacagtttataggtaaaatcatttctgtatattaatatatgtcggttttaaaaagaaagcccatctgtcacatgagctttctctaaagagtatggattaagctgctttatctatgacaccatgtttttctatatattgttgcaacaatgccgaataaatctcgtttaatttgtcagtagctatattagatatgaatttaacggtatcctcatctaaggacttgacaatttctatagtatcttcaattcctatggcagtttcagcgccttgtggtttatgctttgctaacatagtcatagcatcaatcatataacgttctttgataaacttatccttgaaccccttaactttcaaagtatctataattctatcaccaactgataaatcatattcaaatttagtttcaacctcaccaagcattgcattattccaaacttttagacttaaggtctttccttgattataatatttagtaattacactaatattagccttcagctctttagctttttggaatatcttttgataaaattcatgttgagtagccaatgccgcattacctgctttttccatgccattaaaccctctacttagtacattatttacccctctatactttgcaaactcttgcaatgatacaaattccttgattctgacattttctacaattaaagctgattcatctttaaccaccctatcaatattggcttcatgataagttttccattgccaatatccatttgctgtatcaacaggcacataaacatttggagtatttttaggaataacattgccattcaagtctttcaattcaatatcagcctcatagaatgtttgagctgccgttacaaacagagccgttttttcgaatttatcattatcaatcaaatcttttcctaattcaacatttactttagtcacagtcatattataatcagatactgcaataataatatcctcttttcttttgctaataacctccttttcttctgtagattcttccacttgccaaaactctactgaaatagtaggaagttcaacatcatgcaatgcaaccatataatccttttcagccttagcaacattagttttagctgcttttacaatattgatatctgcatctgcattatcagatagatattgccttttttccattaggattttgcgagcgttttccaatacttcgttttttgaaagagttcctgtttgattttccatattatcactgttttttaaagtttccacattaacatttccattctcgctgactgtcattgtagtaattgtttccatttttttctttatttttttattaataactaagttttaagtaatcatcaacttggcgccttatcgttttcgattacagtgcaaacttacggagaaatggtaacctgtagaataaagaaggaaacataaagaaatccctttttttatgtctaattctttatgtgagctcgcaatgcacaacatattaaatatcagcaaaatgcagataaaaaaatagccctgcaatataaatgcaaggctaatattttttttatttatatgttttaccaatatgattttaaatattcaactggattattgggagatgttttacacatagggattttccaccaatttggacgaacttcatatttttgtaagttcctgattgtagcccgcaaattcaatatgtcatttttaggactgtcctcatcaatcagtttgagatatttcagtaactcaagaataaaattcccctcgttatctgttaatcctttacctttggctgcaaatgatgagtggcgtagtaggttatatatactaagagttatcgtatcaagtatcgcattttcgcgcttcctccctctcttacctatactgggataatctttatccaattccgtttccgcttcttccaaagttgaaactcctaaatatttatcaagatatggagttatcatattgagaaaccaactatcatcattcgtaagttctattttctgtttgttatattcaatcgtgacaatattactcttggtctttttcttctcatgaaacatcttgtaaagacgtagcatatccggtctgacagaataactatactttagttgcgttgggtcagcaatataatcctcaaaatcaaaatagccattggtctgtgtgtatttatagtagatacttacaataagaagaacagcgtaaaatacatcttggtcttgctgttcataggcttcgtcctcatttttattgtatgtattccacaatgtttcaatatactcggctttaaaattaccactttcaaggactaaattctttcccacagtcatactaaattcatatttgtcctcatctgtcccgcaattaggatagggaatctcctgctcttccttctttattgacaagtacaaatcctgtatttccattgggaacttattacccaaaagatatacatcagatatatagtccagttcattatgaaacattgaacggctgaagcccacttcactattcaaccatgattcgattcgttttatcgtattgataggtattatctgatattccatattttcaaactttgtcacaaaaataaaaaaatgccgcttcaccataaaaacaaagcgacattttatttcaaagaagattcttcattgcttcatctatctgctcattttcaaagctatccaaataaatctgtgtcacccgttcagaactatgccccaaagattcacaaataatagacgttggcacgcccgaacgtttcaaaacagtcgcataagaatggcgggcaacataagtcgttaaattcacatcaaccttcgcaatttgggcgataattttcaaagacttatcaacttgtcccaaaactttatgcagcctattttccttttgcgtagcagttatatgtcgagttatatctaaaataggaaaaagaaaacctttaccacccttataatatttatcaataatcgcgctggcatttttcgtaaggcacaaatttatctgtttccctgttttttgtctgacataagacaatctaccatttaatatattctcctttgttaaactagccacatcacagaagtttattccaccacacaaatagctaaagacaaaaatatctcggctgaactttacatattcactcttacctgttaaatcagcagagataatcttcagtacatcattcttcgaaatagcccttttatctgtatgaacattaaacttattgatatgaaaatcttcaaacggataatactcctttcccacacattttctttttatagctttattatacacacttcgcaaagtacgaaactgaatacttatagttgtctccttgttgcctttcgcacgcaaccaactttcataattcaaaagccaaccttgcgttatatcctcaaaacaaatatcaagattatcccccgtaaacgaatttaaagagttatacgagcctttataagcacgtctattaccgagtttaccatttctctcaaattcgtctatcaaagccaaataaaactcccccacagtcatatgttgagctctttcagtctcccttaataaagaataaacagaatattctctttgtctactattaaactctagtatctttctttgcaattcttctttctttgctaaaataattttcagaatataatcacgattaggacacttaggcttaggttcacccttcaaaaagttccaatgtttgggattcacagaaataccaagactctgatattttctctttttatctttagtgatttgaagcattaatggactctcaccattagaaagtgttttggatttgtagcaaactactgaaattgaagcattcatgtgtcattttccggtttacatctcggtttacatcaccgtgcaaaaaccattcataaaccaagttttgacgcataaaaaaaatcagatagctaacagtgtaactatctgattttcagtagtgggcgttgacggattcgaaccgccgaccctctgcttgtaaggcagatgctctgaaccagctgagctaaacgcccttgttaatgagccggaagtgtttcgttttttttcgtgtgggcgttgacggattcgaaccgccgaccctctgcttgtaaggcagatgctctgaaccagctgagctaaacgcccgtacacttccgtttcaaaagcgatgcaaaggtacggctttttttgaaacctccaaacatttctaataatatttttcaagaaagtttttatccggcaaacgaatctactgattatcagcaaataataaaggagatttttttcatgcaatttttcctgacggttacgcttatttccgaattatacgtgccggattcccgactgcaacacaatcatcggggatatcttttgtgacgacactacctgctcctatcacacagcgactgccaatcgtcacaccgggacagatgatagctccaccgccaatccagcaatcttcaccaatcgtcaccggataagcgtattccttagagcctcttctttccagataatccatcggatgatgcggagtgtaaatctgtacacaggggccaatcaacgtatgagcaccaatcgtaatatatccaccatccagaaatgtacaattggcattgacaaaaacgtgctcgcccagtttgattccatctccatgatcacaatggaaaggcgggcagataatcgatgtctcaggtatcccgggcactaattcttccaatagctttctgtatccgtcttcgtatgtactcattcctcccatacgagccaacagtgctttggcatgcgcaaaacgttcttgtatttccggcacagccatatcggccaaccggctgctacgcattttttctacttctgtcatacattatatttctttaccgttagtaaacacaaactttttctcatccgaaagagactcatcaaactcgaatccttcccaagagaaatgtttcagttcttccggattttctattttattctttaggacgaaacgtgtcatttcaccacgcgacatctttatatagataacaaccgaagcccacttcccgtttttccacacctgaaatcccggagtaatgacacgtacttctttttctacccgcttccagtcgaacaggtttttcatctcatcacttgccaaattgcagagtatgccacccgcattctttatatcttctatgaatatatccgtcagacgggactgccaataagagaacattgtctgattccccaattccggcagcacgacatccccctccaaccgataagaacggataacatccagcggcctcaacaagccgtaacaaaatgaagtcaaccgtagatgttcctgtgcatattcaaattcttctttggagaaatctttcgcattcaaacgcttgaacacggttccggtgtaagccaacaaggccggaagttccggagtgccttctgcatgaaagacttgataacgcttataattctccacagctatctttgcgtttacacgcaacagacgttccaactcgtctaccgagaactgcgacatctgcaaagctatctcggacgcttctttttgaaaacgcggaactgtgttcaaaggaactttcacctttgaagtctcactcatagtcttggcgcaggatagaagtactaacatgatgaatcctattttatctacaactccctccttgaacaagccaaagagggagtcttacttagtttaatataccataccgctcaagcagtttttatttgtattcttgccagctcttaatctgaatatcattcaatttcaagtcacagaatgcttcgataaaggcacttgccagacgagcgtttgtaatcaacggaatgttatggtcaatagcgccacgacggatacggtaaccgtttgtcaattcacgtttgctatgattcttcggaatgttgacgatcaaatcaaacttgtgatcggcaatcatcttcatcacgttgttttccgcacccggcttctcatccggccaataaaccggagtagtatccacaccatgagcattcaggaaggctgcagttccggcagtagcgtagatctgatatcctttagcgaataacatacggctggcgtccagcaaatcaacctttgacttcatagcaccggaagagaacatcactgctttttcaggaatcttgaaaccggtagcaatcattgcattcaacaatgcttcagagaaatcatcaccgatacatcccacttcacccgtagaagacatatccacacccaataccgggtcagccttgtgcaaacgggagaaagagaactgagatgcttttacaccaatccaatcgatatcgaatgcagatttatccggacgtgagtacggagcatccagcatgatgcgggtagccgtttcaatgaagttacgtttcagtaccttagaaacaaacgggaagctacgagaagcacgcaagttacactcgattactttcacctcattgttacgggccaagaactgaatattgaacgggccggagatattgagttctttggcaatctgacggctgatcttcttgatacggcgtgctgttgcaaaataaatcttctgagccgggaacaccaatgtagcgtcaccggagtgaacacctgcaaattccacatgttcagagattgcgtactctactacttcaccgttctgggcaaccgcgtcaaactcaatctcttttgtattttcaaggaattgagaaacaaccaccggatattctttagaaacttcggcagccatcttcaagaaattctccagctcctcgtcatcatagcaaacattcattgcagctcccgaaagcacgtaagaaggacgaaccaataccggatagcctactttttctacgaatcctttgacatcctcaaggctcgtcagctcttgccaagccggctggtcgatacccagttgatcaagcatagcggagaatttgttacgattctcggcgcggtcgatcgagattggagaagtacccaatacaggaaccgactgacggtaaagtttcatggccaggttgttcgggatctgtccacctacggaaacaatcacaccgcgaggctgttcaagatcgattacgtcgagcacacgttcaaaagaaagttcgtcgaagtacagacggtcgcacatatcatagtctgtagaaactgtttccgggttgtagttaatcataattgatttatagcccagcttacgagcggtctgaactgcattcaccgaacaccagtcaaactcaaccgagctaccgatgcgataagcacccgagcccaacacgactactgatttttcgttcttataatagttcacatcataaccttccactgcatatgtcatatacagatagttggtcagttccggatgttcggaagcaactgtattgatacgttttacagccggaaggatacccatagatttacgatgagcacgtaccgccaagttttctttctccatatttcctgtcggattcagaacaaaacgtgcgatctggaagtcagagaagcctaaaatctttgcttcacgcattacatcagccggaatatcttctaccttattataagtagataacttagctttataatcaacaatattttttagtttgccgaggaaccaaggatcaatctttgtcagatcatggatacgttcgatagtgtagccttcttccatagcctgcgcaatggagaagatacgcaagtcagtcggacgtgaaagttccttatcgagatcgtcgaaatggagttcgtcattacctacgaaaccatgcataccctgcccaatcatacgaagacctttctgaatgatttcttcgaaagagcgcccgatagacatgatctcacctaccgacttcatgctcgaaccgatttcacgagatacaccggcaaacttcgtcaagtcccaacgagggatcttacagatataatagtcaagctgaggagcaacatatgcagagttaggagttcccatctcaccaatctggtcgagcgagtaacccaaagcaattttggctgcgacaaatgccaacggataaccggtagccttagaagccaaagcggaagaacggctcaaacgagcgtttacttcaatcacacggtaatcatccgtatcagagttgaaagcatactgaatattacattcacctacgatacctaaatggcgaatacattttgtagaaagctcctgcaacattttcagttccttgtcgtccagtgagcaagtcggagcaacaacgatagactcaccggtatgaatgcccaaagggtcgaagttttccatgctcgctactgtaaaacagtggtcattagcgtcacggattacctcaaactctatttctttccagcccttcaaagactcttcaacaagaatttgtttagagaacgcaaatgaactttcagccaacttcagaaattcttcctcattagcgcaaataccgctaccaaggcctcccagcgcataagccgagcgcaccataaccggatagccaatcttacgggcagcagcaatcgcgtcttccatactttctacagcttggctgacaggagttttcatactgatttcatcgagcttcttcacgaacagatcgcggtcttcagtatacatgatagcctcaacagacgtaccaagcacttttactccatatttatcaagaataccctgtgtatagagttctgcaccacagttcaacgcggtctgtccgccaaatgccaacagaataccgtccggacgttccttcttgataatctcttctacgaaataagtagttacgggaaggaaatacactttatcggcaatgccttcagaagtctgaatggttgcgatgttcgggtttaccaatactgagctgataccttcttctttcaaagctttcagtgcttgtgagcctgagtagtcgaactctccggcttgtccgattttgagtgctccagaacccaaaacgagaactttcttgatttccttttccatttcttttgttgttataataagttgttatttctaagttcgtccataaaaaaaatgcgttaccctcaaaaaaggattaacgcattaccaaagaactaaaatatcgtttttggagaaaaaagaagaagcctgccgtttccgggtgcaaaacatccgaatgtagataatacttacttctgatttcctgttgattcattgtcggttccaaaatttgtgcaaagtaacgacatattttgcaaatggcaaaaagaaacgtctacttttttacagtgaagtgctcccattttgatacatctttcagtttttatccgtatctttgtcgctaaatagatattaataaggtaataacaatgggaaaagaaaaaataatattgacgggcgaccgtcctaccggcagacttcatatcggccattatgtaggttcgttgaaacgcagagtggagttacaagacgcgggtgattatagcaagatgtttatcttcattgccgattcgcaggcattgacagacaatatagacaatccggagaaagtacgtcagaatgttattgaggttgccctcgactatctggcttgcggaatcgatccttccaaagcgaccatctttattcagtcgcaaataccggaactgtgcgaacttagtttctattacatggaccttgtaagtgtatcgcgtctgcaacgtaatccgacggttaaagcggaaatccagatgcgtaatttcgaagcaagtatccccgtaggcttcttcacttatcctatcagccaggctgcggatatcactgctttccgtgctacgactgttcccgtaggtgaggaccaggagccaatgcttgaacaggcacgcgagattgtccgtcgttttaattatatttatggtgagacattggtagagccggaaatcctgttgcctgacaatgccgcttgcctgcgtttgccgggaactgacggtaaggcaaaaatgagcaaatcacttgggaactgtatctacctttcggaagagccggaggaaatacagaaaaaaatcatgagtatgtacaccgacccgggacatctccgtgtgcaggatcctggaaaaatcgaaggcaataccgtgttcacatatctcgatgctttctgccgtccggaacattttgaacgttatttaccggattacccgaatctggctgaattgaaagctcactaccaacgcggcggattgggggatgtaaaagtaaaacgcttcctgaattccatcatgcaggagacgctggaaccgattcgcaatcgccgcaaagaattcagcaaagatattcctgctgtctacgaaatgctccgaaaaggatgcgaagtggcaagagctaccgcagccgagacattggctgatgtaaagaaagcaatgaagatcaattacttcaatgataaagaactgatcgaagaacaggtaaaacgcttctctcaggaataagagattaatctgcgttttagcagactctcctacaactaaaaaagtccggactcatttgcccggactttttatttctatgaataaattccaaactatggtttccaaatataccaataaataatgattgcgtaaatcctccgacaaacagcagccatacaaatacccaaatataacgattgccaggcatatcccgtttatctacttttgcaccgcaaactattcaggataacgattgatatgaaaagaaagaaaaaaagtatgtttaaatggtatttgtcggtatcagacctgttcatagaagggttgggactttctttttacggttcttacagtgacgttgacaataacagtacggatactgtcccaagacgatacaactggcagggcgaatgggtgccaaacgctttcaccagttcaggcgaaagatcgcgctcacaactccatatcaataacaaagaatggagaacaaataccagtctgaactatacattcaatcagtatcacactttatcactaaatcatgtctactccggactgacacgcaaagtgtccgatgtagaagatcctgccaacgaatacaataaagttcctcagagtattgacaagcaatacttggtctgggatggatggccaaatatacacgatggaatgctaccttgttcgaaaggtgacaaagcctgtgaatgaactgtcaacttcggactggccccgccttaccggtatgactgtcagtgacaacaagatttatatcacatattacttgacagacgaaacaaaaaagccgagtgtgacacgttacatcaacaaagcgtatgtagccgtatactcttatcctgaactggaatatatcacgacaatggaagatgaacgtgcagccatagccggttcatggaatgcttacaatgggatcttccaaaccgaatcaggtaacatgtacacgttctcaaatacatccatagctaacggttttacagagaacagtacaaagaaagccgcattcttacatatcccgaaaggaacaacccaattcgatgactattactttgacgttgaaaccgcagccagaggtctgaaacccgttcatttgcaatatttgggtaacggtaagttctttgctcaagtaagtacattgcaatcggaagaaatgaccagatgggcagataaagaattgaaagcctgtattattgacgtaaaagagaaaacggtaaaagataatggaataagaaaactgccctccgtaatttcacactgaaaatcaaagctccttttgcacggctcaattatgacctgcataatgttttaggcggatatgccgccatcgtattgttcgtcctctctgctaccggactagtatggagttttaattggttcagcaaggcaacatattacatcacttccggaggaaaagaactgaaaccttatgtacttccgcaatcgggcactttacatatcgaagcaggaaaagtcagtctgaatgtcctctttaagaaattaaaagaagaatctcccaacgccgccacattttattttgccctgccacagaaaaaggaagaggtaatacgtgtcagcgtagttcatgaaagaggctcttattataaaaccgacaacttattcttcgatcaatatacacttgctcccttacaaggctcaggagcttatgccggaaaatacacagaagcatcacctgccgacaaactaagacggatgaatcttgaaattcacgatggaagaattttgggtatcttcggggaaatcattgtattcgtatgtgcactaatcggagcatcgttacctgtcaccggctttattatttggttcaaaaagaaacagaatcattcattacaccttcgtaagtcttaagtattacatttctcaccatagtcatacaaaaattgaataaagctaattaacaaactctatccaataaaaataaggagcaatttgaaaaattctgtatcttcgtaataaaaacataaaacctacaaaaagtatgattaccaatcgggaagaagtgctggaaaaggcctttaaggtatttgtcaaaatgaactacgagaaagccagctttacagagattgcgaaagcctgcggactatcaagggcaggcatcatccactactttccatacaaattagatttatttgtagcagtagtagacaaatttgtatttcaaatccatcatccgaataataagttcgatgtaaaagaatgtaccttaaaagattttatcgaactgtatttgaaaggtgtaaccgctaccatgaagcgattggtggaattaatagatgacggcaacaatccttatgattcttgtcccaacttttactattttcacttcttcacacaggtcaggatgtactatcccaatatccggaaacagatacccaagttttatgaacaagattatcatttgtggactaccattatacaacaagcaaaagatagtggagaaatacgtcctgatacagatgtgaagaaggcggcaaccatgttccgtcaaatgtatttcggtctgtcttatgagcaatcattcttaaacggattggatgtcgatcttcttgctgaaaatttccgttacatttactcattactgaaatgataagccactgataaagtgtacattgacagaaagttaagcaaaaaaccaaacaattgtatggttttcgcttaacttttttatatatttgcgcctaagtcaataacttaaaaagataaattatgtcaatttacacactcattcccatcgtttttatcgccctatatttagggtattggttctatataaagaacaagaactcacaacaagctcaaattgtcagcaacactgatttcaaagcagaatttgcaaatgccgagaagtataaaaaccacttcctgacttccgaactacctttcttaaagaaagcgatggaacaggaaaagattgatgctttcaactatgccagcaatgaatatggggtagcttctgccctcaaagacggagtaaaagacaaattaaaaggaatggcaactttgggagcagtacgtttcaccacagtgcaaacacctaaatatctcgtactaagcggaaaaaacttacatttattcgacacagatacggacggtgagatcgatcggcactttatcttcgatgcagcacgtcttgagaattccagacttaccgaacttccactgaccggttcggtacaggcacaggctcaagctcgcggaaataacgtaaaagcttataagttatcactacagactgatgacaaacctgtcgtactcatcatctactcctgcttgatttttaccaatattgcagaaataccaacgaatccccaaaagacaatagaagccattatcatagcaaatgattttttgaaacaactaggcgacctgtatccgaacctaaaagtttcactgccgatattcaactaaaagaaaaatataggagagaaaaataaaactgtattcaacaggagaactaataaaaagacggctgaaagcgagaacacctactttcaggtttcgctttcagccgtttttcttttttcagcaagcgactataaagaatcgttgaatgctgaaatcatttcgttactgtgctgattctaccaatactacacggttcaggatcggttgaccgaatttatcgacaccaccaccggcagcaactttcagtctatcggcagaaatgccatacttcttaacgaacaaatctttaacaacttgtgcacgttccagactcaacttctggttgaaagccggagtaccggttgcagagtctgcatatccattgattgtgtacgtagtattcggagattcttttatcttattagcaaggtatgacaagttcatttcttcttgcggagacaacttatcagagccaatcttgaagaatacggtacgtggggcaatgttggtatctgcaatcacaacttcttcagtgtcttctatttccaccggttgttgtgcgttagccaactgctgttgcaactgcagattagcggcagccatcgcattcatctgatcacgcatctgacttaattcgatttcagagataatctgtggtacaggacgttggaatccacgagtcgggaaataataggttacacctacagtagcacctaagataccgtcatagtcacgtttacctccgtgttcaccgtcaaacttaccttccagccctgttgcactcaattccagattcaaatcgacagcattcgacaagcggaaacggttgataatacctgcattgaaagtagccgaattggtatgaggacgagtataggagtgagcccaacctgcaccgatataaggtatgatctcataaatacgatccggattatatccaccgaataatgcatttaagttaatcatcaaatcaccgtgaaggttcatataatcccatctctgtttgtaagaaccatcttctctcggaccaccgactacataatcggccgtttcattcattgtgaatcccttagcttgcagtccgctgtattgcaaacgtacaccaaaacccggagtcacccatttgccgacagatacattaaacgtaggagcgacacgatctcggaatttgccgatatggtcattgttgccatacagcacctgagcaccacctcctacagagaagaaccagttgctccagaatggattggttattacttgatatttatcctgtacctgaatcacttcgtattcagttaccgtcatagtctgctgcgcagaagcgacagacgtaacgccggcaaaagccagcaacatcagaatctttttcatatacctaatagttaagtggttatttaaatctttttctttgtttaactaattaaataacacgaaccgaactaaaaggttttatgaatagaaaaaaataatttgttttatttgaataaacgttcgatatcttcctctttgatcgttgtcaacactgttttcccatccggggtgtaattcggtgaaggacaggcaaaaagattatcgacaaggcttaccatctcttcattgctcaatacttgtccgtaaacgattgccgccgcacgcgccaatgttaaagccaatatattttggatttcttcctttacatcgtttcctttttccattgccgtatgcagcatattacgcaccaattcaaccggattcaatccttcgatacccgatggaatgccatttatagcataacttccgccacctaaattactcaaatcgaaacctaccgccgccaaatcatccatgataccttgcaacacggctgcttccgaagccggcaactgcaatatctccgggaagagaacgccttgagatactccttgtttctgccggatctgttccatataacggtcaaaaagtactcggatatgtgcccggtgctgatcgataagcatcaaaccggatttcacagaagtcagaatgaagcgccctttaaattgcaaatgttggtttcctttctccaccacaggctcatcgccatacaaggtcgaagccatggatgtcagcgtttctccctctttctccgtgacaaacgattgttgttcaccactaaaagggttttcccaatctgtctcaggctcgggcatcggattattcattttgctagcctttgtcaatcccccgtataaatcttcccattccactttggagcgactatatgaaccgccaccactgcctccagccgaaaccttgaacggattataatctgaattataatgaactttaggaggttcggaagaggtgctctgctcaaatgccggaatatcgggcatgtcttccgtatcaaaatcaatagaaggaatagcgctgaacttacccaatgattctttgacagaagccgaaagaatctgccagatagcctgttcattctcaaacttgatttctgtttttgtcggatggatattcacatcgatattagccggatctacttcaaaataaatgaagtaggagatctgttcaccggcgggaatcaactgctcataagcttccatcaccgccttgtgaaagtaaggatggcgcatataacgtccattgacaaagaaatactgatgtgcacctttcttgcgggcagtctccggcttagctacgtatccggagattttcaccatcgtagtattcacctctatattcagcagttgctgattaagctttttaccgaaaatagccatgatacgctggcgcaacggagatacgggaagattgaaaagttcggaatcattactgtaaagcgagaaggcaacttccggatgaacgagagcgatccgttcaaattcagcaaggatattgctcagttcggtggaattagctttcagaaacttacgccgggccggcacattaaagaacagattctttatagagaaattgcttcctttagaacaggaaacagcttcctgacactccactgtagagcccgctatcaccagctttgtccctagctcttctgattccggacgtgtcttcaactccacctgcgccactgcggctatggaagccaaagcttctcctcgaaatcccatcgtgcgcaaagcaaacaaatcggaagcctcacgtattttggatgtagcatggcgttcgaaagaaagacgggcatccgtttcggacattccctttccatcatcaataacctgaatactcgtttttcccgcatcagtcaccagcacatgtatattttgcgcctccgcatcaattgcattctccactagctctttgactacagacgccggacgttgtatcacttcaccggcagcaatctgattggctaccgaatccggcaacaaatgaataatatcgctcatacttcgtaaattaacaattaacaattaaaagccggaaatcgtattccgtcaattcaatgttacagccgttcaaataaatatccagtacctttctcttctttaatttttaatttataatctttaattaaaaactccagcttcctgttgctaaataataccacagatagagaagaaaggcaatgataatcaatatgattccgaaagagatcggcttgcgaccacttgcttttcttcttttcaagtgggtagttccttcgataaacttaccacggatatcttccggattaaattctttctccggcaacatccccaagtcgcgtttagcgttctcttccatcttggcgagtttctctttacgctcgtctacataaatgtattgatgattaaagccacggggtttcctcatcgaattaaacattcccatactgctacatattaattaagttacgcttatctgtctttggacgcctgtcagtagtcggtttcaacgtttctcccgcacgtttgccacgccagttgaaaatatcgtctttattcaacggacggacatagtcaaaccaggaaaaagtagggagacgcagtttgtcaggagggatttggtccatcggatacatcgttccgttagatttgccgacaaacagccctttttccattttcttatccttcatataaagatggagcacgctgccctccaaacagttaaatcccgtcatggtactgtctttctcttccggatagaaagccgtttgcacattaccgactacctcgatatgacgcatatcaccatttatgaaataagccttcatctcctttccggacacttgattatagtgaatggaatccttcatctccaccgttaatgcctgattgatgatatgtgcccagtcaatagtactgtcgttcatataaattttgatttcctcacctaataactgctgaccgtcattccacagaatcggatcggtatacatggtcatacaagaatctttcgaattataaaccagtgaatcgcatactccttgcacgtctgtacgatacatacgtactttatgataagctttcattaaacgatacaacgagtcggtattcagattgtaagacaccagctgcaaagtatctccgtgcataaagaggctatccccctgtgagtagtcgatagccacagcccgttttgttgcgaaggcggagtcagtcaattcattgtagaaacaataatctcctgtcagcatattcttattgatggcatccgtcatcttcacattgtcgaacgcttccccataaccggcaacacggtcgtagaacagactgtcgcccaccaatttctttccttgattggtcagaatggaacggtccaacagttcggcttgctcggtcaatgtattatagaatccacgctcggagtagatatggttattgtcactaacgatgtttgaaggaccgagaataactgcgattttgttctctgtattataccttaatgtatcggaagtcaatacaaacttcgggttaaccaatttcacgtcatgattaaacaccgactgtttggtagcaggactatactccccccagtcggaagtcagcacattctcttcatccatcaaagttcctccctcgaagtaatacccgagatcataaagacggtcataattcaagctatccgtcagcaaagtcgtattacggttaatcattttcacgttttcacggagttgcgcaatctgcgtcattccgtcgtaatatagataatcaccgtagatgaataaggtgtctccctgctccatacgaacattactgaaagcctctacagaattggttttctcaaaaatcagcgcactgtcacaatacatatacatactgtcatggcgcattttcacattaccgatcagtacttgcacgtccggacgagacagtttatccgcctgtccctcatccgcatgaagcaaataaacctttgtctttttattttccggctgcttcttactttccgactgttgcttattcaccggttgttgtttcttgtctgccggtttcttgggattttgcgccacaagacatacgccaaacaggcatagaaagcctataaggagccatctatgcctgtcttgttgtttatctttcttatttcgtttcagcatataaaatcaagctgttaaacatcaatccttcttcacccaacccgggtatttgaagtcacacttctgccagttttcgttgatacgtacataggtatgtttctgtttgtccagaatccatttttgtaacatctcttcacgacgcttatccattacaatttctttcaagtcctgatagtcttccgcaatggtagccttatgaccattgatctttgttttcaacttcacgattgcacaaacttcttttccatccttctcgtttatcattgtaaaggcttttgaaatttctcccacattcatcttgtccacaactttggcaacgtcctgtggaagatcctgcatctggaacttagaagtagtaatacccgagtgctcattaacattcaccatgataccatggttgttacgggtatccttatcttgtgagataacggctgctgcctcatcaaaagaaaatttgttcgcacggatatcgtcagcaatagaatccagacgtgcgcaagcttcggtcagttccttctccgatactttcggacgcaacaggatgtggcgggtattcacacggtcaccgcgcttttcaatcaactgaatgatgtgataaccaaattccgactccacgatcttggaaaccttcttcggatcctgcaagctgaatgctacattcgcataggccggatccatcataccgcgtcccataaatccacactcaccacctttgatggcagaagctttatcctcagaatacaaacgcgccaatgtagagaagtcaatttccccttttgtcacacggtctgtgtagtcacgcaatttcttcttcacatcttcaatttccgagataggaatcttcggttgcaacgtgataatctgcacttccacctgtgtcgggatataaggaatgctatcctgcggaagatctttgaagtaacggcgtacttccgccggagtcaccttgatctctcccaccaatttctgctgcatcttctgcactgtcaacccgtcacgcgcattatcacgcaaagtttcgcgaatctgtgtcgaagtcttattgaagtattcctccattttttcttttgaaccgatctgctggatatacatattggtcatcatatctacacgctggatgatctccgcttcggaaacctcaatactatccaacttagcttgatgcaaaaataacttctgcacggcaatctcttcaggaatcacacaatacggatcgccttcgaatctgcgtccattatacagggcatccatacgagcctcttctacatctgatttcaaaatagcttcgtcacctactacccaaactacttcatcaaccacattatcctgagcataagttgccacattagcaaatactgccaagacaagggtaacaacaaatctaaagttcacaaacttcttcattctttgtatttaataattatatataatcttcttcttgcttactgcctgctgatagagatcattcttcacccgttccataaaatctacccgcttttgattgaccagcaggtctttcacttccggacgggcaaactcatacggtttttcctctcccgctccacgataatcactcacattcaggaaataacagaatgccgtatctttcaattctatctgacggtgtttattcacatattcttccggagcttccactttcaacggaatcatatccaacacatccgtcacggatacccatttgtcgtaaaagtactcatatttcaccgcattctgcaaactatatttttcaagactttcaatagcatcctgtttatcagatttataccacctgcgcacattattcagttggggagccgtcaacggcactttgataaacaaccccttaatcaacggattctccaatttgaacagttccttgttctgtccgtaataatccgtaatttcttgttcggagatatcattcgtcaacttctggtttatcaattcttgctgataagtatgcataatcaacgctttccgataattttccaccagtttgtccacatcgacattgtccggaatattgtttgccgctttttcatacaataagatctcttccacccagctacgaatataatgctcagcgaagagaatactatcatcttttgacaacccgacaggaagcacggacatcaaatcttctttatacaaaaagttaccgtccacctctaccaaaggaatctttcctttgtggtcgcgctgttccttgcacgccccacaaccgagaagggtaatcagtaagaggagtaatattcgcattgtcaactgaaatctacttatttaaggtacgaagatagtgaataatcggttacatcagttattattaactgtttttaaaacctcttggtttatttcaaccttaccagactccctcaattcccgcgtccagcacgtgtcaagatagattctataatccttccgcacccggtctattacttcccgataatcatccggacctttctgttttttgccgacaactatagtaaaaggataagacaataaaggttcaaaatctccgctcttaaaaaccagtttattgacatatttattctctccgtcagcaaacgctccctgttcaatctgtatcttttccgctccggatgtattaaaagtctgccggagcttatccatccattcatcagcgggtaacttcttcaacatcttttttgcccgcttcgcaatctttttatcggcacagtgaagaacaacacctttgtagcgagggctatcccagtggtaatcagatgaatgaaatttaaagtaagtagccaatccggcccgatcattcattgcaggcagctccactttctgccgtgtcatttcctttataagataatcttcatccgctttttgcaatgcgtaccgaacctccggatattttttatctaaatttctactttcatagtccaatagagactttgctacaaattcctcaagttgacgtttcacagtcataggatgggaagcagcaaattgtttgaaccgacctcctgtatactcctgcccctcaatagcaaacaatgtccgttccgtatctccttttgtcaacagttcctctatacttgtctgattcggagtatacctccactcccttttcagtcgctctattacttttccgatcccctgattccgaatttccttatgcaatatgcgctgtacaattccatcgactacgtcctcatacacaggcaactccttcctatccatgaccttcagaatatggattcccgcaggagtaaaaaacggttcggagatttctcccttcgacaaagcaaaagcaatattttcaaactcaacagtagtttgcaatcctccaatccaacggttttgcctatcatccgaataacatttcaccaaagcagagaaatccaatccgggctgattccggatagcctgataaatagagtccatccgagctttttcttcttccaaatgtcgggaagttattgtctgtggtaaatacttaaaaatctgcattacttgcacttgcccagtacgtgctttcagtgccattttctgataggaaacacgaacgcagctatctaccgtctgtttatcaaccagacaatcctccatcaacttaatccgattctcttcttgttgtttgcgaaaggcagcagttgtatcaagtctgatagctttagcagcttcaactttctgtattgcctgagaaaacagcagtgcatattctttaggggaaagatccctccccccacctgccctataatgatgatacgaatattcaaattccgaacgggaaacctctctcccgttaacacgcatcagcacaggattttcctgcgcaaaagccagaattcccaaaagacaggcacatagtggcaacaaacatctattcatcatcaattctcattttacaaacaataaacggtgagcagcgaacatctgctgattcatacagcctgttcaccgttcaccgttcacagttcaccgtttatatttattattccggacgactataattaggcgattcactggtaatcgtcacatcgtgcggatggctttccattacacctgcattggtaatacgggtaaacttcgcgtcatgaagtttttcaatattagcagcgccacagtatcccatacctgcacgtaaaccacctgtcaattgataaaccacttcgaaaagcgtacctttatagggaacacgggcagcaatgccttccggaaccaatttcttcacgtcagccgttccactttggaaataacggtcttttgagccattctccattgcttccaatgaacccatgcctcgataggatttgaatttacgaccgttgaagatgattgtatcacccggagactcttccgttccggcaaccaatgatccgatcatcacacaatatccaccggcagccaacgcttttaccacatcacccgaataacgcaaaccaccatcggcaatcaaaggaatacctgtacctttcaaggctttcgctacatcatatacagccgacaactgcggaacgcctacgcctgcaaccacacgagtagtacagatagagcccggaccgataccgaccttcaccgcatcagcacctgcttccaccaatgctttcgcagcttctccggtagcaatattacctactacaatatcaatatccgggaagcgtttcttagcttctttcagtttctcaatcacgtacatcgaatgtccgtgagccgtatcaatgacaatagcatccgcacctgcatctaccaaagcctgcatacggtccaacgtatcggcagtaacacccacaccggcagctacacgcaaacgacctttggcatctttacaagccatcggtttgtcttttgcttttgtaatgtctttataagtaaccagaccgatcaactttccatccattccgacaatcggaagtttctcaatcttatgcttctgaagaatctgggcagcagactccaagtcggtagactggttagtagtcaccaatttttctttcggagtcatgacaagatcgatatgcttagtcatatctctttcgaaacgtaagtctctgttggtaacaatacctaccaaatagccttcgtcatctaccacagggataccaccaatcttgtattctgccataatgtccaaagcgtcttgaacggtagagcctcttttaatcgttacagggtcataaatcataccattctcggcacgcttcacaatggcaacttgtcttgcctgttcttcgatagacatatttttgtgaatcactccgataccaccctcacgagcaatggcaatagccattttcgcttcggtaaccgtatccatggcagccgtcacaaaaggaatttttaactcaatgttttttgaaaactttgtcgagagatcgacagtgcgcggtaaaacttcagaataagcagggatcaacaatacgtcgtcgtaagtcaacccgtccattacaatcttatcagcaataaatgacatagggctatgcgtttaaaatttattgcgtgcaaatatacggtttttattcaaaatgcgcaaactgtgcgccagaatatttaacgagggaggctaattaatacttatcagaaagaattgctttaaaagaacacattcaaagaaccgaattaaagaacaactttaaaaaacaagattatggaaagacagatttttattaatgagatgcaagctcgtttcaatttaagaaaaccacctagcaagaagccaaccaatctctatttaacgtgggttcgaaataaaatcaaaaaatagcaagttgtccgacattgacagaatttacgtcaatggcgggcttcttttggcaaaaacagtatgccgcgatagccgacaaggagttggctataaagttattgaatgaacgatgtctggagtgttctatctgcgcaatgttcttcaattcgtcattgactgtttcgagcagggctctttttctgagcaaaatcttgtcagcaatactcatcagtgaattcttcatattgtttttaactttagtgacaagctgtatgccattaagaaaaaggttctcaaacagagcctgaccaatatatcctttgtctcgcatagttttcctttgatgttctccagaaactcaccttgcttcaacggttcccggtcatccacgtttccaggcgtgaacatgaaattgaggacctcacccttgtcattgattatcagatgcaacttgaatccgaagaaccatcccattgaacatcttccacgctcggcaagcccttcaaatgtcttatgaataaggattttttggttacggcatatacgtaagggagtggagtcgacaaaactgatgccgtacaggttcccagcaggacttttttgatgaagatggtcatgggaagcaatacttccttctccagttccacaaaacggttataagaaacctgacgcggaaaaaggtgtttcagatgtttacagacatattccttatagtaatgcttgaaactgcggaaaccaccggagtgaaacaggatgagaataaccataatctcagcatcactcatacggttggggttgttacgatgattggtcttcttatactcaatcatatatttttcctgttgaaatgtaaattccttgcaaaaatcatcggccatacaataaatctctgtaactttagactctggaaacatagtggtaatcgtttaaatgttataattggacactataaatttaaggattttatcgctatgtttctaattgtcagaaaaatatatttactcttatttcgaattcacgttagattaaaatgaaaacactaagatttattggtatggcagtagtagccattattatgagtttgaactttgcagcttgtagcgatgatgatgaagacattgatgtaagccagttagagggaacttggggattggtgcgtagtgcaggatgggaactttgcagcgaagcaactgaaaaagatgaatggaacgattcttatgacccttataatcctgacgatgattgtagtaaattggttatcaagaaattggaagataataaatattctgtaactggatatgattactcgtattcacaatggaaacctgaccgtggtagtcaaataatgtcgttgaatggaaatactttagttataactcaaactgatggtgaatttggacactttgattatggaaatccaataattgaagttttaacttctgataaaatgatattacatatcaaatatgataatgtacaaactgaccctgaatttgaacctgagcaccgtcatagtggagacttcacagaaacatttaccagaatggaataaacacctattattaatcaataaaggtggcatttgaagtaacactcacttgctgccttttagtttccattttagttaacctaactctttttttgttcttaactagtactcttatcctttgataagaaaggaaattaattatgaatcttttaggatttccttcatgtgatagaagtattatattccatttaaacgtagtttctctacagatgaacctgattttagtctgtttagttataaaatatataattttatttttacgtgctaatattattgtttatatttgcagcaaaatattttaacaaaacgaaatctatttattaacatattaatttatcaaaccgaaatgaaaacattaagattaatcggaatggctatcgtagccatagtaatgagtgtgaattttacagcttgtagtgatgatgacgatgacattgacatcgctcaactggaaggtacttggggattagtgcgtgacgaaggttatgagcactatgaaggtgaaaaagaaagttggaatgatagctatgacccagccaatccaacagaggattgtgaaaagatagttatttcaaaggtagccgataatacttattctttcgcttcttcttattactatggtaaccaatggcatacaggtgatactggaaaattcactttagatggtaataagctaattcctgttgatggtgatgctggtgagtttgcagaattggtcgtagctaattcaaatgaattggttattgagactaaaggtacggatgaagacggagagtattataataaaatgacatataaacgtatgtaataaataataaaagaacagcatttgaagaaattcatttgctgtttttttagttcacttccttctcttcttaaccagtctatgcttatccttcttagctgaatttgagaatagttgttttaatatctcccttgtaataggtaagtatgtgacctctgttaatctagtttctttaatctcttgtggtaaataatgaattgtgttagtcttctttggtgctacttgcatatttgtgtggaaataaataggttggtaattgatttatctatggcaaaggtactgataagaatcaggcaaatctaatacaagatatacattctggattattggaatatatgtgcgtattgaacgggaaagacaaggtagtagatagcaacgaaatggaattattgcttctataagcagaataatggataatgatgtacataaacaaaaggaagtcccgaagcaaagaattatgcatagtattataaagatatacttgacttagccaataattaattgaatttgaaaagccagttatcgaaattgatagctggcttttttatctaaatatgaattgtcacatctaaatgcagactaaaattctaatctcaaaattatgccttatacataattaatcctatctttgtatcgttcaaacaaggctagataagtacaaatttgaggaactaactttgtagggatatttataaaataataaaatttaaggcaactacttcattgcgagttagttgccttttttgtatctttaagcattcccctcaaaaacggtttgacggccaaaacgggggggggaattaaaaataaaaacacatggtaaagatacaaaaaatctcagaaatcgaacctcgtttaggttttactgagttcgatatgcttaaaaaatatcgtcaaagttttgcaacgagtgaattaggtcgactccattctctattccctttctcggaactggcccgacaaatgcatttgaagtcctctgctttagggcgtaaaagttatttttctcccgaaggtaaaatagccttgatggtcttgaagtcctataccaacttttccgatgcacaactgattgagcatttaaacggtaatattcattaccagttgttttgtggtgttcagattgatccgcttcatccactgaccaatcctaaaatcgttagtgcaattcgtcaggaactagcggatcgccttgacgttgagtccctccagttcattcttgccgagcattggaaaccttatcttgagaaccttcatgtctgtatgaccgatgccacctgttatgaaagtcatctgcgttttcctactgataccaaactcttatgggaaggtattgtatggcttcatcgtcatctgtgcaaacattgccagaccttgcacatacaacgtccccgtaacaagtatcttgatgtacgccgtgcctatcttgcttatagcaaactgcgtaaacgcaggaaatcacagactcgtatgattacacgaaggttacttcagttattggaaaagttacttgaccagctggagcagcttcattcatcctacaggaacaggcttgcactatcctctgattaccaaagacgtttctcggtcatacagacagtccttgagcaagggaagaatttatttgcaggcaaaaaagtgtccaaccgtatcgtgagtatcgaccggcattaccttcgccccattatcagaggcaaggaaaccaaatccgttgaattcggagccaaagtcaacaatatacagatagacggaatctcctttatagaacatatctcctttaaggcttttaacgaaggagtacgtttgaaagactgtattcatctgcaacaacaactgaccggggttagggttaaggcgcttgcggcggattcaatctatgccaataatgccaaccggaaattttgtacaaaatatcatataagtacttcctttaagcgtaagggcagagctgccaaagatgagccgcttcggaaaatcttacggtcggaactcagccgtgaaagagctacccgcctggaaggaagttttggaacgcagaaacaacattactcactggccaggataaaagctagaaacaggaaaacggaagtactttggattttctttgggatacatacagccaatgcggtatgtatgatagaaaaggtcgaaaagaaaaaaagaaaggcagcataatctgactaaaataacaggaaaaacaggagaggttttaacttcccctaaaaaagacatgtacataatgcatgggtgggaaggaaaaaacaagaatatgtaaacaatattctacaaaaaagttagaagactgggagagttgaacgaaaaaatcaagagaaaagctcacgtaaagcaaagcttttctcttgattttttagaaagaggaacatttactgaatatccctttgtaaattactgataaacagcacccaatctaaacatacggtttttattcaaaatcgcatacctgcacgcctattttttcgttttttttaattagccatttcagagatgaacttaatacgtaccaaacggacttcctcttccgtgaagtcatcgcccagttcatcaagcgcatcatcaatcttatccgtagtagattccttgaagtaatcgtagatatcgagcatatggtcttcgtccatgatctcttccaggaaataatcgatattcagtttcgttcccgaataaacaatcgcttccacttcatccagcaattcgccgaactcaattcctttagaaagagcgatatcatccaacgccactttacggtcgatagcctgaatgatagacaccttcatctttgatttattggcaaccgtacgtacacgtaaatcttcgggacgttctatctcattctcttcacagtgacgcttgatcagtttacagaactcctcaccataacgttttgcctttccggcacccacaccgggaatgttctgcaactcatccaatgttaccggatagatagtagccatcgcttccaaagacggatcctggaatatcacatagggcggaacttccagttttttcgagagcttcttccgcaaatctttcaacattgaataaagagccggatccaccgcacaagagccaccgccacgtgccggtgcttcctcttcagtctcttcaaagtcgttatcttcagtaatcttgaatgatttcggcttcttcagaaatttgtgtccctcttccgttaccttcagaagtccataatgttccacgtctttgctcaagtaacctccaatcaacgcctgacgaatcaccgcattccacgtcttatcctcttcgcccataccggaaccgaacacctccaggtcttcatgcaaatgagcctgcacttctgaagtttctctaccttgtagtatgtctataatataatctgctttaaaattttctttcaccgcgataatcgcttcaatcacggtacacaataaatcttgagcctccacttgttttttagggtttaaacagttgtcacaatttccacaattttcttccgtgtactcctcaccaaaataatgtagtaatgtcttgcgtcggcatacggaagattcggcataagcagcggtttccaacagaagctgcttgccaatttcctgttctgccacaggtttgccttgcatgaacttttccagtttctgcaagtctttgtttgtataaaaggttatgcactggccttccccgccatctctaccggcacgtccggtttcctgataatacccttctagactcttcggaatatcgtagtgaatcacaaaccttacatccggtttgtctattcccataccaaatgcgatagtcgccacaataacgtctaccttttccatcagaaagtcatcctgattcttggttctcgtcaccgagtccatccctgcatgataggggcgcgcattgataccgtttgcttgcaggatttcagcaagttcttccactcttttccggctcaggcaatagatgatacccgatttctccggattgttcttgataaacttgattatatccctgtcgatattagcggtcttcgcacgtacctcataatacaagttcggacggttgaacgaggatttaaagacttgtgcatctaccatccccagattcttctggatatcatgttgtaccttcggtgttgccgttgctgtaagcgcaatcagcggcgcctttcctatttcattgataatcggacggattcgtcggtattcaggtcggaagtcatgtccccattccgaaatgcagtgggcttcgtccaccgcatagaacgagatcttcaccgaacgcaaaaattccacgttttcctcctttgtcagcgactcaggtgccacatatagtaattttgtttttccggcaaggatgtcagacctcacttgttctatcgcgcctttattcaatgaagaattgatgaaatgggcgatgccatcctcttcactgaaattacgcattgcatccacctggtttttcatcaacgcaataagcggagaaattacaattgccgtaccttccatcaagagcgaaggtaactgatagcataaagatttcccgccaccggtaggcatcagtacaaaggtatctttgccactaagcaaattctgaatgattgcttcctggtttcccttgaacttattaaatccgaaatactttttcagttcatctgttaaattaatcttccctgccatcttaacttaggttgttttattcagttcatggtttaacttcaagtaaacctctctttttcaagagagccaaacaaagttataaacaacttcgtaattaccaagcaaaaagtgactaatattttcaagaaaaaacagaaacaatcaatttcagttaccttacgttctgattttaagccgtttgcaatcgtgccatattcgctttttccagttggttttttgcatattccagcgtcacctcatacgttttcttgttctctgaagggatttcaaacatgacatccatcatgattgtttccacaatagagcgcaatccgcgggcacccaacttatattccacagccttgtcgacgatatactcgaaaacagacttctcgaatgtaagtttaataccatccatctcaaacaacttgatatactgtttgatgattgagttcttgggttcggtaagtatagcacgaagcgcatcgcgatccaacggattcagataagtcagcaccggaagacgtccgataatttcgggaatcagtccaaatgacttcaaatcctgaggagcgatatattgcatcatgttgttcctatctaccgtcgctgttttttgtgaagccgtataacctacgacgtgcgtattcaaccgttgagcgattttcttctcaataccgtcaaaagcaccgccgcagataaagaggatattcttggtatttaccggaatcatcttctggtcgggatgcttacgacctccctgaggagggacattcaccaccgaaccctcaagcaatttcagcaatccctgctgtacaccttcaccactcacatcgcgagtaatagaagggttatcccctttacgggctatcttgtcaatctcatcgataaacacgatcccctgttccgcttcgggtacattataatctgccacctgaagcagacgggttaaaatactttcaatatcttcgcccacataaccggcttccgtcaataccgtagcatccacaatcgtaaacggcacgtgcaacaacttggcaatggtacgtgccagcaacgtctttcctgttcctgtactacccaccataatgatattagatttttcaatctccacatcatcaccactatctttctgtagcaggcgcttataatgattgtagaccgacacggaaaggaaacgcttcgcgtcatcctgtccaatcacatactggtcgaggaatttcttgatttctaccggtttggggagttcttttaaattaagtttggtagctccggcactttttttactctctcccaaagcctcctgagttatctcgtaagcctgagtagcgcaactgtcgcagatgtagccattcatcccggtaatcaggaatccgacttcattctccgacctgccgcaaaagctacatcttttctttgtctttgaatcagccatttctatttcttaatcaatacctcatcaatcataccgtattctttcgcttcctgagctgtcatccagtagtcacggtctgagtccgcccatactttatcgaaatcagtatgcgaatgatcggcgatgatcgtataaagttccttcttcaatttctgaatttcacgagctgtgatttcaatgtccgaagcctgtccctgtgcgcctcccatcggttgatgaatcatcacgcgtgaatggggcaacgcagaacgcttgccttcggcaccagctaccagcaatacagctgccattgaagccgccatacccgtacaaatcgtagcgacatcgcttgaaataaactgcatggtatcataaatacctaatccggcatatacacttccacccggtgaattgatataaattgaaatatccttgcccggatcaacggaatccaaatacagcaactgtgcctgaagcgtattggctgtataatcatccacttgtgtacctaagaaaatgattcggtccatcatcaaacgggagaaaacgtcgagttgagttacattcaactgtctctcctccagaatataaggattcaaatacccggcctgcgatttaatcacatcatccaataccatgccattcattcctaaatgcttggttgcgtattttctaaaatcatccatattaattgttcctttctataaatttaaaataaatgtaagcgcaaagaaacgaaaaagaatacagagacacaaaaaaacacagagttataattctataaaaactctgtgtttctgtgactttatgttcggttcaaccgaatgattattcaaacatcttattgaattcttcgatagaaacgctcttgttttccaaagttacctgtgctttcaaggcagcagccaacttcacttccacaacgcggctcaccaggttgtttacggtttctttcttcttcaacatctcctgtacgtagttgtcgagtacatcatcaggaacagacaacatgccatattgggcgaactgtgccttcgttgtgtcttttgccactttcagaacatcttcctgctctaccttgatatcgttagcctctaccaactgttccttaatcaaatgccaagtcaactcctcaatgctcttatcatagttctcagcaacatattcttctcccttttcttcgttgttcagcaacatgatgcgtttcagcagtgcatccgggaattccagcttacccactttctccatcatcatcttgcgaacatcgatcaagaacttataatcgctgtcagctacaaatcttgctgcgatttcttccttaatcttagcacggaattcttcttctgtcttcacaacaccttcaccgaaagcctgatcgaacaattcctgattcaattcaccagcaacaaagcgagtgatttcttctacctggaagctgaagttggatttcacatccttagcaatattcttgtcgattttcagcaaagaacccaattccgtctcgtttccgtcaaaagcaacgttcggattgaataccaatacatcgtttacttttgcattagcgaagatagctttctgttcgtcattcttcatataagaaggcatcataaccgcaccttctacctgaatgccgccttctttcgtattgccttcttcgtccaactgagccaacagacctttcagcatatcattatcctgataagtatctactgtatcgtatttaccggtgcgttgagtatacatcttcacctggttgtcgatcatctcgtcagatacttcaatcgtataataatctaccttatccttagcacttacttctgccttaaattcaggtgccaaagcaatgtcgaacacgaaatcgaattcatccattgtatcaaaatcaatattctgttgcttttcttcgttaggcaacggttcacccaacatattcaccttattttctttgatataattgtaaatagcctcttgcagtgccttattcactacctcggcaattacagacttgccatacatctttttaacaagacttgcaggaaccatacctttacggaatcccggcatatctaccttttggcggagtgttttcaactctttgtctactttctcctgatagtcggctttctcaagcttcacagtaagctcagcgcttactttgtcaatgttttgtaatgaaacgttcattctgacaattatttatttgatttatactttgttctatgcttaaatgagggtgcaaaattagtgctaatcttttaaatttcaaaagacattgcagatttatttcgtatctatttggaatacccgtgcaacaattcactgacacagagggcttctttgaaaccttcggtatctttttttctcattttcacaaataaaacctacaaaaagatggtcaatccaaaaattatgcttttctttgctgcggattgatggaccattagtttctcgatttgattacaaggtttttacttccgttctaaaaacgcatttgtaaactctctgtcgttttaatccttttattagtaaccatctatccagagagttttattcatttattcattttttatcattttcattatgaacatttatgttggaaaccttaactaccgcgttaaggaaggagatctgcaacaagtgatggaagactacggagcagtatcatcagtcaaagttattatggaccgtgaaaccggtaaatccaaaggattcgctttcatcgaaatggaagacgatgctgcagctgctaaagctatcgctgaattgaacggagctgagtacatgggccgcaccatggtagttaaagaagctagacctaaagcttaaatgccgacgctacatagctaagaaaaaagaaacttctgccacccgatgacagaagtttttttatttcctatatataatcagccttccatattctgtacttccagctccttcaccttacgaagcaagtctgaggcgaaaataaagttattcagacgttcgttggtagaagtgaagatatcgtctttcgtcccttcccactccttgtgaccttcataaatataaatcaccttctcaccgattcccaaaacggaattcatgtcatgcgtattaataatggtggtcatattatattcctgagtgatgtcatgaatcaagtcatcaatcaccaatgaggttttcgggtctagtcccgagttcggctcgtcgcagaacaaatattgcggattcaaagaaatagcacgtgcaatagctacacgtttctgcatacctccactgatttctccgggatacttgtctttcgcttcggacaggttgacacgatccaggcagaacatagcccgtttggtacggtcgcgcaacgtatcgttgctaaacatattcaaaggaaacatcacattatccaacaccgacatggaatcgaaaagagccgcactctggaagatcattcccatctccttgcgaagcatctttttctctttcttccccatcagcacaaggttacgtccgtcatacaagacctcccctttctccggtgtgagcaaccccacaatacatttcatcaacaccgtctttccggacccactctgaccgataatcaagttcgtctttccgttctcaaaagttgcattgatatcactcaatactgttttgtcatcaaatgatttataaagtcctttaatatcaatcatcccatcaaaagtttagttaataccaagtccgcaaacaaaatcaacacactgctggatactacggaatccgtcgaggcttttcccacagcaatcgaaccaccatccaccgtatatccgaagaaagcggatacacttgcaatgataaaggcgaagaagagagatttgatgatacccgcccagataaaccattcgttaaacatatattgcaaaccatattccagatcgacggcattcatcacaccggcaaaccaacaggtacaaaaagcaccgataatcccggcaaaaatactgaacgtcaccaatataggaataacagtcaccattgctgtaattttaggcaatatcagataattggccgaattgactcccatgatttcaagcgcgtcgatctgctgtgtcacccgcatggttcccagttccgaagcaatattcgatccgacctttcccgcaagaatcagacacatgatagaagaagaaaactccaacaacataatctcacgtgtcacatatcccactgtccaacggggcatccacggactttcgatattcaacttaatctgaatggtaatcaccgcgccgatgaaaaacgaaatcagcaggacgataccgatggagtttacacctagctgctccaactcgtttaggtattgccggaaaaacatacgcatccgctcgggacgggaaaaagtccgccccatcagcataaaatatcttccgacggttctcaatgcttttatcataactcacactatttgtctgcaaatgtacattatttcagcttatttttactacatttgccgcaaaataactagaatatggcagaaagcaagatggtgctccgcacggaagacctggttaagaagtacggtaaacggaccgttgtaagccacgtttccatcaatgtgaagcaaggtgagattgtaggtttgctgggaccgaatggtgccggtaagacgacttcattctatatgaccgtcgggttgattacccctaatgaaggccgtatcttcctcgacgacttggagattaccaaatatccagtttacaaacgggcacaaacgggaatcggataccttgcacaggaagcctccgtattccgccagatgagcgtggaagacaatattgctgctgtgctcgagatgaccaacaagcctaaagagtatcagaaggaaaagctcgaaagtctgatagcagaattccgtctgcaaaaggtgcgcaagaacaagggtaaccagctgtccggtggcgaacgccgtcgtacggaaatcgcacgttgccttgccattgaccctaaattcatcatgcttgacgaaccatttgccggtgtcgacccgatagctgtagaagacatccaacagattgtatggaaactgaaagataaaaatatcggtatcctgattaccgaccataacgtacaggaaacacttagcattaccgaccgcgcctatctactgtttgaaggaaagattctttttcaaggcacgccggaagaattgtcggagaaccagattgtgcgtgaaaagtacttgagtaatagtttcgtactacgccgcaaagatttccaattggaaaaataggttcaccacagaggacgcagaggacacagagggaaataatggatttatccgaaataatcaaaaatgattcggtgagtatctcataatatctccaatcataaaaagggatattcctaaaataataaaatttaaggcaactacttcattgcgaattagttgccttttttgtatctttaagcattcccccccaaaaacggtttgacggccaaaacgggggtaatctaaaataaaaacacatggtaaagatacaaaaaatctcagaaatcgaaccttgtttaggttttaccgagttcgatatgcttaaaaaatatcgtcaaagttttgcaacgagtgaattaggtcgactccattctctattccctttctcggaactggcccgacaaatgcatttgaagtcctctgctttggggcgtaaaagttatttttctcccgaaggtaaaatagccttgatggtcttgaagtcctataccaacttttccgatgcacaactgattgagcatttaaacggtaatattcattaccagttgttttgtggtgttcagattgatccgcttcatccactgaccaatcctaaaatcgttagtgcaattcgtcaggaactagcggatcgccttgacgttgagtccctccagttcattcttgccgagcattggaaaccttatcttgagaaccttcatgtctgtatgaccgatgccacctgttatgaaagtcatctgcgttttcctactgataccaaactcttatgggaaggtattgtatggcttcatcgtcatctgtgcaaacattgccagaccttgcacatacaacgtccccgtaacaagtatcttgatgtacgccgtgcctatcttgcttatagcaaactgcgtaaacgcaggaaatcacagactcgtatgattacacgaaggttacttcagttattggaaaagttacttgaccagctggagcaacttcattcatcctacaggaacaggcttgcactatcctctgattaccaaagacgtttctcggtcatacagacagtccttgagcaagggaagaatttatttgcaggcaaaaaagtgtccaaccgtatcgtgagtatcgaccggcattaccttcgccccattatcagaggcaaggaaaccaaatccgttgaattcggagccaaagtcaacaatatacagatagacggaatctcctttatagaacatatctcctttaaggcttttaacgaaggagtacgtttgaaagactgtattcatctgcaacaacaactgaccggggttagggttaaggcgcttgcggcggattcaatctatgccaataatgccaaccggaaattttgtacaaaatatcatataagtacttcctttaagcgtaagggcagagctgccaaagatgagccgcttcggaaaatcttacggtcggaactcagccgtgaaagagctacccgcctggaaggaagttttggaacgcagaaacaacattactcactggccaggataaaagctagaaacaggaaaacggaagtactttggattttctttgggatacatacagccaatgcggtatgtatgatagaaaaggtcgaaaagaaaaaaagaaaggcagcataatctgactaaaataacaggaaaaacaggagaggttttaacttcccctaaaaaagacatgtacataatgcatgggtgggaaggaaaaaacaagaatatgtaaacaatattctacaaaaaagttagaagactgggagagttgaacgaaaaaatcaagagaaaagctcacgtaaagcaaagcttttctcttgattttttagaaagaggaacatttactgaatatccctaaaaaagcaaccgactcttatgaatcggttgctttttatattaaacctctgcgttctctgtgtcctctgtggtgagtcttatttctgacggatatagatattaatcggtgtgcctgtcagattccacttttcgcgcattttgttttccaagaaacgtttgtaaggctccttcacgtactgaggcaagttggcaaaatagacaaatgaaggtacttgcgtattcggcaactgtgtgatatatttaatcttgatatacttacctttatttgaaggaggtggatatgcctcgatcaacggaagcatttcttcattcagacgggcggtcggtatctttgttgtacggttctcgtatacgttacgggcttcttcaagcactttcaggatacgctgtttagtcagcgccgaagcaaaaataatcgggaaatcgacaaacggggcaaaacgcgaacggacagcttcctcaaatgttttctgtactttcactgatttatcctccaccaaatcccatttattgattaccactaccagccctttttggttcttctgaatcaaagagaagatattcaagtcctggctttctatacctcttgtagcatccagcattagaatacacacatccgaaccttcgatggcacgaatagaacgaataaccgagtaatattccaaatcctcattgaccttgctctttttacggataccggccgtatctaccagataaaaatcaaagccgaacttattgtaacgggtataaatagaatcgcgggtcgttcccgcaatctctgtcacgatattacggtcttcaccgataaaagcattcacaatagaagacttaccggcgttcggacggcctaccactgcaaaacggggaatatcatcatccagaatctccgacgtttctttcttgaatttactgacaatcaaatccatcaaatcaccagttccacttccggttatggcagaaacacaatacggatcccccaatcccaatttatagaattccggagcattatattgtaactcatgattatccgtcttgttggcaaccattatcaccggacttttcgcacggcgcaagatagctgctacctgcatatccaaatcagtcactccgttcatcacatccactacaaacagaataacatccgcttcttctacagccagcaatacttgtttacgaatctcttcttcaaagatatcatccgagtttaccacccatcctccggtgtccaccaccgaaaactcacggcccagccactcagacttaccatattgtctgtcgcgggtcgtccccgcagcttcattcacaatagcctgacgagtcttcgtcagacggttaaataaggtagacttgcccacattggggcgtcctacaattgcaactaaatttcccatagttcaataccttgtttttcacgactatcacagtcgcatgaatactcttaatctaactgataaccaaaattacgcaactctttatccgaactgcgccaatccttatcaactttcacatacgtctccaagaagattgtctttccgaagaaacgctccaattcacggcgagcctcagtagcaacctttttcaacgcctttccctgtttgccgatgataattcccttctgcgattcacgttccacatagatgactgcccgtatatgaatcttcttggcttcttccttgaattcttccacagccacctctaccgaatagggaatctccttgtcgtaatacaacaaaatcttttcccggataatctcgttcacaaagaaacgggcaggtttgtccgtccactggtccttcccgaaataaggaggggaatccggcaacaattccttgatcctcttcatcacgtaatccacgttgaacttagaagctgcggaaatcggaataatctcggcctgcggaagcagttccttccaatcctccaccaacttgaccagcttctcctggtcggtaaggtcaatcttgttaatgagcaacaatacaggcaccgtcatctgacgcacctttgccataaactcattattcttatccggcgtctctaccacatccgtcacataaagcaagatatccgcatccgtcaatgccgaagtagaaaagttcaacatagactcctgaagtttgtaattaggtttcaatactcccggagtatcagaaaaaactatctgcatctcatccgtattatagattcccataatccggtgacgagtagtctgcgctttgaaggtagcgatcgaaatacgttcacccaccaaagcattcattaatgtcgattttccgacattcggatttcctacgatgttcacaaaaccagctttatgcatttctcttcattttattggttgagacaaaaaaacgcatcgaatcgaaataggatgcgtttttgagtgttatagttcagtaacttttgttacttattccttctttccgtcataaccccacttcacgtataccgcaccccatgtaaatccggcgccgaatgcagtgaagatgatgttatcgcctttcttgagtttatcctcaaaatcccaaatacacaaaggaagcgtaccggcactagtgttaccgtaatgttcgatatttaccagcactttatccatcggcacttccatgcgatgggctactgcctcgatgatacggacatttgcctgatgcggcacaatccagtcgatattatcttttgtcagtccattcttttccgcgattgcagcagaaacatccgacatactggaaacagcatatttgaacactgttcttccttcctgatgcagataatgcattttattgtctactgtgaaataagacggaggacaaaccgacccgccggctttcatgtgtaggaaaggcaatcctttaccatccgttctcagtatcgaatccataatacccacatcttccgtagtcggctccaccataaaagcggcagcaccgtcaccaaagataggacaggtagcacgatctgtatagttgaccatcgacgacatcttatcggcaccgacgatgataattttcttatatcttcccgaacgaataaaattcgcagccgtctccatcaaatagagaaaaccgctacaagcagcctgcaagtcgaaagcaaatgcatttttcagtccgagtttatcgcaaagaatagaagctgtagaagggaagtgatagtcaggagtactagtagcaacaacaaccaaatcaatatcatcaggattggcgccagtttttttcatcaactgtttggcagccttacgcgccatatacgaactgcctaatccttcctcattcagaatgtgtctttcttttactccaatacgagtcataatccattcgtcgttggtatccaccatctttgatatctcgtcgttagtcaagatataatccggaacgtatccaccgactcctgtgattactgcatttattttttccatcaaacctattttaaattagcaatactataatacttaaagcagccggagagatttaccctcaggctgttttcagtatgactgtactaattatacagctgcttctttctcgatagcaagcttacctctgtaataaccgcaagcgccacatacagtgtggtaaacatgccattcaccgcaattcggacagatagccaatgtaggagctaccgccttatcgtgagttcttctcttcgcttgtctcgtacttgattgtcttctcttaggatgtgccattttcttaaaactttaattattatctaatattttttttaattcattccagcgaggatcgatttgttcctccacttcttcctctattacgatgtcttcgccaccacctgcatcgaagctgtcatctacatcgctatcctcattcgcatttgtcttcaaatgcttattcaatttactagtcattgctttattgcacttaccgggagcatgtatatgcttcatcggaatagcgagcgcaataaactcatacatgaaccatgctacgttgatttctccttcctcttcgggaatcacgataaggttatctccctcctccgcatattcatgtccaaatttcaccatcagcttatcagaagagctgataggcaactccatatcatccagacaacggtcgcatggtacccataccattccatccgtctgaaaactcagctcgaaagcacgagaggttctttttacggtcaatgtaacattcacctttcctttctgaacttcaggaccatcaatgtgagcgaagtaaaggttatccaacacaaactcatacttagcagagtctgcctgcatacctttcaagtcaattttgtatttatcaaattttcccaaagcttctctctttttaaaatcgttagcttacaattcgggcgacaaagatacaaataaatatcctcataacatacaaattatcagtaaatattcacttttttaataggtattatgaagaaaaacagaaagcctcgcccgtcaatagacaagcgaggcttcttaaaaaatggcggctacctactctcccactgttacgcagtaccatcggcgtgacgaggcttaacttctctgttcggaatgggaagaggtggaaccctcgtgctataaccacctgaagaaattcaataaggttatgacatgatgaaaagtaaaacttcagtgtctggcaagctaaacgtatatatcgcgccccgtacatgtccgaaagaaagtgaacgggcaattagtaatgctcggctgtgatgttaccacctttacacctgcatcctatcaacgtcatcgtctttgacgaccctaagaaatctaatcttgtggctggcttcgtacttagatgctttcagcacttatccaatcccgacttagatacccagcaatgcacctggcggcacaactggtaaaccagaggtcagtccaacacggtcctctcgtactagtgtcagagccacgcaaatttcatacgcccacgatagatagagaccgaactgtctcacgacgttctgaacccagctcgcgtgccactttaatgggcgaacagcccaacccttgggaccttctccagccccaggatgtgacgagccgacatcgaggtgccaaacccctccgtcgatatgagctcttgggagggatcagcctgttatccccggagtaccttttatcctttgagcgatgtcccttccatgcggaaacaccggatcactatgctctagtttcctacctgatcgacttgtatgtctcccagtcaagcgcccttatgccattacactctacggacggttaccaatcgtcctgagggcacctttagaagcctccgttacacttttggaggcgaccaccccagtcaaactacccaccaaacagtgtccccgtaccacgggttagaactcaaataatcaaagggccgtatttcaacagcgactccacaaatactggcgtacctgcttcaaagtctccggcctatcctacacatcaattacccaaattcaatgttaagctatagtaaaggttcacggggtcttttcgtcccatcgcgggtaatcggcatcttcaccgatactacaatttcactgagctcacggttgagacagtgtccagatcattacaccattcgtgcaggtcggaacttacccgacaaggaatttcgctaccttaggaccgttatagttacggccgccgtttactggggcttcaattcaatgcttctcttgcgatgacatctcctcttaaccttccagcaccgggcaggtgtcaggctgtatacgtaatctttcaatttagcacagccctgtgtttttgttaaacagttgcctggacctattctctgcgcccaactctcgttgggaccctttatcccgaagttacagggtcaatttgcctagttccttaaccgtgaatcactcaagcgccttagtatattcaacccgactacgtgtgtccgtttgcggtacgggtaccttaaagattaagtttagcggattttcttgggagtatgcttacacgcactattaccttattccgaagaatttggtatactatcaggttcgactctctttgtggatttgcctgcaaagatcaacatctacacccttcaacggactattccgtcagtccgcggcgctgtcacgactccgtctccacgtcactccttaaggtagtacaggaatattaacctgttctgccatcggcatcaccgttcggctgagccttaggacccgactaaccctgatccgattagcgttgatcaggaaaccttagtctttcggcgagggggtttctcaccccctttatcgttacttatacctacatttgcttttccacacgctccagcaaagctcacgcttcaccttcgacgcagagtggaatgctcccctaccgatgtttacacatcccatagcttcggtaaattgcttaatgcccgattattatccacgccaaactcctcgactagtgagctgttacgcactctttaaatgaatggctgcttccaagccaacatcctagctgtcttagcaatctgacttcgttagttcaacttagcaattatttcgggaccttagctgatggtccggattcttctcctttaggacatggaccttagcacccatgccctcactcccgggatagaactactgcgcattcggagtttatcaagacttgataggcggtgaagccctcgcatcttatcagtcgctctacctcacagtagtaattcccgaggctgcacctaaatgcatttcggggagtacgagctatctccaagtttgattagcctttcacccccaccctcagttcatccggaagcttttcaacgcttatcggttcggtcctccagttagtgttacctaaccttcaacctgaccaagggtagatcacttggtttcgcgtctactccttccgactagtcgccctattaagactcgctttcgcttcggctacacatttttaaatgcttaaccttgccggaaaaagtaactcgtaggttcattatgcaaaaggcacgccgtcacttcttacgaagctccgaccgcttgtaggcgcacggtttcagggactatttcactcttctgttcgaagtgcttttcacctttccttcacagtactggttcgctatcggtctctcgggagtatttagccttaccggatggtcccggctgattcacgcaagatttctcgtgtcccgcgctactcaggataccactacgcttcgtttagcttcgaataccggactatcaccgtctatggtcccattttccaaagggttcttctcactaaatttcttgcgacatcgtggtcctacaaccccaatattgccgtaacaacattggtttgggctaatccccgttcgctcgccactacttggggaatcattattattttcttttcctgcaggtactaagatgtttcagttccctgcgttagcctcttgccatgcaagatgtcattccttcagaatgacgggttgtcccattcggaaatcttcggatcaaaggttatttgcacctacccgaagcttatcgcagcttatcacgtccttcatcgcctccgagagccaaggcatccgccatgcgcccttgattactttctttcaaactgacttccaggcatatttaactattgctagtctgtataccggaaacgtacggttcgatatatacttttagctcttactaaaattttactttttgtatcatcatgtcaaagatcgtttctcttttcagagatcgtggagaataacggattcgaaccgttgaccctctgcgtgcaaggcagatgctctagccagctgagctaatcccccaagaggttattcaagaatgttgtttttagtttttagctttttactctcactattcctccttcttgagcttggtagtcccaggcagagttgaactgccgacctctacattatcagtgtagcgctctaaccaactgagctataggactagttcaaccttgtctacctttcgtctagactcggcttcttttttctcttgtttatctctatctataatactatagatggttgatctatatctataaataaacaagtaccagtagtacaaaaaacagaacctttaaagtctataagtgactgtcacggttatgacagttacggcatcgctccagaaaggaggtgttccagccgcaccttccggtacggctaccttgttacgacttagccccaattaccagttttaccctaggacgctcctcgcggttacgtacttcaggtacccccggctttcatggcttgacgggcggtgtgtacaaggcccgggaacgtattcaccgcgccatggctgatgcgcgattactagcgaatccagcttcacgaagtcgggttgcagacttcgatccgaactgagagaggtttttgggattagcatcctgtcaccaggtagctgccttctgtaccccccattgtaacacgtgtgtagccccggacgtaagggccgtgctgatttgacgtcatccccaccttcctcacatcttacgacggcagtctctccagagtcctcagcatgacctgttagtaactgaagataagggttgcgctcgttatggcacttaagccgacacctcacggcacgagctgacgacaaccatgcagcaccttcacatttgccttacggctaacctgtttccagattattcaaatgtaatttaagcccgggtaaggttcctcgcgtatcatcgaattaaaccacatgttcctccgcttgtgcgggcccccgtcaattcctttgagtttcaccgttgccggcgtactccccaggtggaatacttaacgctttcgcttggccgcttaccgtatatcgcaaacagcgagtattcatcgtttactgtgtggactaccagggtatctaatcctgtttgatacccacactttcgagcatcagtgtcagttgcagtccagtgagctgccttcgcaatcggagttcttcgtgatatctaagcatttcaccgctacaccacgaattccgcccacctctactgtactcaagactgccagtatcaactgcaattttacggttgagccgcaaactttcacaactgacttaacaatccacctacgctccctttaaacccaataaatccggataacgctcggatcctccgtattaccgcggctgctggcacggagttagccgatccttattcatacggtacatacaaaaatccacacgtggaccactttattcccgtataaaagaagtttacaacccatagggcagtcatccttcacgctacttggctggttcagactctcgtccattgaccaatattcctcactgctgcctcccgtaggagtttggaccgtgtctcagttccaatgtgggggaccttcctctcagaacccctatccatcgctgtcttggtgggccgttaccccgccaacaaactaatggaacgcatccccatcgataaccgaaattctttaataggatcatcatgcgataatcctatgccatccggtattaatctttctttcgaaaggctatccctgagttatcggcaggttggatacgtgttactcacccgtgcgccggtcgccatctttagtttgcaagcaaactaaaatgctgcccctcgacttgcatgtgttaagcctgtagctagcgttcatcctgagccaggatcaaactcttcattgtaaaagtatcttttcatctgttaagatgattttcttgctctgttcaggatgccgtacaatttattgactctatcttatatacctatatttattatataagcattgacggttctattttaatcttgtactacttgtattgtttatcaatatttcaaagaacttgcgcttcgttttcaaaagcgggtgcaaaggtaaggggttttattttaactgccaaacttttcggaagtttttttcatttttctttttcggttcgtttctcaggctctcttagcgaaagggaaagaagggacgaaaacgataaacggaaaaccgcgtctctttgcaaatcggactgcaaatataagaactttatttattataatccaaacttttccggatcttttttgttcttaaagtaaagcggtcctacgctttgtcattaagtcaattctgcaaggctgtcctctcttggaaagcgggtgcaaaagtacccgcttttcggatataatccaaatatattcaactatttttttgaagtttttttggaaaaggaaagataaaccgctgaaacataacgaagtgacgggacgttttttttaagaatggacggggcggggaaaaaggctggaagggaaggcacattattatattcatgcgtgcgtatgtgtgcgcgagagggagaaaaagaaggaagcgggcagggcggatatacacagaagtttttcgcacttccctctatcacctatcaccggcaatcatgaacatccctgttcatcggaatttaaggtatggtgacaggttgtccgcaacctatcaccgcatctgtcacctatcaccggaaggcagatgatggataaaaaccataaactatagatattcagcatattaactgcataaatacaggatataaagaaccaatatataggatattaataactcacatataggatattaacaacctatgtacagggtttaatactcaatacatagcctattaatgcctgagaagacaggcagttatgactgaaaagcaagtatcaagagccgaaagagagtacaagaacagactgtttcaagtaacagaaaatgttgtttcaccacaggataccagaagttcaagcaaatgaaactagaggttcaagcaggggaaactaaagtttcaggcagaggaaactggagtttcaagagggggaaactaaagtttcatacgcaggaaacacttggtgaaaagcaggatggcaaagacagtgcgtaaggataagtaaggggaagtgtaaggatgagcgagggaaaggtgtaggatacaccgcatctgcaaccatcctacaccactatcctacacactattaatatactagtattcaacaatataaggtgcgattggtgtaggatggcagatgattttcaatttttttcgcactgaactccactcctactttgatcaactcacgcctgtctgcctgataaggaatcagatagcctttttcatcaatctacaaatccaacacacaataactaaaaccagcaaaataattccgtaccaatacccgcttccgattgtcctattagtagctttctcaacttccgttttatgaatctccgtcttagaattcgtatccgacaagctctcagactgtaaatttaccgcttgaagaagttgtttttcattaacgtttttcctatccaccacagtctttaccaccatcccagccttcaatccaaacgtatcaacaggaaatacaagcaccacctgctcgatacgctcctccaccacctccgaatctttttccgaagcaacctcatttttaacaagacttttcccagagctaatattcaaacttgaatcaaccctaatttcactctccctttttactacctctttcttactcctacaccccgacaacaacacaagcacaactaagggcaccagcaacacaaacaacaatcccctcccgtacctcagaaactcccttacatcaaaacagggacaagccttcacatattcataaggttcaatcactccgtcaccattcaaatccggtgaagtatcccgatgtcccaacatttggagaatattatattcccgctgcaaatccataataatctgataaagcacccggttttgaacattcgtccgggtatctgtcggacgcccgttctcatccaatccaccgatataacatatcccgatacttcactcattccaacccttacaataagcaccagctacttttggggtgcttacttgttcactttaagtaaataagagtaaacaagtatgcattttatatagacacgaaatctatgagccccgattagttcaataaatactaatttgcagaaaatattctaattatcttaaaccaatattgcaaatcaaaacaatatctgagatcagtctgtgactttgaaactgaaaatcgcaaccgaatgagcaggtatttttatcgtaacatgtggacaaattactttcgtttcgacagtgtcgggaataattcgcattggattgtcaagcgagttatcacagtcaagaaggctatgaaccttgtcggcaccatagttgacattttccaaaggtatgctatcgaataccgataacatagtggtaatcattgtgtattcaccactcataccctttagtttaattgaagtttgagtgtctttttcaccagtatttaccattttcacaattactgcatcattgtcatctttatctgcaactgcacttgcatatattttttcggaatttccagtaactttaatagggagcacatgcgttccacgattagtggaaaatagttgctgaacataatatgacgaagtgcataccgagcgcaaattatcaaaccatatcatgtcgggacgccattgccaaccgtcgatatgggcaaatagtggtgcataagttgccattctcacgacatctgcatttctttcgagtccagtcatgaatgcggcttcgcaaatagcagaataataacggttccacttctttcccgtgccatggcaggcatattctccagcaaatacttttggaccttttcgtgggaaattatcatagcgattgactccggagagaaagaattcttcgtccttatagaaatgttcatccacaagatctacgccgactctgcgcatttccgcccaaaggtcgtcatattcttttccgtcaggccaaggtcctgacgaacctatgattttaatttgaggatataatttacggattggctccataaaagccttgagcattggtgcataccattctccccactgctcgtttccaatgccgaggtatttgaggttgaatggtgtcggatgccccatctctgctcttattttagcccattcattcttttcggggtcaccattgcagaactcgataaggtcaatagcatcctgtatgaactctttcaaactatcaccctgtgctaaccatgaaccttttttagtaatatcgttattgaactgacatgccatgccacagctaatcacaggaagaggctccgctccaatttcttcgcaaaactgaaagaattcaaagaagccgagaccataggactggtaatagtcaaaatgtgtacgctccttaccatagttccagcgagtttcattcaacgggcggttttctaccgtgccgatactatgtttccagttgtatcttgtgtcgagagtagctccttccactatacaaccgccggggaaacgcatcacgcccggttttagatttgcaagatgttgcgcaaggtctttgcgcaatccgttttcatgaccatgccaagtattcacgggaaacaggctgatatgctcgacatctacaggaacggttcctttaagaaacaccgtgagtgacgcttttttaatcgtgtacggagttgtgagtacaacggtgtatttactccattcactgccacatacgttaatatcggtctcacatgatgtaaaattttcttcttgcgaatcgagatcacgcagtccaatattcaactgcgcctcaccatcctcgggaactcttgcccataccgtaaacctatactgttctccaccaaggagcgacataccaagaaaaccccggttttcaataccagttgccatgtcgcgcttgccgctatacgataatctaacataatgtggacagcgattgaatgggccgtcgtccttcactaccacatcgccgatagtgttccatcccataagtggttgtgggtattcaaacgacctgttttttatcaattcaccatacaatccaccatctgcaccatagttgatatcttcaaagaagactccatacattgtcggagcgatttctgccccttttttattagtgttaatttccaacaccacgttttgtgcttccgcttgagtaaaacaagcgatgaagcagagagtgtaaaacagtatttgaaagttcatattcttaattttatcactttattatctctgacagataatgttcgcggagtttctttacatggcacttgccagtgagcacgatttcctgctcccgacgtatatcttgcgatgaagcggccgcttttatcatatagtgtcccggtgctatgttccattgtccatcgtcaaaatatcccagctgttctgggaaaagtctgaatctcactgtttgtttttctccggccttgaggcttacccgtgcaaagccttggagttggataggctttagatgtgactttctgtcagttggagaaacatagatctgtaccacttcgtcagcatcaaccttacccgcattttttacatcaacgtctaaattgaacgattcggcagtggttgcgacttgcctgtccatccgcatttcgccatattcaaaagaagtatagctcaaaccataaccgaatggccatgcaatacgaggatcgttatctaagccataattgtaacagataggctcatggatttcaacagcagggtaacttacacaaagtctgcccgatggagagacattcccaaagagaatatcggcaacagcatttcctccttcttcgcccggataccaagcctgaagcactgccgtgcatttctttgccaaattgctgattacttgtgcgcgtccaccaaatacaacaagtatcacaggttttcccgtagcaacaagtgcatttacatattcttcctgccgtccggggagagtgagtttggtacgatcgcggttttctccgctaagcatcacattctcgcccatcgccgcaacaattacatcgcactgatgggccatccgtagtgcttcatcccaatcggcaaattcatgactatcaaccatgcgtctgtcaatttttctctgttctgctactcgggggtctccacccacttccattaccgtctccggcacttctgtccagtcacatccgcgagagtatatgagtgtagctcctttgggcattctctgttccataccgtctttcaaaagcacatatttgggacgatatgcgctctcctctttgtttttccaaaaatagcgcatagcctggaatgtatagtcgccggcaagtgcccacatggaattagcattaggaccggtgagcatcactcgaccacccaaagccgaaagtttttcggcagtaagaggcaacagcgtttccttatttccatctacattgccatttttcagcaatacgatagattgagtggcaagttgataagaagtggtacgctcttcatcagtatcgaattctatatgccttttgctgtaaagccttgcggcattgtcaagcataccgagctttgccttcagcatcagcacatgttttacagccttttccaatgtggattcactgacaagacctttgtccaatgcctcagaaatatgggcataagtgtcgccagtcggaaaatccacttcattaccggcattcatcgccgaagcacacaacaccaacgatgagagcgaatccccaatctgcgggatggagccgtaatcactaacagtgagtccgtcgaatcccacatacatgcgtaacaaatcctgttgaagccacttgttagccacacattttatgtcattgattgtatggtagccggtcatcaccacctgactgcccgccgtgcggatgatggcctcgtgcggtagaagtatctcctccataagctctttctcggatgagtttcccccaccgccgtagccaagaaaatgctttgtacaggctgcaacaccttcatgcaaatttccattgtgttgcagaccattcacgaaagcaacacccatggcagccgacaaatagccatcttctccgtaagattcctccagacggttgaacgatggggtgcgaaccacatccaccattggagagagggcaagcagccctcccatgtcacgaagggcagtagcggtgagccgggtcttcttttcagccagcccagtgttgaacgtacatgccatacctatttgttgaggatagacagtggcatccaaagcgtttatccctgagagtgcctcttcatgaacgagtgcaggaatatgattgggcgtattttcaatcagccatttttgcagctgggctaccatatcgcgttgctcatcgggtgattttcccaaatccatggcaaactggggtatatgccctataccgtcaggaatcaactccttgcatttcgcctcatcaattttaccatccggcgtgaataattccgatatatagctgcttctcaactgagccacgcgttcggcccggctcattctattatagagccgatccacacgttgttctaatgtcattgcactgtatgcagtcatagaaatacaaaacatggcaaccattattttgatgacaagtctcattattgatgcgattagtagttaaacttcactttgccatgaatgtcggctgccgatgctccgacataaacagtgaaagtgccgggttctgctacccattcatgcttttcctcatcaaaaaatttcaggtcatcgtcgtcgatagtataagaaatcagctttgtctctcccggcgcaagagctactttttcgaaatgtttaagttccttcatggggcggattacggatgctttgtcatcacccacatagaactgcaccacttcttgccctaagacttttccgctgttacgcaccgataccgatactgtgcgtccgctaatcgtgggtttgccgtaactgaatgtagtgtaactcaagccgaagccaaaaggaaagcgcaccttcgtcttgaagtagtcaaaccagcgataacctaagagaatgtcttcgccatatatttcagtttcatctttcattgacccgttgcctggctcgtcgcagaaattgatacctttccagccttctacagcagctttcagcagtctggcggaagtcatcggtttcccctcttcaccgccaaaaggttgaggcaatttgtctggtgatactccgggatagcctacagcgcccattttgtgggcagggtagtcggtaagctgataggcaattgagaacggaagttttcctgacgggcacacatcacccgaaattatatctgccaaagcgtgtccggcttcgctgccaagataccaagattgcaccagtgccggagttttgtcaatccaaggcatctcgtatgcatttccgctcacaatcaccaatacggtattgctgttgacggcaagcagttctgtaatgagacggtcttgaccgaaaggtagttgataatgttcacggtcgccgccttcacagtcctgagtatgattcttgttcaggccgcctacatagataacataatccgctttttttgctttttcaacagcttcattccggagcgaatcataaagggattgtggcaaaacatccacttctccgaacattgcgcgtcccgattcatagccttttgtatattccacgatgcatctgtcaccgaaccgctcctcgatgccacgcagtggcgacacttcatcgtgaggcttgagttcactcgatcctccgcctgcgcataaactgcgagtggcattttcgcctaccaccaggattttcatcttatccttaggagcaagggggagaataccattatttttcaacaacactataccttcctgtgctatcttacgtgcagcagcaacatgttcgggagaattcattgcgccaaagccccgattggcggccattccggtacgaagtatcagacgaagcatacgtctggctttgtcattgattatcgaatcggggacttcgcctttacgacatttttcaagataagctctaccaagatagtaatcatcgtatgagcttatcggtacttccgtagaaagaccgtctgtaaaactacccatttcaaggtcaaggccattgaaaatggcttcatttgtgttgtgcgcagccccccagtcagtaattacagctccgtcgaatccccactcattcttcagaatatcgttaatcagacgagcattatgagttgcgtgctggttgagatattggttgtagctacccattatgctccatgcccccccttcagtcacagccgcatgaaatggacgcaaataaagttcgtatatagctcggtcagatactcgtacatccacatgattgcggaagttctcctgttcgttgagcgcataatgctttacgcagcatgccacaccatttgattgaagcccttgaatatatggcacgcacattcgcgaagcgagatatggatcctctcccatatattcaaagttgcgaccgttaaggggtgtgcggtataaattcactccaggacccaacagcaccgtcttattacggtaacgtgcctcttcgccgaccattttcccgtaaagagatgccaactgcggctgccatgtggcagcgaggcaagtcaaagcgggaaaagccgtacatgaatcattggtccagccggcgtggtcccagttgttccagttaatctccatcctcacgccatgaggcccgtcgctggtatagacctcagtgacacccaagcgcggtacgcccggacttgaaaatttcgattgtgcataactgaggcgtaccttctcctcaagagtcatcttattcagaagcatttctaccattgcctcaatatcattgtcattgctgtttgcagcatttgaagttaacacacctaacataaaaataaagaaaaaaagaatctttttcatgccttatgatttttgattgataatttacaaacgggatgagcaaccacgctttgtacggtattatttcttcacaatctttgtgatttctgtaatcgtatagccgttccctacaaaaatagctccctcctgttcgttcataatctccatggagaagtcagcaagtgtaaattccaaagacatagagccgttaatcataatatcatcgcgttcagggtcaccttttcctgtaaggatgttattccacgaaccggtagtcatagtgccctgtccttcaccggtaacatatacgcggacgatatcaccggccttcactaaatccttaaactgagtctggagcaagttgaacggtgtatcccatgtgacattgaactcgccttcccaaagagtctcttcagcagcaggagcttcatcgctgactacaatcttatcgccaccataaacattgccatcgctatcggtgagagtaatgcgataggtacctagggcaaggtcggcaggtacagtgtatttcacatagctcttattaccattttcgacaaatgtggtagtagcttcctttccccctatcgctatttttactactttatccatgttaacaccatgcaatttcgcagactgacctgcaactacctgacgatcgcgtatgtcgttcccggggattgggtcgctatcgagcgaccgaacaataagtttgccggtacggaatgtggattttccctttgttgtggtagcgataattttcaaaacatattcccccgcaagaaaagtatgctgaattttcgtgccctcgtgtattttctcatcatcaatgagccattcgacggtgatatagagggccggtgtcactgtgacagagtcaataaactcaatatcgcgagagatattcttgtacacagccggttcaccgttctcccactcaccgaaccatggaaggagaatttgaggaaagtcatcctcagtagccgtgataaacccatcgttatcttcagagcaggagcaaaacattcctatagagagaaccgccatcgctgctaccaaattgtataatatttttttcatcttaaattaaattttaatccctgttccaacctcccccgcaggagaggcagaaaggaggggaatggagaaaaccttaaaacaatttatttacctaagtcattgatatctataaaattttgctcagctgtatcccaccagatacgagtgtgccagttgtcgttaccaccgatacgctctactgcttccttatagtttacgctgttgtatttagcttcaagcagcggatagcgcaagcgtactggagtctgcatattcgggtcttcgtgaggaaaatcaccacggacaggaagcagagtacggtcagcaagcgcaggatagtcagaccgacggagatttgcccaaccttcgctcgggtttgtaagatggagaatccacgcttgagtgttgatagcctcacggacgttgtcgcccaatgggtttgccgctatatattcatcaatctctgcatcagaaatctttgaaactatatcgtagtagttgtttagcatctgcatggatgcacgaataccggcttcatagtagctctcagcatcgtccggaacatcccaatcctttgacgcggcttcagcaagaaggaattcaacctcggcagaagtaatgagaataccgggacagtcggcatcgcagaatgcgatagcaatagtcggtcgaagcatacgagccggatagttattcttgtcatatcctttgtcaggataaagtttcacaagtgattcaagagtaggaatctcattgtttgtcggaccgtttacccagtcgctccaccaagcatcaccgacattacatggtacgatacccgtgccaccacgttctccccagtctatcacttcgtcagtgacatcaaaattgcctgatgtatcggtttggcttcgtgtggtgtggatgtagcaccgggcgatacggtaaagacgcgggtcattcatcttcttcatataattgaacaatgttgagcagacgaacgaaggtgactccggatcctgaccgtatatcatctcaccaagggcattagccctgaaatcaagatcgttagcaccatcatagagagtgaaaggagcgtcaatgtatttcacgtatgcatcatcctcggctgatgaaataatacccccgtcagcatttagggcagactcaaattcaatgcgggctttttcaggagcgacatctgatatacgcatcgcataacgtagccgaagagtgttggcatacctcttccatgctgctgcatccccccctaaagaagtgacatcgccggagataaggtcagtacctttgtcgagttgtgcggcacacgcttttagctcggaaaaaatgaagtcatagacttcttcctgtgtgtcgtactttgggttggcattgccgttgatataggacattccagcctcagtgcaagggatatctccatagatgtcagaaagtacagccatcatgtaagcccgatggatacgcagcgcggcattggtgtttggcatattctcagaacgatggatagcatctacaaggttcttgatacctattgaataataacgtttccacacataagtcatttctgagtctttgggataaacagctcccgcataattggaaacattccatcccccggcataatactgcgtgaaaccggtaatataactacggtaagtatccatgagggaaaaatctccgtatgtttgtaacagagctgtagtgagctgtgcattcggatcgatagtgcttgcctttgaatcgtcagtgttgacatcctccatataagcatccgagcaagcagacagtcccacaagtgtgagaatcatcactgccgatgctatgtaataatatatttttttcataactgttcagtgtctattagaatttcacatttacattaaaaccgtagctgcggcgtgatgggagcgaaccatactcaagccccaggcctgatgtgttgtagttggaatcagggtcgatgtttggaatattcttccatacaatgaaggggttacgggctacgaatgaaaccgatagtgaccggacaaacttaccgagcatactcgtcgggaaagtatatccgaaagtgatctcacggcatttgatgtaagaattgtcgtagataaaggttgcaggagccttttccgcaacgctcttccaatagttctgtggattcaccgggtatgtgttcttgctgtatgtgccgtcaccgttatcgacaacgccttcggcaatgaagccctcgcacttgccggcagcacgccactgcgcctcggtcataccggctgccttacggacctcctcagaacggtaccactcttcacgaccggcaagcgtcgcgtttgccttaccggttagatatgccgagcgcattgaaaatgaatagaggtcagcacccatctttatatcgaagccgacataaaggtgaaagttcttataagtgaatgttgagtataaaccacctgtccagtcccacgttgagttaccgatagttttgaggttctcgtcataaagaggcagtccggtgttcttatcgatgaggacgtccccatcctcgttgcgcttgaaatccgtaccgagaatagaaccgaaattccttcctacctcagccccgacagatactcctgcccagcttgcatcagccaactggaaataatccatgccctcaacaagattaagtactttgtttgagttctttgagtagttgatacccgcatcccatgcgaagtccttgatttggagtacacggccatagaccgccagctcaatacccttgttctgaatcttaccggcattgataagacgagaagagtatccggcagccgaagatgaagcaagacctataatctgatctttcgatatctggtcgtagaatgtaaagtcaacattcagacgtccattgaagaacttagtttcaaaaccgagttcataagagctcgtcattgtcggcttaagatccttattaggttgcatatcattattaatcataccgatggtgaaaccgggatatgagtattttcctgtcgcatagttcagcgcaagctgatacgggtctgtgtcagaaccgaccttcgcccatgaagcgcgaaccttaccaaaacttaaaatagtctggtccttgatgaatttggagaatacgatacttccggaaaccgaaggataaacataagtgttgttcgctaccggaagcgtggaagaacggtcgccacggagagtaccttcaaggaaatatgtggagagataaccaaggcttgcacttgcaaagagcgaatttatctgtttttggtaggtgtaaggctgtacattctgttctgcgtaattcataattgaaaccacaccatccatctgttggtcagtaccggtaatcgtagttgtcttgttgttcaccttatatatgtttccaccgagagtggcgtttaagtcgaaatcaccccagttgttgttatagagggcaagaatttctgcatttagtgtccggttattaaaaatcgagttggtaagtttacccggaagaacgcccggagtcgtacgggcaatgaaatcctcgaaattcatgtcattgatgtcgcttccgatcgtaccctgaactttcaaatgcttgtttatattgtaaagggcccttcctgtgaagcggaacacattcttccctgttgtattatcgcacttatagagatcccaatacgggttcctgttgtactggtcattaccgttccaacgagcatatgagccatctgcattctggtagttcttaagccattcctgattataggtactcgccaaagtcataagatttttaccgacattgctttgggagtcaccaagggcaggacggttctttacatcctcacgagtatagttcgctgtgaagtcgaaatcaaccggacccgcagaagtatttacacggaggttgaagttgtcacgactcatgtgagtgtttggaagaatgtccttgttacgcatatcggtgaaagagaaacggacacctgtcttaccggagtttacattcaaaacaacagtattctgaaccgtcagacctgtacggaagaatgatgaggcgttgtttggatacatgaggaacgggcgtacagaaccatcataataggttttgtcaatcatatcagccttcactccccaactctggtttgtgccagaagaagcatcaagttggtactgcccgttgtcgcccataccgtagatacgctgaacatcatcccattttgcgagctgggtatcgaaagtgagtgaaccattatactctacggaaatcttatctttatctgctttctttgtagttatgagaattacaccatgtgatgcacgtgagccataaagagcagaagctgccggacccttcagcacagtcatggtttcaatatcatcggggttgatagcagatataccgtcaccaaggtcataacctccctgctcaccggcacttccgaagctggtattgtccaaaggaacaccatcaatcacataaagaggctggttgttaccggtcatctccgttgtaccacggagcataactctggtagaaccggcggcaccgccggtagtgttgctaacaacaagaccggcgactttgccggcaagcgagttcataacattggtttccttcgctttagtcagttcttcaccttttacttcggagagtccataaccaagagccttgcgctcgcgttttataccgagtgcagtcacaaccacttcacccagctccatagagtcttcctcaagttttattttcatattatccttagccttcacacgtaaggttttgtatcctatataggacacctcaagttcatcaccggcactgcacttcaagataaagtttccgtcatgatctgtaatagtaccattggtggttccaaccactttcacagacacaccgatcaaagggcctgatgcatcagagacattccctctcactgtaatctcgaccggttccgctgttatgccaacatccgctcctcttgaaacatttgccataatcggcaacgtcatcaagctcgctacaagcacacacagcactaattttaattgcttcgttttcatgatattattttttggaatttatttagatttggtatcgctcgcatctactttgcactgtctgcgactccctctttaataccttttatcacccagtcagccttaatcgacatgttcttactacggtcgaagatgccgaacatatccgcaccgttgccaaaccggttgttgtcccatacaaaagtggagaatccgcgcttgcgtgcctctgacaccaatgtcttgcagtaataagacatattttcctgcatgtgatcggcttcggaggctttgaaatgattggtaatgccccattcgccaatcactacgcctaatcctttcgcgctccattcatccgccagcttgttgaagaatttaatcatagtattctcgtcactctgtgatgctccatactgtttatatggctcaccccagtaataacattcgccactgccgacatattcccacggattataataatgtaactctacactcatatagtcattgccctctatgtcggtaggaatgatgaagtcgccgttatatagaccataatcggcattgcatgcatacgtctgcactatcaagtgccgctttgcattattcatacctgtggctcgcacgatatcaatgaaagtctgattgtaggcattttgcacattaagattttcggcagtcggttttccccatttatcaggttcatgaacctcgttagtaccggcaaatgctacacggtaatcatatttgttaagttcattggctatgttcaaccatagtaaagctagtttctggcagttctcttccttgttcgcataaagagggcggctctccagccatttttcatgatgtacgttgacaatgactttcagattatactccaaacaccagtctatcacttcctttattctatccatccatatcctgctaatactcatagcagaagggttactgatgtggcattgccatcttacaggtatgcgtatggcattgaatccggcatcacgcacagccttaattgttttttttgtcactaacgggtttccccatgcagtctcagcattgtcagcaccttcgggatcgcctacagctatagactcactatcttgtcctggagcagagcattcaaattggttaccaaggttccatccggcagtaacttcgctgttccattgccgggctgtctgttgggcatgacacagcattgcagcgaacatcagcgataacagatacaaaattctaaagttgattttcatgttattatttatatggtccttaattccgcaacactattacaaatataactttttaagtacctgagcaacaaaaagttgctcaggaatttgccatgtcagatttttcacctatcttagtgttgcaaatcaaaatatgtatcaaacccgacagacatggcaaaggtagcaattaaatccgagaaactcactccttttggaggaatattttcaataatggagcaatttgactccagactctcatctgtaatcgactcaaccctcggtatgagatgcaggctgtatggttatcaatacagcgaaatcatccgttcgcttatgagcgtttatttttgtggcggctcatgcatcgaggatgtcaccactcatctgatgtaccacctttcgcttcatccgacacttcgcacatgcagtgccgacacgattcttagagccataaaggaactgacccaggataacatttcctacacatccgacactggcaagacctacgacttcaacacggcagacaagctgaatacactgctcctcaattgcctattgtccacagggcagctgaaagagggcgaggggtatgacgttgacttcgaccaccagttcatagaggctgagaagtttgatgcgaagcctacatacaagaagttccttggttatcgccctggcgtggcggttattggcaacttgattgtcggcattgagaacagcgacggcaacacaaatgtccgtttccaccagaaggacacgctgaagaggttctttgaaaggtttgaacaaaacaagcttattatcaaccgtttcagagctgattgcggctcgtgttctgaagagatagtggaagagattgctaaacactgcaagaccttctatatccgtgctaaccgatgcagttcgctctacaatgacatctttgccctcagaggttggaagaaagtggaattgggcggcattgagtttgagctggcctccattctcatcgagaaatggaaagggaaggcataccgtcttgtgattcaaagacagaagcggatagacggcgaactcgacctgtgggaaggagaatacacctaccgctgcatccttacaaatgactacgagtcttccgagaaagagattgtcgaattctataacctccgtggagggaaggaacgcatcttcgatgatatgaataacggattcggctggaacaggcttccaaaatcctttatgggagaaaacacggtgtttcttctgcttatggcactcatacgcaacttctataaattcatcatggcgaggcttgacgtgaagaggttcggactcaaagcaacaagccgcatcaagacgtttgtctttaagttcatctctgtgccagccaaatgggtcaggacatcaaggaagtatgtgctgaatatctattcatgcaacaatgcttatgccaatgtgttccagaatgactttggataacaccgacaacttatagtcgtgattttgcgtattgcctcaagtcgcatggtggggtaaggggcatttatatgtctttatggtgacattcgatgcactgtgccccctttttactaacgatgcagattcttttcgcttctgtatcatattaggcgcgtagttgcggatttgaggatggttacaagtttcatggtagttcctgtaatattctcgttagcagaactttcgttgcaaacatagataatattctgcaaaaattggtttgctatctgttgatagtggtttgataggtatctttcgttagaaaacgaaccatatttcacgaggaatcaaaccttttcacgagaacgggagcaatcagatagtcaattttggataaatctggcataaaaaagacaccttcctcatctgaagaaggtgtcttgatatcgactggaacaaatagctatcctttaatccaacaccgttttacttgaattttgacggcgagataccgaagtatttcttgaatgcagtactaaaatacttggagttatcgaaacccacttccccggctactttaccaacatggtgtccagaacgtagcaagacagcagcacgctcaagacgtactacacggataaactcctggggtgattttcccgtatatgacttcagccttacataaaacattgtacgactcattgccatttctctacatagacaatcgatggtaaattccgaatccgagatatgcttaaggagatgtttgatcacagtatctacaaaagctgaattttgtttagtgattgttgcagtatcacattctttgcaatcatcaagctgaatttctttatctgtagaaatatccaacttaacttcatcttgtttttgttcagattgggaagtcgcagtgttatcctgttccaaagcactcaccacaagacgcatataccgggtgtgtagaccgtatgtccaccaagctccatagaacagcaatacaattaatgagctgtaaatacaccacatccaccacgagttccaccatggacggctaatagtgattaccagtttctgctcaccaagtacaacgcgattggccttgcttaccgcacgtactataagatgatgtgtgccaggctcaaggttgacgaaccgaatatattgctgtgttgtgagcggactccaactgccatttccaaccctgtattgataagttatatcaaactggtagcgtaagttgatgctttcaatatatagttcaaaggtgcgctgttggtaggataggctcagtttcccttcgcccaacatttttgccgcttgctcgttgaattgttcagaatcgttatcattacaatttactcccataaaacgcagattaactgtgtaattgtattgctgcacatagtgtggattgaccacaacagcacccgcttcactcccgaaaagaagatttccattcagcagattgatggctgcaccatgtgaatacccacgttgaagcccataatgatagtttacgttaataattttgccaagactatcaggatatgcgaatgacatacctctatcagttgcaaaccataaacgcccaagattatcttgcgtgacacttgtaacggtatttgagggcagaccgtctttcatggtaaactgccgacagtttccattgcgaagatcatacacatatagcccgccgccatcagtggcaatatctatatagcgttcatcatgaataaagagatccagcacataacggttcacttggttggggtctgacgaaaaataaggcagttcttttacctctgtttgccccggagtcacaatatagagcccctttatggtacccgctgctatacgtccatcgggtaaaagggccagagatttcacattgtccacaggataataccagaatttcccttgcattacctcaacgagctgtgcatcttgacaacctatccaaagatgaccattcctgtcaaataacaaatcatggatatgattgtctcccaatatgtcaacaccatacaattttcttacttcacctttggcgctaatttcgcacacaccgttgccataagttgcagccaacaccccttcgccatctggtttagggcacaaagaaagcactacaatatctcgcgcaatatggcgccattcacctgtgaggggattcagtacactgattccgtcgtcagtacccatagccaaagccgatgatgacagttgtgtcacgctgttaacatgatcattgagcaatgtctgcgtattattatgctgatgcatgtagatagcagcgatgctaccgacaggtcgtgctatgtcgatacctcctgaataggaacctatgaatatgtcgctccaagtatcaacaagcagtgcatatataccgttaccatggagcactccatgaactccttcattggcattaaatagcagggaggctgcatttgtcgttgaagctaagcgtgaaactgaatatacgccacagccatcaactcccacaagtatcgtcgtgctatcgtaaacaacaatactacgaaccggattatgtggtattccttccacagatgtacacacaccatctccgtcaaccgttatacacccttgatcatatgtgccgaaccaaagttgcttggtgtcggcatcgtagtacccgctcacaacgatatacggcaaataagggagtaactggcctttaggagtgtcctcatgacagagacttagtgattttacaccttgacgagtaccgaagagcaagatgccttcttccccatggataatgcagttggcatacacatcggaggctaccggaacaatctttccatttcggagcatataaacaccctcactcattgccaaccaataagtgtcgccatccttgtatacatcgttaagctgattgtcgtgcttaaaaagtatggttacatcagccacaatatcaaaacgattttgtactgaattatattcataaatgaatccacctgcatcaaacacttgtagcgcactatcaacagattgaacaaaacgaggattacatcctaccaaattatggtagttgttctcttctgtcaggtggaaactttctatattcgagccgttatatcgggccacaaagttctttgtagtcagccacaccgctccatcagccgtttgcttaagcgaatagatgcgttggctgttcaacccattcgtcaggtccaaatgagagaacgtgaagtcgcttacacctaaagctgccgcaatagccggtaactgcaatatcactattataagaaggatttttgcagtaaattgtcttattgagaaataactattcaaaattaaacaagcgagtttttacgcatcatatcaacttctattacgttattttacaaatatactaataattttagaatcctcacataaaatatcaggattaacttctcgatcagttatgttattttaatttatatcatgattggattcactttaaagccattccctgcacataaaagctgaacagatataaatcgtgggtaaactccagttctggttcattctctaaactcaagtccgccaaattctgcatatccgttcgtgacaaagcacgtttcagcgttttcgctgggcgggtctgcgcctttgcaaacggatattcaccacggggatgatagccgtccactaccgcctggttatgcaaagagcgcaagttacgcagataataacttaccgtattgccgaaagcaccgctactatacagaaaatcctcgtatctcctgacgaacgccaaaccaacctccgacatccacacatcggggcgacttataaattttgccaacgacgaacgagtgctcttatatgccgctgccattcccactttcttcagttcttgcttacgctcaatctgtacattgatatatcataataaataaaattgtggttttcctgtaccaaaagcattttgagtcagaatatactccactgcaaattcctcccttgtccgctcaagctgtctgctccgtgtatcaatctgattccgcatcttccgtagctcgctgttcattttcacgacctctgcagcggtaaaagtagaacctacgccattcataatcttcctttccgactcgtcaaacccctcttctttcatccggtctgtatacagtaattttttctccgattgtgtatcacctgaaatactaaagggtaactgccattattcaatatcctactcttattcagcataagtttcactgatgttatcatatcttgctttttttgtttgagacgtaaaagtacgaagttcaccttacttatcagaactatttttccgcctgttatgcaagaaacaagaaatggaataagaagtttttccactttaagaatagttatcgaataaatatagttaaaatatacgttctactaatcaggacatttttgttacataattccaatatacatacgcataaattaaatatgtatgcaacttacgatatttcattacataatataaacattaccgatatttattattttgaaaatttagaatattaggcatagctttgcactatggattttagggagtcatccgctcctttaaaaggaagaggtcattcctcggtgtgcaacgggtcgttcctttaaaaggaacgacccgttggttttaaaggaaaaaccggcatttgtaaccatttgaatttcaacttcttactaaattagaattccgtccccgtaacccatgggattttttccaacaaacacggcggaatctgccgcacgaagcggcaatcagtatacaacaaatttcaacaattcaaaattcaaatcccatggttacagtcacgtttgccatcaagccatatctggcgaggtacatgtatgtccggtacggacaaagtttagagcttcaatcgcacagcaatccaccttcaagactccccattccaatccacctctcccacctcactcccatttatcacttcttacatcaattatctgttcctcatccgcaaggcgtctcctggaaagagactggaaatatcacttttgttcttcctagcccaaggcaagggaaaaatccagaagtttataattatttcgggcaggacagtatctttattatcgaaaaggaaattgaggtggaaatgaaagcggagctttattcattcctgttggaaaataagttcaaaaacggggtgatgtatataaagtcgatgcatgagtttgtggtaaagtatgatatggcggagtctgtggaagaggaaagtttgatgagagggtttcagaggtggagaaagaaaatgaaagaagaataaatttcatctaaaaaaaatcctacaaatatcatatcatccaaaattctttttataaatttgtcaaaaataagacataaagccatgaaatactacataaatcttttttctcctaatactgcattggcattttctgaatctgaccaagaaatcagcggattccgcatatcccgtaaggcatatgtagaaaatcaacacataaacattggtgataagttcatatgttattgcactaagattcaacgttttatcggaatattagaaattacaagtaatttctttatagactcaaaacctatatttacccaagaggatgatcctttcaccttgagattcaaagtaaagccaattgcatggctaccattagaaaaaggtatccccatacacgaaaatattatttggaatcatctatcatttactcaaatgttaccaaatgatagtaccagatggacttatatggtattttccagtcccacactttggccgaaagaagattgtgaataccttgaacaagttattttacaacaacaatctgaaatgaaagactatcctttttcagaagctgaaaagaaaaaagtacgttcattgacaaaggtcagagtttccagtgagaaagaaacggtcatagaaatacctgatgaaacatcacaaaataaagccaatacaagtaaagaagaaagagaatctattcaaatacaagctactttagccgaaataggtgaaaaattgggctataaaatttggttgcccaaatcagacagaagtagagtcttaaataagtggaagccattacaaaataataccttattagaaaatctaccattagtgtttgatggcccaactcttaaagttatagagaatatagatgtattatggataaaacgacattccatagtcagagcgtttgaggtagaaggaacaaccgccatttattccggtattttaagaatggctgacttattagcccttcaaccaatgcttgacataaaaattcacatcgttgcttccatcgaacgcagggaagctgtattcgaacaaatcaaccgaccggtctttgcttttatggaaaaagggcctcttgcggaaatatgcactttcatttcttatgaatcagtgaaagaattgagaaaagaacctcatttagaacatatgaatgatagtatagttgatgagtatgttgagtattccaatgattaaccaaatactaaatataatacaacgacatgacagataaacttaccccggaacaacgacgtcgatgtatgtcaagtatccgttcaaccgatacaaaaccggaaattattgtccgaaaatttctattcaacgaaggatttcgttatagattacatacaaaaaagttaccagggagtccggacatagtattagcaaaatataaaacagtaatattcataaacggttgtttttggcatggtcataaaggatgtaaaaaagctgaattaccccaaacacgaaccgattggtggcaaaagaaaatcaacacaaatattgaaagagataataataattatatgcaacttaaagcattaggctggcatataattattatttgggaatgtcaacttaaaacaaaagtcagagtatcgactttaaccagtttatcatacacattaaatcatttatttctaatcaattaccaaacaaaacaataaatcataaatacattcttatcgtataaattacaattttcattaagatattcccgaaaatcaagtgtttttcgtatttttgcaacagtaaatgttcacataataagaaataaattataatatttgaatatgttaagggcaatagattttttttgtggtggtggtggaatgacctatggccttcgattagccggaataaacgtcattgcaggtgtagatttcgctcaagaatgccaatctacctatgaagataataatccgggaaccaaatttatatgttctgacgtgacacaattacctgacaattattttgaaaaagaaattaatttaccaataaatgatgataatttaatatttgtcggatgtagtccttgccaatattacagcattataaacacatctagagttaaagccctaaaatccaaagacttattacgtgaattcaaacgttttattaattactataacccgggatacgtattagtagaaaatgtaccgggacttgtaactcgcgaagatagtgttttacccgaatttcttgaatttctggacgctagacattataaatataaatgggacataattaatatgagttattatggagttcctcaaacaagaaaacgtttttcattagttgcatcccgtttaggtaatgtaaccatgcccgaaccagataaaactcaacccaaacttagagattttattggagtaaataatggttttccgcaagtagaagcaggacattcggacaaatctgattttatgcataccgtagcaaaacttagttcactcaatttagaacgtctccggaaaacaccacataatggtggcaatcgattggcatggaaagatgacgaacaccttcaacttccttgctatattggaaaagatacatattttcgggatgtatacggacgtttaagatgggataccccctcttctacaattacaactaattttgtcaaaatttctagtgggcgttttgctcatccggaagaaaatagaggattatctataagagaaggagcaactctacaaacctttcctcatacatatatttttaaagctccaagtattgtagctaatgcacgtattataggtaatgctgtaccaccggaatatgctcgtagattgggaattttattaaatgaactaaaagaaaaacacaatggcacaattcagaacgaaagctagagctgttgaattattgggtaaaggacaaattgcagatttacctactgcaatctcagagttgtggaaaaatggctatgatgcatatgctgataaactaagttgtaatttatatcttcccggatataaagataatcaagcacccgttttcaccctctccgacaatggattcggaatgtcaaaacatgacattctcaacaaatggatagttttaggaacagattctaaagcacgtggtcgatcatatttaacagatgaagaacggtttgggaaagcaattcgagtgccaatgggagaaaaaggaatcggtagattatctgttgcttatcttggtagcccaatgttaatgttgaccaaaaagaaaaatcaaaaatgtcaacttctcttcatcgattggcgaatcctagaaaattataatttatttattgatgatataaatattccattaagcgaattttccacaatagaagagttctcaatatcttttttagatatgcaagcagactttcaaaataatcttaatgagagtcaatggagagatcagcaaacgcaattagaaaccatcactactgatgttgaatcattagttataccggatttcattttagaagaaataattcctgatttcttacaggaagaatatcatggaaccacttttcttatttttcagcccaatgaacaattactggaattagcagattgcttcaaagatgaagacactgactctatcacggaaatacgccgttctttaagtggcatatacaatgtttttgtagagatacctaatttttcaactatcttcaatattatagatgccaaaggagaatatgatattattaatgatttcttcgaacatgaagattttaataactcagaccattatataaaaggtcattttgatgaaaacggattattcacaggaatagttagagtctttaaagaaactttcaattatacatacagaccggttagaagtccgggtaaaactccttacggaccatttgatgtagaattaagcgttttagaaggaacatctaaaaattcaatgttaactcctgaaatgtttcagtttatgaactcaaaaactgaaaaattcggtggtttatatatttatagggataactttagggttctcccttatggacgtgttgattatgatttcttaaaatttgaagaacgtcgtagtagaaaagcaggttattatttcttcagccatagaaatatctttggctatatagctattggtcgtgaacaaaatccacacctaatagataaagcaggcagagagggacttatagagaataaagcatatagagaattaaaaaaagatcttattcaattttttattgctctcgctacgacatattttaaaagcggagatgatgatccgaataaccgtaattcacattctgaacaactcaaagaaataagaaagagaaatgaaaagctgctagaagcggaaaaaaagaaggccaaacaaactaaggctaaattcactcaagatttaaaagataatgaaaataagatcattattttacagaatgaaatacaacaactttatacccaattaatagaagaaagtaaaaaattaaatattgcatacaacaactacaatgatttggtttctattttagaggataagaagaccgaactcagatcattacgcttagcaaaacctcaacgtgccaaactatcttctgtccaagaaagaaaatttgaggaatataaagctgaatatacaaaaacagaagaaataatcagatcatgtaatgatgaaatcgtaaaagtcagaaaacgattcgacctacagaacctgaagcttgattacgaaaaaagatacacctctcaacttagagaaatatcccttctcgtattatcttataaaaaacgattcgagacaacttctaccaagatcaataatttgttcaaagatgaacaaatggcatttagtgaaagctttaaaaatgaagtacattccaaggtccaatctcttaataccctggaagaatatgaacaagctatatctaatattatacagataggagaggaatgcaaaaatcaaatagaaaaaagatttacatctttcattaatcatactgaaaaccttaattttgatatagacgacgattttctcataaattggtataaagaacaaaaagaaaaacttgaagagaagcttagtgcaaccaatgagcttgctcaacttggtatttccgtagaaatcaatgatcatgaatttcatgtcttatattctcaaatggccaattccattaacttcctaaaagaatacgcatataaccatactgaaattaaagatcaatttctacaacttcagacagcctttcagcatatggaaacaaactacaaaatgcttcaaccgttatatagaacaacaagaagacaacgtacagcatttgatggaaaatatttaattaatggaatgaaagctttctttgcttcaaaattcactgattataaaatttctttag

SEQ ID NO: 597 - DNA, 44939 bp, Bacteroides finegoldii
  source 1..44939: mol_type = genomic DNA
aaaaacccaactttttaaaatacgctttttttagatagggacaaaaacccaactttcatttgagtagttgtatcatatagagccttttttagttaatatatgttcttttccctaaagtttgtgttaagataataagaaaagttccttttttagaggtttaggtgataagaaaagttccttttttgtgtttggtatgattatcaggttttttttatcagctagtgatggtagtaccctttaaaatgaaaaggtaactgtttgaaaatcaacgattagtcgcaaaaagctagggacaaaaacccaacttcttagggacaaaaacccaacttcttagggacaaaaacccaacttcttagggacaaaaacccaacttttacaccatccatagggacaaaaacccaacttttattcatcttctttttcttctccaatcattccggggagtatttctacctcttttaataatacggataaacaatattctgctttatttgaaattttattccagttatctctaacatattcgcctagataaagcatcttagttactactgctttatagttgtttaaggtaatctgtggaataaactgctgcaaatgttcgtccttcattgcaaagtgcaaagaacaaaaattcgttatcatcttcttttgtccttttaatagttcttcttccttctttgataatgcagacttaataactttgaaattaagtttataaggctgtgtatcgcctgaattacgataaacttctgccatttcaaaccagcaatcagcctgttcaaacaaatcttcgtaaacagggcgtattacacgtctatataaatctttaaactcggggtatttatcctctagttttaagaatttccgaaatctatccacataaatagagaaaccacctttttctttccacgaactaatcagcatatacattcttattgtatatctactttgcgctcttaaggctatctcttttatatagcgtgtaaagcctctatcaacattaatgaaaactttagcgacctctctatccatttctaaagaaaaacctcttgaataaggagttttaggtatatttgcctttgtaaataaaccagtaatagaccaactttcctcacctgttatggggtctttgacatcaaactctacaggaatactgattaatttacgaaccatactttttacttccttgtattggtctggactaacgcccaaatcccgatatgcaatatctactcttatacggtctgaatattcttgaaataaggataattgctcgcatggaatagatgtaccatatttatctagatgctgaatacttaattctatgacattctgtaatttctctataacagctattaagattctaatctgtactgtcttaaaatcaccagccattaatgtaaccacattaggttgtttcagccatgtgggattttctgggagttccacaggaagatttgtacgaggatgcccttttctaattctaacaatctcaccgtctatttcttctttttcttctttcaccgcacgttttcgggcttttatttctctatttaccatcgcttattattttgactgattaatacaccaaaaaaaagtagaataaagaacataaacataaacttggctatataaaatagccctatgagaatcattctaaatatagcaatgataacttctaatagatttcttattatgttcctccagttcattttctctgttttataattcctgtcgccaaagctccggctgcactattgtataaccagcactttgcaaatatattcttttaaattcatcaggcaacgctccttcaaggaataactttttatgccttgatgcagttcggcggtcatatggactatttttggaccaacctcttttaaggattagttccttaaagcattcatctaatgtttttgctttatctatcataatcttttcgtaaagaaattatagggtttttcatccctttatacatttcacaaggatttcctaatagttcgcacataacaaaatgtattatcttcccttcatccaatggtggatttgatttatttgctaattctacaactaatgtatattgataactataattctcaataacaatttctttttcattagaaacttcattataaatcttcctgtacttatgccataaagatgtattaaaaagctctacagtaaggtaactgtttacctgctctgttgtatagtattctggtaaacgttcccctgtaagtctataaacagcctccatttttgcttttttccctacaaacttttttttcccaatcatctgacaagaaggaagttcatccctagatataaaaggcttcaaatctgacaccctacgatataccttatattcaataaacattctatctatattttgattatatgacatctattacctttcacactattcaaaaaattatggtcatttatcccaatcataattatcgtaatctatttcctttcctgtagcatggcattcagctacataatcagcccatttttttcgcttcgtcacatcaaaaggcatacgtagaaactcatccttccaaggctgtataaagtaaccaaaatcgtgtttgttcgttacatactgaacagcatctctaatggcgttatactcatatccttctttcaacaatggttcgtcacccagtttagagtatatgtttgccacttcccgaagcatctttgcaaattctttgtatgtggcaaaattcttttcttttttatccatgacaggtattttctttctggttttaaatattaatcttgttcgatgaaagtgttagtagtattcaacactccggctgaatcccgatttttaccatcacgcacaaaaaaactatcgcttaacagcctttcataatcgattttattcataagaataacactcgcattgccatctatatacagtttgcattgcatgaattgagttccttttacttcctcaattacgtctatttgcattgttctttttttactcatatctaatctgttttacgctaattctgtttcaataaacttcatcatctgattgtgaaaagaaccactccttttttgcgcagccttacaatcatcaatggaaagattcgattccttaattatccctattgcgattgctggcatatctctgactactacaatatgctgaacagcaaaccaaataccatcaataaattcattattcatatcttcattgtttatttataatctagttatacacaaatacttttaaactccgattgagaaatctgtcctttctctttgattactccaaagaaagcagtagccggacaaacatatgcgtctgtcgttgtaagacaaactccatcagaagggaagtattcacaacctatatcgttgtcccaatctatatacttttgagcttctatcgctactttatcgcaatattgcctatatgaggtgtacgagcttccgacttcgtttatcaatctctttatattcattactgttcataaatactatcaaactatttatccaattccttttctaacttttccctgtcaatctctggaaacagtttaagaacaagatttagcgaatcgcaataattatttgaatatttttctctactccaatcataaatttaatcctttcacatttctattaattgactattaatctgtagctttcttcaatgcttcaaaagaagacacgtaatcatcaacagctttatttaacgctgtatatttatctttccacgttactttttgccgttgtgtttcaatatacctatcattcaattgtgcataattctgaatggcaaatctaatagctttagcatctgttttttcaccagataatttttttaaattttccaactctgcacaggctgcatcgtctaagcgtaatgtaaactcttttttcataaaagaatgattaatgaattaatactgaaaaataaccctaacagttggctatgaaatggatttaagaagcaatgtttcataattttgtttgctgttctttatactggcagccaaaccagctttaaaggtttgtttatctctttattttcaatactcaaagatagcaattttctataaatgtcgcaaataataggacaattatttttgttaaaaaaggttttaggcttatagattgccgaagttttatttttccctaaagtattggtatcataataatgttcttttttcgtccatgtccgggagaaccgggaaaagtacggtatcaaattcctttccggcttttctccagtactggcagaaaaggtatcaattagatgcaatccttttgctgatgggcggtagttcctgaatggtgtcggtatcgtttcttttatgatgcagccgttttcctgtattcaagtatagagagaaacgacacaaggaactttagggaaaagaatattcttcgtgttgctctttctggaagtggtgtatgttaatcatatattatatgtttataggtttatatattcatatattatttatatatatagtgttttctctttgttctttttccctatagttttatggtatcaattttttgtgtccggcttccagcagctttttgtatttggtatcaaaaaggcgttcttcagaacatatcaagcatgataattcggtatcatttcatcatgctatgtttgccaatcagtgccggaactccaaaaagtacggtatcaatttctttccctatagttcttattgggttagacaataagacgcattaaaatgtattctcaaagtgagaatgtattttaatttgcggcatgtttccgcttctgcaatgcttactaaagtggagttacctaaaaggtagtggaactttactaaggattgcagaagggataaagaaacataccttagaagggtgggtggggtttactgatagcgaaactattggagcgtaacaaagtgaagcgattaagcctttttggttcttttttggcgtttgaaaaaagaactcccccccattttgggagggaggaatctttaagcaacctttgtatttttctcttcttctacttcttccacatctagtcttatatttagatgctgggctatgaacttactacctttaatagcatctgccaatacagtaaataaaaatttaggttcttcttttattgctttgcaccatgattttaaataagccgcattttcttctctgacggttacagaaatacccaaatatacaccagacaaagccgatattaattctgctacaagttcttcacgtccataattgaatttatcattttcataaaatccttttcgatttagtctatttttaacacctgtactatgtcccatttcatgtaattctgtaccataaaaactttctccgtccttaaattggctctttaaaggtaaagtaatactatcatttgatattgaataaaacgcactatcactagaaaccgtttgaataggacacacccaattttgattcttattcatttcatcaagtattggatttacatacatttctttctcttcttgtggctgttcctctcctgaaaatttagcctttaatatatcccatctattgggatatttttccgcaaaatttgtttggtctaaattaaaaacttggaaatattttgtataagctgctaaacggtattctttttgttcttcttctgataattttttatattcatcatatgaaattttttcatttgtctgacgatgataagcacaaaataatgtataataaacaggaaaagcagcagcaccttttagaacattaataccttcgtttcgtgcttgattgaatgtcaaaaaaacaggagtttgataattatatttttcacacaaaaaataaagtaaaaaagcgtttccaccactataagtacgccctgttaaattttgcggtaaaaagttctgcttagaattgactttagagaaccaaggtttttgccaattcatagacaaactttcaattttctcaaccataaggtttacaaacttctctgcatttttatcaaaagtagatttcataattttgtttgctgttctttatactggcagccaaaccagctttaaaggtttgtttatctctttattttcaatactcaaagatacgaattttctataaatgtcgcaaataataagacaattatttttgttaaaaatagtttataaacgactgattttcaacgtattatctttttccctaaagttttatatatttggggtaagaaattaggttttataaacggaatattccctttagggaacatgaagtctataaaaccgaataatccaatgccttgtttttgtaggtgcttcgtagaagcggtggaaaaagcaaagcattggatataccttagaagggtgggtgggaaaaatgcgttagggattgtagcgaaaagcccacagcacagcgaggacttgcagcgaaaagcccgacctgaaaggtaacgccctatttatttcttctattcatcaatcttactttttcataacgtaaatacctatacaaagtagccttacttccaatgtgtaatatcctgcatatttcacctatagaataatcccgattttcatataaacgttttgctgctatagcctttctctttgcatcttccgataatcctataggtcgtcccgtaagtttccctcgttcttttgcagcttgtaatccagccctagttcgttctactattatttcacgttcatattctgccaacgaagcaaaaatcccaaattgacaccttcctaaagcactattagtatcaataccatcaactatgcttttgaatgcaacttttcttttctgcaaacaatcaactatataaactaaatctttcaaagaacgtcctaatctatctagcttccagataacaaaagtatcaccttctcgcaaatacgcaagggctttatctaattcgggtctatcttttactcctgatactttttcctcaaatataagtttgcatccggcttcttttaaagcatctagctgcaaatctaaattctgttccctcgttgaaacacgagcgtagcctattatctccattttatttaaatccaagtttcattaattcaactattcgcgaaactattttaaactagggctttttcccctgttattacctctagtactattataaatcaaaagtacagaaaaagggtcgattaatgaaacttttaaatttaagaatatgagttattcacaatttatcatggctgtatttgccatttatgtagtttactatgctgcaaacattctgtatgatgctttcctaaagcaaagcaaaaccaatacaggtgaagaagaagaaattatttcaataggagaggaagaagaaatacctcacaaagttgtagatgaagattttgaaacaggctcatacgaaaaagaggatgaaaaaaaagaatctgaacaaaattatgtatctgtaaatgaatctattgaaatggatgttgaaacacaaggtattccaatggaacaacttcttgctaaagggaaaagtatgttttcacacgtaaattttaataaataaacaaccaaattttattcaaatgaaaaagtttttttcaaaaattgctcaaagagcattcgctttagccattagcacaatggtagtaactaacacttttgcacaaggtgctgccggaattgatgcagccagttctgaacttgcaacctacatggaccccctaggaaacatgatgatgatactaggaggtctagtaggattagttggagcagtgcgagtttatttaaaatggaactctggtgaccaagatgtacaaaaggctgttatgggctggatggggtcatgtatctttctagttgtatcaggtgttgtcgtaaaagcattcttcggaatctaatatgtcgaaagagtatccaagttacaatgtgtataaggggctgcaaaagccccttattttcaaaggatttaaaggcaagttcatatatatcggtggagcttgtattattagtgctttacttttatgtgctattgtttctactctggcttcttttatgtggggaggtataactcttgtaatagttatgtttggagggttaggaataacatcgcaattacaaagaaaagggcttcacaggaaagataaacgaaaaggcatatatatagtatcacgcacttttgtaagagatagaaaaaaataaagcttatgaaaaagaaaagtgaatttgaagctccttatattggtattgaaacaatagacaatactcctatattctataaccgaaggggcgactattctgttatcattaaatgtgaaaatcctataatacagtattcagcagatatggatgcttactatgattttcaccacttatttactaatatcctcaaagtattaggaaccggatatacaatacaaaaacaggatattctatgtaaaaaatcatttttaccaccccaaaataggaagaacgactatttatcaaatcgttattttgaacattttaagggacgaatatatactgatatttctacttatcttgttattacaggagaagtagaaaggtctaaattcttttcttttgacccccgaaggtttgatacttttattagaaacatcacaaaagtattaggactattcgctaacagaggaataagggctaaactattaaatgaaaatgaaatagaaatatatataaaaagatttctatctatcaatttcaatcagcaaacagtaagcctaaaaaacatcaaagcgagagaagaaaatcttataataggagaaaaaaacgtacagtgcatttctcttgtagatattgacgaagttaatttcccttctgttataaaaccatataaagaggtcaatattgggctaaggtttcctgttgacttactttcttttttgcatgagacgccaagtatagacacaattatctataatcaagtaataaatattccagaccaacgaaacgaagcaaacaaattagaaggcaaaaagaaaaaacataaaggaatgcctgaccctgcaaatgatttatgtgtagaagatatagaacgagtgcagtcggatattgccagagaagggcaaatgcttgtatatgcacattataatatcattcttgctggtcttgatgatattagtaaggctgtcaactatgttgaaacatctctttttgattgtggtattattgtgaataaacaatgtttcaaccaattagaattatttgaatgtgcactgccgggaaacgcaatcaacctaaacagttatgacaaatttctaacaacttccgatgctgcaatttgtcttttatttaaagaaaaattacaagtaacagaaaacagtccttttcttacttattttactgacagacaaggattgcctgttggaatagatatgtccggaaaagaaggtgagaaaaaatatacaaataactctaacttctttgttttaggtccaagtggttctggtaagtctttctatgtcaactccaaagtaagacaatgggttttagataatactgatattgtattggtagatacagggcatagttattcaggaatgtgcgaatactatcatggcaaatacattacttattctgaaagcaagccaatatctatgaatcctttccgaattactgaagaagagtataatgtagaaaagaaaaactttcttaaatcattaattttcctgatatggaaaggtgcaaatggtgaggtcaaaaagcaagaagaagaaattatggatattaccatagaaaaatactattctttctactttcatccttttaatggttattcagatgcggaaaaagaagccatacgtgaaaatttactactcgaatttcaagtcaatgaagaagaatttgaaaacgaaagggaaaaagaagaacgcaagatactttccgaaaaaatagagaaattacagcaactagtagaaaaaggagaaggcggagaaaaaaccaacgcagaaaaagcgatacaaaacattctcatcgaaaaaggatttacacgccaagagcttgataatcctgaaactagattactttctataatagaaagacgaatccagaagaaagaagatatattgaaagaaataaaagttgaaagcctatcttttaactcattctacgaattttccctacgcattatacctatcatttgcaaagagaacaaaattgattttgatattactaactataagtttctattaaaaaaattctataaaggaggacagttagaaaaaactcttaatgaggattttgatacttccctttttgaagaaccctttatagtttttgaaattgatgcaattaaagatgaccctgaattatttccaatagtaaccttaattattatggacgtttttattcaaaaaatgagattaaaaaagaacagaaaggcattaataattgaagaagcatggaaagccatagctagccctatgatggctggctatatactctatttgtataaaacggttcgtaaattttggggtatggcaatggttgttactcaagaactggaagacataattagtaatcctgtagtcaaaaactctataatcagcaactccgatattatatgcctattagaccaaagtaaatttatagacaaatatcaagaaatagcaaatcttttatccctaacggaagtaaatcaaaagcaaatatttaccataaatcaacttcccaataaagaaaaccgtaatcggtttaatgaagtatttataaaaagaggaaactatggaaatgtatttggagtagaggtttctctgcacgaatatttcacatttactacagaacgaatagaaaaagatgctgttggatattatcatatcatttatgatagtttccaaacaggattggataattttataatagacctaaaatcttccaaattaaaaaatacggattgggttttacaagtcaataaggtactagggtatcactccgatgaaggaagcctaaaagatatacttaacatcataggagaacaaccattatataagtatatcctagataaatacaaaaggattacaaaccgttaaagataatatcatgaagaaaatcctatttattttagtggtagcatctactttaacccaagttgcatattcacaaaaggcagtcttggatataacctgtatggaaacacttatagctaatcataaggtgcaacatacttctttctctaaagtgaaagagaatgaagctcaaataagccttatacaaaagcaaatcagtgaaaaaatggttcagattgaatttttccaaagcaaattttataatagcctaaaatctgtagaagccatcataaaaacaggaaaagatattatctactgtactgatattgcagcagatattggtaaatatcaaaaacaaatggttgaacttgctgtaggtgacccggctttattattggtgtcagcaaaaacagagctagaattagttaatcgtactgcggatttgacacaatacatttatcaggtcgctattgtcgggacagatgtaaaccttatggacaataagcaaagaatagacttgcttaagtatgttattaatgaactaagaaacatgagaggtatagcatacgctgtatgccgacagatgaaaacagcaaaaagaaatggagtattacaaacattagctccgggagtgtttaaatacaaagataatcgttcaaaattagttgatgatttattacagaattataaagtaaaacctaaaagataatatgaaaagagtgcttttatttttttccctaatgttgattattggtacttctaatgtctattcccaaatgcctgtaaaggataaagggaaatggagcgtacttaataatatggaatttatggatagagtacgactacaaccagaatggtatcactactggatatggtataaaaaggttttgggtattaaaattcctttgccgggcttagggttacacgacaaatacggaaaggaagatagacgtaatttccagttacaagaaattcccatgatggcagccgtagagtacaataaatcagaaacagaaaaagaagggtataatgtcgataccatatatagacaggaactcttcaaatttggagataaagaaattgattatcaatatactttaactaaaaatcgcagaaatgatattcttaatgatataaataaaaaacttgtcgaatattcttctaatggcggtaataaagaacacgttgaagttataactgatgaagttactagaatcaaaaagaacatagatataatccatgattcacatatgagtaactctaaaaagagagaagcctatttaggttttgataaagaactaatagaagttctttcattaataacaagattgaataatataaataaaacaataatgagccatgaatgagttaatagataaattcttatttgaattatttgatggactaagagataaaacaactgttctgttcggagaatttattgcggatgcgcaagcattggcagcaatctttatgttattatattttggagtagaaagcttcaaaatgatgagtggagataaaaaattagagattatcccattattgcgtccattcgcactgggattggttcttatgttctggattccctttattaatctaatcagttatcccggagaattattaacagcacaaagcaaggctatgtttacgaaccagatagacgaagtagaattactttctcgtaatagatatgcactcattgatagcgtagcagtagagttattacatacttcattagaagttgaaagagccgaaaatgaagttaaggataagaaatggtatgattttagtatagacttttcagctattggagacaagatagctggattatatgtatatgtagtcgctaaggttaaaatgataatgtttaatatcattgaatttattgtcgttactttttggcaagtatgtacctattttgtctttttcctacaaatcatattcacaggaatattagttattcttggtccactagcttttgcattctctgttttacctgcatttcgggatgcttatatacaatggatagctcgttttgtcagtgttagtttatattcatgtattgcatatatagtattatcaatttctttagtagtaatgcaatatgggatagaaagagaaattgaaattttagaatatgcgcttagaaatgaagctgcatttgtcatgtatgtcggaatgacctctggaggtgtcaatagcttccttcttacagcattacttggagcatttgccatgcttacaataccttttgtttctacatggattgtaagtacaactggagtagggcaagcagtaggaggcatggttggaggagcagccatcgcaaccaaagctgtagcagctccggctacaggtggagccagtgcagctatgtaaaaagattcattaaattttaaattcacataatcatgattattaaaaacttagaaaataaaatcaaattagccggaattttatccattggctgttttgcaactagtatagttatttcaggtatggtactagccttttgtttctctttagtgaaagctgaaagaaaaaaaatatatgttttggataatgatgtccctgtactagtgaaacaaactggtacagaagtcaacttggaagtcgaatgtaaaagccacataaatctattccacactttatttttcacattaccaccagacgatgaatttataaaatacaacatggaaaaagccatgtatctaattgatgatagcggattaaaacaatataataatttaaaagaaaaaggatatttcaacaccatattagcgagttctgcaacagtaacaattatgacagatagtatcaagatggacatgaacaacctatcttttgagtactatggcatccaacgtatagagcgagaaacttctattctaaaaaggcaacttgtaactacagggaaattaagacaaattccacgcactgaaaataatcctcatggacttattatcacagattggaaaacgatactcaacaaagacctagattataaagtaaaaaagaatttctaatgaaactgtttaaacataaaaagaatgatagaaaagaaagtatcaagactaaagccgagcaagctacagttattcttcttactaaaatatttcaaaagttcggagttaataacgcttgtgaacgcttattagcgtgggctgacatacatcgtaaagccatgtttggaattacgatttcattcctttctttcgtcacaattctatcattagtaatgcgtccagaaagaaagccaatgcaagttttcaacgaagaaaaaagcaaagtacaaattaacattgatagtaacctacaaaaaaaacaagtaggagttcacgacttgttagaagtgattaaaatgcaaaatgaaattaatgagctaagaaaaaatgggaaattaactccagaagacactgtacgaataaaagatttatacaataaattaaataaatagcgtatgaaacagattgatattaaaaagcctaagtacatcattccgatactcatcctaccttttattttagggataggatggctagttaaggatatgataaactctgccccagcagaagaaactacattagtagaaacggaagaattaaatcttgatattcctgatgctaatttagaaaaaagagagataaaaagtaaatttgaatcactcaaaggagctttcaataaatcttctgattattcatcaatacaaaccatagataaagaagaagaggttagtgaaattgaaagttctggttctctttactccaatgatgaaataaggcaaattgacagtttaaatcaagcttctagaatccgagaaaaggaattggaacaacaaataaaaggatttcctactatagatgaatcaagccaaatagaaactagaaaagctcctgaaaaatccaagatgcaagaagaaatggagctttttaaaatgcaaatggcttatatagattcattgcaaaatccacgtcctagaacacctcaaaaaaaacaggatgaaaagccaaaagaaaaggctatagaagttgtaaaagcgaaaaatcccgcagaagtatattttaatactgtagggaaagaacaaaaaacttcgctaatcacagctatattagatgaaactttaaaagtaacagatggtagccgagtacgcatacggcttctagatgatataatgattaatgacgctcttttaactaaaggcacttacctatatgggaatgtatctggctttaaagcccaaagagtacacattaatatttcctctataatggttgatggcaaacaaatgaaagtagatttatccgtatatgataatgacggacaagaaggtttctttgttccttcatcagcttttagagatttgagtaaagatgttggagcgcaaataggaagccaaactatacaaatgaacagccaatcagaaggagtagaacaattcgctttaggtgctttacaagatgcttaccgtagtacaacccaagctctttccaaaaacatcaaaaaaaacaaagccaaattaaaatataacacacaagtttttttagtaaacaacaaagataaagaacaataatatgagaaagatttttattgcattatgcacaatggtttctgttattacaggaaatgcacagaacacccctattggagaaaacatcgagcttgcaggtgaaaacccagaagaactaaaggttatatacgtcaacaaagatgtttcaacgcattttatagctatggaagatataaaatatgttgatatatcagtcaatgatattgttggcgatattcctactggtaactctcttagaataaagcccacaaaagaaggagctagtggagttatcaccattgttacagaaagatttttcgtacaatatatgctagtatatagtagcgatttagcaaaagcatacactcgctttaatatcccttatgctgatttacgtagctatatgaatccagaagtgaatttaaccaaagcacaaatgtatgattacgcacatagaatgtttatttcaaaaaataaattctatgatgtttccagtaaaagtaacctaatgaaaattgtactaaacaatatctacacattagataagtatttctttattgatatttctatgattaataagacaaaaatacgatatgatatagaccaaatacgcttcaaaatagaagataaaaaacaaacaaaggctactaattttcaatctatagaaatacttccattgatgcaagttaataagaatcttgttttcaagaagaactatcgaaatatttttgtctttgaaaaatttactttcccagacgaaaaagttcttaccatagaaatatctgaaaaacagatttcaggacgtactataacattaagaattgattatgcagacattcttcatgcagatgcttttaccgaataaataaaaacaggaattaatatggaaacaaactcacgcccagaggtagccgcttcccccgttaagcagggacagtacagcccacggaaaaggaaagacaccacgccgaaagtaaacccgcagcttgcggtagaactggtatatcaagaattgaaacgtgtcgaagcctatacgaagcgcatagaaaatgctatggaaaaaggcagccaacttgagatgtctatagaagaactaataaaaacattaaaagaagaatccaagaatcgagaagaatattacattttaaagcgaggtattttgttaacacagatactccttctcggttttttaattttaattgctatatataaattctggttttaataattaaaaataaaacatatgaatattctcaatgagaaaaaagaagtaactccaattataaccccaagttttggttataaattacgttccattaactggaacgaggatttctattttgacaaccccattaataaagagaaaataaatagtattcccaaagctatagaaatatccaaagatatatttcttgctattgagaagagtggaatgcagtatagagaaacttataaatgggatgaatatttatacttcaaaatgacagcggaaaatatttttgcagcaaccatatactattactgcaaacactatcctaaagaatattgtaatcttgcttacatcatagcaaccgtatgtaatcctgatataagtattttgtcagaaatgcttaagcgtgatagggaaactgaaatatttataagaggattgaatgagtgtcataccttaaatgttggttcggaattcactggaatcaaaaatgaattaaccacatatttaggaaggctatatactaaagaattcttctatttgttcacagaaggaaaatattcccctaatacatcccaatttatcctacttcactatttcgataatgtaatatggcaagtggaacaattacagaaaaatggttttttgttcttggaatcgaatataaaaaaagagaatgatgaagaatccttatatgatataaaatttctaataaacaaagggcgtcttgatttttcgaaaatcatgtatgaatccacagaaaaaaatgaaactaacaatattaaataataacacaatgaagaaaattatatttcttattatgatttcatttatttccctaaagtcaatggctggtgatggtgataagttttttaatatttcaggaggttggcaatggaaaaataccgtcaatgcagttgtagggctggagtttgaaggtaaatatcacaatgcttatgaactatatattgatttagctacagcatatgataaatgcccggtatgtaataaggtatgctctgatagcttctggagctataaaacattcggcataggtgcagcatataaacctacaatctcacgaggcaaaaacagtattttaagatggcggtttggagcagatttaggagctaacagaaaagggtttcaggcttccattgatataggtttagaatatagctattcatttaggaatggaatgcaagtctttgtaatgcaaaaaaatgattttgtattttggacacgtgaccatttccgaaatggattattagtaggtgtcaaatttccaataaataaataagtatgaaaaaaatatatataattctattatccattataggggtaatatcatcatgtacaaaacacgaagatattatagacacatcattacagccgggtagtatcttatgtagtgatggaagtatagtgcatccctcgcttttttcacccagtgaaaaagaagccattggagttgtattttggtgcaatgatgggaataatccaaatataaaagaaaccgcttatgccgtttcattagaagatttagaagaaaatcctttaatagacacagacgaggatatagctaatgtttcggaagatgaaaacagctttgatggagcagctaatactgccgcaataatgaactttgctataaaggatagtttagcttatccagcaactcaaaaagctatagaatatgcgccaaaaggtgttacaggttggtttattggctctatcgcacaaaacaaagcaatctctaataatcttgaaaaggtatattcttctttctcaatcattggaggaacgcactttgatggttggtactggagttctacagaagatggagcaggaaaagatactcctaaagtgtttgcactaatttcttcattaacaaaagggagagcaaccagtacaagcaaaagaaattcatttaaaatcagacctattatagcaataagataatcatgaaaaagaaaataattatactagcagccttcgttattacattttttaccgcatgtacttcaacgcatatgataactttcagtaacgctgaactaagcgacaaagaaaaagacatgatagaaaataatagcaactattcaaccgcttcaatagttggtggaagtgcaaaattagttaaggaagaaaaagataaagctatccaagaaaagatagaagctagaagaaataaactaaaagctattgatggcttatcaatctccagctataaggataaaaatggaaaagaacagtttaaagcaacagctcaaagtgaaatcttattcaaatttgattcatatgaattaaatgaagaagctcaaaaaatgctttctaatctatgtaatatcattactgaaatagccaatactaagattaaaataattgggcatacagacaatataggagaaaaacaatacaatatcatactttctaaaaatagagcagcagcagtagggaattaccttagaaccgctggtatagaaacaaacaacataacagaagatggaaaaggatatagcgaacccattgcagacaatacaagtgaagctgggcgtgctaaaaataggagagtagaaatatttatcacaaatgatgaatattaaaaagagagattgctattaataaagaccgggaagtaaaactctcggtctttgttttataatctgaaaagaaattgataccatcctttttctggttccggcactgatgggcaaacatggcatgatgaaatgataccgaattatcattcctggcacaccctgaagaactcctttttgataccaaatacaaaaagctgccagaagccggacacaaaaaattgataccataaaactatagggaaaaagaacaaagacaagataccatatatataaataatatatgaatatataaacctataaacatataatatatgattaacatacaccacttccagaaagagcaacacgaagaatcttcttttccctaaagttctttgtggcgtttctctccactcttgaatacaaaaaaacggctgcaacataaaagaaacgataccgacaccatttaggaactatcgcccatcagcaaaaagacattatctaattgataccttttctgccagtactggagaaaaaccgggaaggaatttgataccaaacatttataggacattatcataaaaaaattaagttctctaaaatttgataagaccaatagaagttattgattaaaatattatctttgcacagaaactgaaattcatccaccgataaattaccctccgatgaatttaaaaacatattcatatgaaattttataatagggaagaagaattaaaggtactttgcgaagtacaggaacaatcatttaatgaccattcacgttttactgttgtaacaggaagaagaagagttggaaaaacaaaactcatattgaaaagttgtgaggaacaaccaactgtttatctttttgtagcacgaaaaaacgaaggggaactttgcagtaaatttacacaagtaatcagccaatcgcttaatatgcacttttctgacggttcaggaaagtttatcaatatttttacctcattaatggaattagggaaataccgcaaattcaatcttatcatagatgagtttcaagaatttttctacattaatgaatctgttttcagcgaaatgcaagacgtttgggatagatacaaggatagcacacacgtcaatttaatagtaagcggttctgtatatacacttatgcaccgcatttttaaagatgcacgtgaaccattatacggacgagctgaccgtaacttaaagattatgccattcactacttccgtcctaaaaaatattatagctgatttcaaccccaactacaccaatgaagacctattggctctatatacattcacagggggagtacctaaatacgtggagcttttattagaagctggagcatataccatgccaaacatggtagagtttatgattcgtccagggtctttttttcttgatgaaggagattatctattaattcaggagttcgggaagaaatatggcaactattattctatccttgcatctatcgcttctgggcgtaacacaatggctgatattctcgccacatttacaagcggaagtattggaggacagatgaaacgcctagaagatgattatgctgtaattaggcgaaaacgcccgattttatcaaaagaaggaactcaaaatgtacgttatgaaatagcagataactttttacgtttttggtttcgatatataaatcgaaatcaagattttatagaatccggcaatttaaatggacttgcagagctaatcaaatcagattattcaacttattctggcatggtacttgaaagatactttcggcagcaattatcagaacaaatgttttacagaaacatcggctcatggtgggaaacatccaaaggcaaggacatggctcaaaacgaagtagatattgtggcaatatacgcaagtaacaaaaaagttttaatcggtgaagttaaacgcctacgaaaaaattttaagccaaaattattacaacaaaaagtagaatttcttcgtacaaaactcttctataactatgaaattgaaacaaaatgcttcacaatagatgatatgtaataaatagaactataaacaataaggcatcacaaatatcttacaatattcttcctccggttccggcactgatgggcgtatatagcatgatgaaatgataccgaattatcatgctcaatatgttctgaagaactcctttttgataccaaatacaaaaagctgctggaagccggacacaaaaaattgataccataaaactatagggaaaaagaacaaaaacaaaataatatatataaataatatatgaatatacaatacataaacctataaacatataatatgtgattaatatacaccacttccagaaagagcaacacgaaaaatcttcttttccctaaagttccttgtgtcgtttctctctatacttgaatacaggaaaacggctgcatcataaaagaaacgataccgacaccattcaggaactaccgcccatcagcaaaaggattgcatctaattgataccttttctgccagtactggagaaaagccggaaaggaatttgataccgtacttttcccggttctcccggacatggacgaaaaaagaacattattatgataccaatactttagggaaaaataaaacttcggcaagctataagcctaaaaccatttttaacaaaaataattgtcttattatttgcgacatttatagaaatttactatctttgagtattgaaaataaagagataaacaaacctttaaagctggtctggctgccagtataaagaacagcaaacaaaattatgaatatcttaaaatttcttttaagtagctttttatgggctatgggtggagtttttgtattagcaatctatgcgtatagtgaactagtctatttgatttttatttgcattgcaatagtaggattaaccatctactacagaaaatccataataaaaatgtacgcagaaatctttaatgagctaggaatcaataagtatgttatacaaattaaaaatctaaagaaatacaaagaacctatttacaaactaatcaatacaataggtctatgatgattgttttttctctatctttgctaaatacatcagcaagatagctatataaaattagaaaataaatagttatggaaactaatcaaacatatcaaaatgaacttggttcggctatgctcccatttgttatgagagaattggttgatacagtcatgaaaagaaaaacgctacctttagaagatgcgttatactatatatattcctccaatttgtacaaggcattattggacgagaatacaaaactgtggtattcaagcacattatcactttatgaagcattagaaaaagagaaaacagaacagaagaaagtacaaaaggacaatccaaagatattgctttttcaaatgttttgtgctgaaaattacagggaaactaaaaatataagtgctaaagaaactcttttgctgttttccaatcatggcgtttttgaatttctatatgaaaattttgaaatgctgcacacacaagatacagagtatatattagatactataataacttatatcaataaaaaggcatgaaactatatcacggctcaacagttaccgtcaaatcccctaatatacagaaagggcgtaaagctactgactttggaaaaggattctatacgacaactaattttgaacaggctaagaagtgggcaatactcaaaaggaatcgggaacatggtaaaaaagcggtcgtttcagtttatgaagtccccgataatattcttgatagagagttttcagtccttcgatttgatggggctacaaaagagtggctggagtttgtagttaataaccgcagaggaaaaggaaaaaacagctatgatttaataatgggacccgttgccaatgaccagttatatgcaacaatccggctttatgaacaaggtgttgttacggctgatgcagcgattgaaatgctaaagacccataagctttttaaccaactttcatttcatacagtgaaagttattccattattaaaattcacagaatctattgaagtataaatcataaaactataatgaaccatgaataaagaaatgagtttggatgttgcgctcgacattatcgggacactccgcatgatgaagatagatgaaatatcagaagagaaggatgaaaacagaaaaaaaatactgcaaaaagaactttctgttctcaacacagaagaaaaaatagcaaatggattgttgcagtttgaagtttctgaaaatgtgcgcttatcagtcatggataagatacaaaactattacgcacctaaattgaaagcatattatgcaacgctatgaagtagaagccatctttgaacaaaaaaaagatggcttatttgaggacatcaatatatcatcacaaaagcctattgctataatcttaggtggacaaccagcttgcggaaaaagcactcttataaatgttgcaaagaaagaccatcctaacttagattttctcactgttaatggtgacctttacagacagtttcaccccaataaggaactaataaaagaccctattaaataccccattgaaacccagattttttctagcgtttttacagaaaaactaatagaagaagccattaaacggaaatgcaatattattatagaaggaactatgagaaatccagatgtacctttaaagacagcacaaaaatttaaagatgcagggttcactgttgaagcatatattattgcagctcccaaggagtttacccaactgggactttacaataggtatcaagaagaagtactaagtaaaggacaaggaagattagccgacattgattcacataacaaagccataaatggactaatgaaatccgcaaaccaattatacagtgacaaggctgtagataagatttctatccacacctacttagcgaaagaaagaattaaagattttaacctagtaaatggtgaatggagttgtaaaagtatgccatctatttttatagatgaaagtcgtgcaaaacagatgaagaataaagaaatacttaagactaacattcaaacaggaaaagaacttattgaatccgtcacgaatcctgaagtaaaaaaaggaatgaaagaagctctgtcacaacttcaatcttcattagaaaaagttcaaagacaagaaaaaggattaaaaaaaggttttttctgattcaaataaaaaaagagaggactggtttttccaatcctccctttctatttatttatttgcgtcttaactcattatctatttgctgtgaaatttgtcctttaacggttctgattacctcattaatataatcaagaattggcttggggtctatagtcttatctttgtattccatttgaaaatgtaagtgttctcctgtgctgcgcccggtacttccactaatgcctattggttgcccagcttcaacagcttgtttcgcatttacaagcacactgtataaatgcccatagatagaagtaaaatcaccatgacgcacttctacataattgcccaaccctttattttttcctgtttttacaaccattcccggcattatcgaataaacatagtcgttgttacctttaaggtctatccctctatgatttgctatttttccagtaaatgggtcttttcttttaccataatgggaagttatcaccattgaatcaatgggcaaagataaataccttctttgcttccagtatgcaagccgttctgtagtcaaagcatcattgacgacaacagccttttctttttcttctatcaatttattttctgtcgttgctaatactggttctgctttaggaatatcctttttctgtaataccgtattaaactgacagtagccattcactgaaaaaaacaatgaataagcaaaaaacatgataattttattcttcatattgatatttttattacttttgagcaaaaatatacattacatggataaaaagcaagctatttttaatgaaaatgatattccatataaagaattagaactaataggaatatcaaaaaagcagatatggtctttggataaggcaaatatcacagctctattatctggaaagagaaccagtttactagacctttcttttcacgataacaatggagaagaaataagtatgaaaggaaaaataagtttgtactggaaagacagtaacaatgctggcgttaaaattcatccagtcagaccagaaataatgaatgatataaatcttaagccaaaggagttagaacgacttcaagataacgaaataataacaaaaactattaacaatgaaaaatatcttgtacaattagaccctgaaacaaacgaattgcttaaaacaaaaatcaaaagcatttcaataccttcaaacataaaaggtgttgagctggataagcaacaaaaggaaactctaaaatcaggtaaggaattgattttaaacgttgacaaagaaaaaattgccataagattagatttaaataatccaagaggaataaaattcctagacttcgagcagcaacagaaaatagcttatgaccggcataacccacaaattataggaactattcatactgataaaaacagaaatgaatatatagaatacatgaaaggacaaaagccgtcacttggaaatgaatctcaatctaaagtagaacataaattcaaattataaaatggaagaaaagaaaagttttgaagccctgcaatatagttatgaaaatgccggacaattccgtgccatagcagcagttcttggatattcagaagaatatcgaaatggtgatattatcttttccaaaggtaatgaaacatatacttatccactgaatacacttaaacttggcaatttaggagataatagagaatccttgttagagcaatctaaagaaagaataatcagtttctttgataaagaacaagctagcaataatttccaagaatatagccaatatttacgagaaaaccacaatgttgcaattataaaatgggatgatataaaacaaggtgctaataagaatgaaggatataaagacggatttacagtcattgaccttgaaaataaaattgcatataaaggagaagacctttatcgatatgcttatgaacaaaaccaaaccctagatggtaaaggttcatatgttgatatagattggaacaagtttaatgaagtaggagttaaaccagaaaatttaagccccgaagatattgcaaatatcagaaatgggaaaaaaactggtatgctaaatttttctattgaagatactcctgataatagaacacttctagacaatgaaaaagtgtcttataaaacagaaaatgggaaactccattttgaagggaaagcaacaactcttaaatatataacagccgagaatacacctgaaaataaatctaaattaaaagccaacgaaattgatttcaaagaagaaggtaaacgcatcaaaattgatggtatcaatgctagaaaactagcaatcgcagctattactgtagtttacccaatcgctgggattgctatcttactcattcctaaacgacaagaaataaaaaatgatttatcctttactaaggatgaaataaaagccctaaaagctgataatgtcgtagtaaagactaattcaaaaggagaaagaacattgcaccaacgtgacaaagatactaatgaaatagtatcaataaaagcaaaagacattcatattccccaaaaacttggaggagtagagctaactcctatgcaacaagaaaatctcaaaaatggaaaagaaattaccattgtaaacgaggaactaaacaaagctgcaaaagtaaaactagatttgaatgccagaaatggattatcaatcaaagatgcaaatactatagaaattaaagcgactgaaaagaaagaacaaacaatagggaaagaaagacatatatctgataaagaaagattagagtttgtagcccaaaaaggagctaaagggattgatgaaatatttaaagataaacccaccgaaatggctgcctttttagagaaacataaactttctaaggattatgcttcttacaaggaagtagaaaaaacatattccagctctagggaagctactaaacaaactgtcggagaacaaatatctacccagatagataaaatagatagttctattaaagcaacagcgaagcaagaagcatctattctcggatatggtagaacctacggaaaaaataatgatactccaacaatgaaactataatattatgctaacatttgacgattataaggctaaaatatccatcattcaaatacttgaagatttaggatataaacaagacattagcaaaggaaaggtttcgcctgtttttaaactaacagacggagcaggtaacaagttggatgaaatcatcatcaagaatcctcatagtgtacaagaacactactatgataggaattataaaggtggagatttaattcagttcatcaaaaatcatattaacgacttcccacaattccaacatcaaaatacatttgtgcgaattaatatgattttaggacattacgcaaatgagccttatagtcctaaatatgaagcattcaaagttgtaaaaacagaaaacaaatcttttgacagagataggtataaagaatttcctactacactcgctgatttaagatttctcacaaatgaaagaaatataaatcatcaagtcgtagagaagtttctcccatttatcacaagggttaaagacttacaaggaaacggcaattattataatataggttttccctatattaatccaacagataaagacaacaaagtaacaaattacgaattaagaaactatggattcaaaggaatggctgccggaggagataaaagtaactcgctttggattgctgatttttgcccacacccccaaatggcaaaacatatatactttgcagaatccgctttagatgctatgagcttctatcagctcaatgctaacaaaatcaaattagaagaaagtgttttttgtagtgtaggagggtacatttcagttaatcaaataaaaaacactttattgcgatacccacaagctaaagtacatacctgttttgataatgatttaaacggtaatttgtatgacattaaagtgtctggaatcattagtaatacagaagtgacaataaaagaaaataaagatgatgtgctgtttaaaactaagggtagagaattcactattaacaaaaatgacgtttcactagaaagttttagggaaaaaagcaaaataatagctcctatgatttctcataaagcagaaaaagcaaaagatttcaatgaaattctaatgaaacaacatgaacaaaaaaaaagtattaagttatgaatgatggaacaaacatagcttctgatgatattatattaaagcctaaattccgatattggttaatgaagaatttccttttaatcacattagcgattttcgtgttcatttttagtaaatatataagagaacatgaattattaaaatttatcagtggaacgatattagtattgttgatatttataattttctacagatatatttcaatgttactttgtacaaaatggattataactagagagcaaataaaaatatatcaaggagtactttcaaaaaggattaactacatagaattatatcgggtatatgattatgaagaaaagcaaagttttatccagtctttaataaacaacaccaatatctacatttattctggcgataaatcaacaccagaactactgatgaatggtcttaaagctaatagtgacataattcaaactatcagaaatagagtagaagaacaaaaaaagaaaaaaggaatatatgaatttacaaacagataatgatatgaaaagagtgcttttatttttttccctaatgttactgttgggcaacataaaaggactagcacaatctattgtcattgacccggcaatgattggaacattggtttattcccatcaggcgcaacaaggtgtactgaaagatatacaaagtgaggaaacaaaaatccgtaactttcaaattttaattcaacaaaaaatgagtcaaattcaatccttacaggaaaagacatacaactatctttctacagttaatgcagttgtgaaaaatggaaaggatattatttatgcttcaaccttagctagagacatagctaagtatcaatccgaagcagctaaatatgcagttggagaccccaaattattaaccataattgcaaaaacagagtatgaacttatcagtcgaagtgtagatttaatgatatacataaacaatatagcattgcaaggcggtgaaaaaaatcttatggataataagcaaaggatagatttatgtattcatgtggtcaatgaacttagacgaatgcgaggacttgcatacgctgtatgccgacaaatgaaatccgctaaaagagctggagtactaaaaacacttgtacccggacaatttaaatatgtaaatagtgggaaacaaaaagtagataatattttaaacggcattaaatggattagtaaaggaggatattaaatggataatgatacaatcaaagatttaggcttatgccctatttgccagaaaggacacataatgaaaggtagtttaggatattcctgtaattacttcaaaaacatgaatgacaaatgtacatttaatatttatcattcatattggggaaaagagattacagaagaaatagccaggcaattaataacaacagggaaaacagatatatttcatgacttccataataaaaaaggagttcctttttctgcatatctgactatcgaaaatggaatcgttattccttctttcgtaaatgaagtattagaaactccgtgtcctgtgtgtggtagagaaattgaaattttactaaatggatatgcttgtaaagggtattcgcaaaaggacaaggacaacaacagagtttgtaacctctatatacccaaaactattgcacaaagagaaataccattggaagcagcagaaatacttgccaaaggtaaaaaaacaccgtttatgactggatttaaatcaagagaaggaaatgatttttcttcacggctggttctaacagagaacttagatatttcttttgataatacattgtgtaagtgtcctaagtgtggaggaaacttatatataaacaaaaaagcctataattgttccaactatagaaatgaaaacataaaatgtgattttgtcatttggcgtgaaatgtcaggacgttctataactcccgaagaagcaatagaactttgcgagaaaaaagaaacacctgtgttaactggatttcgtgataaaaacgggcaaccgatggaaagaaagcttgtactgaacgatgattttaaaataaaactaatatgaaaataaaatttataatttatagccatttttttaaagagagaggaatgagcgtaaagggtgattggaattttccgcatcttccaaggataggcgaagaaatttcacctcacattataatgtttcagaatgaatttacctatcaaaatttattagaatatctaacagatgaagccaaaagtgattttaataaattcaatgatgctgaggatgatttagaaggaaattttaaagcatgggtatatgatgttatctgtgaggtcaatattgttgaatcaatacattatagaccagatacagaagactatacccaaattattcctgaaatttgtttaagtgatttaagtaattaaatattattgatatgcaaatgaataagactgatttaatcaaaatggttgctgaaaaggcaaataaaccaacaaaagaagtagcagaaataattgatagtttttttaaagaattatctcaaaatctaagagaaaaagatgtttctataaaagattttggtactttcaagaagattattcagccagctcggatagctagaaatccggcaactggagaacctgtagaagttccagaaaaggaagttgttaaatttaagccttccaaaaatatactaaacatgaaatggctatgatagaaataaacatccatattcctatagatggtgtgaacaatatttctataccaatccaattacctgtagttccaagggttggagaaaagatttatctatctaacaaacaagttgataatttgataagtctattagaagaacaatattaccacaatccacaaatagaagaatggaaagaatcaataagacggttcaccaatattgaggaagttgcatataatgctgcaaatggaacgatacacattgaattatcaactatttaaaagaaacaatatgaaaaagtatttatcattagcgatgattggtttaagccttatgttgtctggatgcagtaaagacgataacaacgaccctgatactccacctacaggagatataggaaaagtgcgttatgaagctaccgtaagcgacccagaaaacttcaagcttctaatacattatacagtaggagtagatatttcttccgaagctcccgaagaggctgccaaagaaattattgtagaaagtccatttacatttgagcaagaagccaaacaaggaacatatttatggctatctgcctaccctgtacctaaagatgaagaaaaccttgaaaatatacagctacctaagacagtagaagtaaaaatttttattgatgataagctgcataagtctaacagtggtgaaaattatgcaatggttcaacatatattcggacaggaaaattaccagtagtagaattgataccttttctgccagtactggagagaagccgggaaggaatttgataccgtacttttcccggctctcctggacatggacgaaaaaagaacattattatgataccaaaaaataaaaaccaataccactctcactacataaaagagtggtattttcatttgaattaataagatgaaagaccaaaaaagattattacacaagtgcctattagaagacattccagcttttgtaatatgcggaacagatatttgttccgtccaagcgatggaagcatattaccagatagcagtagaaaaaggttgcaatagcaattttttagaagacttgaaattagctatagaagatttcaaggcttttcaatgtgaggaacctgaaaaagttaaaatacccgattaaatcatggaagaaagcaaagaattacaaaaactatatggattcatgcaagcattcatttatataactgtttgcatagagattctactatttgttcattttccctttagtgaacaaattatgcccttattatcaaaaatggcaaaaattcctatctattctaatattctttatagtaaactatttacattctttattataatggttacttgcattggaacacgttcaaaaaaggatttagaattagacccgactaaacaaatcatttttcctttaatctttggtttcataatgttctttggaagtatatgctttcttttctttaaagaaaaagaagaaactagtttagaatggtataatatagcttacattatactatcgataattggagctacattaataaattcagctctagataacatttccaaacgtattaaatcaaactttatgaaagatagatttaatatagagaatgaaagctttgaacaatctaaagacaaggtagaaacagaatactctgtcaatattccgatgaagtttttctacaatagaaagtggcataatggatggctgaatatatgtaactgttttcgtggaacttttgtaataggaacgcccggaagtggtaaatctttttctgttataaattcttttataagacaacattcagctaaaggatttgcagaagttgtttacgacttcaaatttcctgaacttgccaaaattgcatattataattatcaaaggaacaagcaattagggaaaataccaagtaatttcaagttcaatgtcattaatttttctgatattgaatatagtagaaggataaatccattgaaacgagaatatatagaaatcctagcagatgcaacagaaacggcagaagcattatatgagagtttacaaaaaggcgacaaaggaagcggaggtaatagcgatttttttaaaacatcagcagtaaacttgttagcagcttctatttatttttggtctagatacgagaatggcaaatattcagatttaccgcatgtactggctttccttaatcaagaatatgatgtactttttaaagtcctcttttccgaacctgaattaaaatcactagtttccccatttgaagctgcatataaatcaggagccgtggaccaattagaaggacagatggcaagtctaaaagtacagttatcaagactggcaactaaagaatctttttgggtatttagtggcaatgatttcaatttaaaagtatcagataaaaaagaccctagttatctcatcattgcaaataaccctaaaacacaaagcatgaatagtgctttaaatgcacttatcattaaccgactaactagacttgtcaatacaaaaggtaactatcctacttcaatcatagtagatgaatgtcccacattatatttttatcaacttgcaacactactttctactgcacgtagcaataaggtttcaatttgtttgggattacaggaactaccgcaattagaagaacaatacggcaaagctaccgcaaaaactataacttctattataggtaacactttatccgggcaagctaaagctcctgaaactttagattggctacaaaaactatttggaaaagttaagcaagtaaaagaaggtgttaccatcagaagaaacgaaacaacaattaatatgaatgaacaaatggattttgttatcccggcatccaaaatttcttcattacaggctggtacattagtagggcaagttgcattagatttcggacaagaagataattttccaacagcaatgtaccattgcaaaaccaatttagatttaaaaaaaattaagaaagaagaagaagcctacaaagaactgccaaaagtatataactttgggacagcagataatagagagaaattactgcaaaaaaactttaagagaatatacgacgaagtagaaacagtaatagaacaatatgtataacataacattaccaattttaggcacaaggttaaagcaaatccgagagcatataggatattcccaagctcaattagcagaacagctaaactgtaaacaaaatgcgatttcaaatcttgaactaggaaaagggggcagcctaaaacttttatttcaagtgctgaatttttattctaactatgtttttatagatttaatatttagtgaaaagttttatctaatttctaatacagaagaagatgaagcacataaagctaattataattctgttataatagaaattataaaacaatcagaaaaaaactatgaggatgctatatcaaacgcccaaaaagagctagaagctaatcttcaaaaagccatcaatttattacagccctaataaaataaaagagagtattttgtactctcttttatttttcaatattactttaaagaattgataccagcccttttcaagttctggcgctgatgggcgtatatagcatgataaaatgataccgaattatcgtccctggtacaccctgaagaactcctttttgataccaaatacaaaaagctgccagaagccggacacaaaaaattgataccataaaactatagggaaaaagaagaaggacaaaatgccatattatatataaataatatgaatatgtgattaatatccttcactccccgaaacccagaaagagcaacacgagaatcttcttttccctatgtccatttcataaaaatgataccagtataataacaaatacttataatatgaaaagagagcatccaaatacataccttttaaaaatacaatcgaaatcaatctatcctatctaattctattatagctactttctctttatctggacttgcttcattttgtataagagttatatgtttttgggtatagcttttaataacccaaggagcaccacctaaatataaagcattgctattaaatatgatatattttccttctattttgtaagtaatatcaatttcatcgtaactttcccaatttactttccccgattgagtatctataaattgcatacctactcccatattgggaactacccaagcatcacaacgacctgtaccacgccatgaggtttgatatagtttttggggagtaagttctcctatttgtacctctggatttttatcatcacaacttgtaaaacttatgtttactaaaaataatgcccaaagcattaataagcaagattgtttaaaataatgtaccatgtattaaaatagattatattaatataaataccagacttcaaaattacaatcctataattgtgtatagatttgctaatgttgctattgaaatctgtttttctactaaattagaagcccatgaactaagaccatatacttccagcaaactctcatctctttcatctgcaaaaaatgaaaaacagagtttggtagttgggtcgtataaatattccatattagttgcctcatgatagtacttacagaaacctttttcattgaagttctccaaaaccatacatagcggagaacgcatttgaggattaatacgctttctagtattataacttatctgaatatcagagctgaaataccttgatatttctgccgatataatttgggcttttttgataaaaacattatcatcttcattttgccttaattccgcatccgtagcattacttttactcaatactatttggtcaccctgtcttgttgttaacacagcagctacatcatataaactttctcccgaagcagatgtctttgtcaatactcttgcaatcgtaatagacggagtataaagtcttgtaacaggaagaagaatttccttagaagtatcatcaaaacgtctttgaaagtttctttccagtacaaaatccgacattggatataatccttcttctattaaatcaatcactgtatgattttttgaatcatttaatgattttctccaagattgcaagtttatatttatgtctttaagtgccattgtagtattcactacacctgtttcatcttgaataccacccaatgtttttacacgtataaatatatcttgtcttttgtaaactgtagaatcaaaagtaccatcctttccattaaatccgaacgacccattaagtgaatcacctttatatacaagtgaagcattaatatttttctctaaggatttagttttctgttcaacattcgtatttgaatccgcattacccatatattgcgcaaaagctcttccacctgtataataaccaacaacaacaaaatctccatatgaatcaatgatagatgatataggagaggtatataaattattaataaaagaccttcttaaaaactgccttgcaaacactttattagaaccattggaacttaacaaggtaaatttgccatgagcaaacaatatattcatttccccataagcttgttcttttgattcattaataaaagttctaaatgtttcggttgtcgttttctttttccctatagaaaaaaatcctagatttaaagaaaatccacttttcacagttttacttattgatgaaaaatgcgtataattattaaaatcataataagcaaacgatgactggtcgttccagttaggataattttcatcaatatatgattcatcatattcttttagagattcaatatcaagtatggaatgcgtaaagttatcaaaatcacttggtatataattccccttaagcaatttataaccataacctagatatttatcagttcccccaatcatctcaccacttcttgtcaactcttcatcaaaagaaggttttcctgtaataacatctggaagagatggattacgttcttgaagaatcacatcatcacatgaataatcagtttcaaccactgtattttgctgtgcgcataagttcaaatcctctgaacaagctataaacaatggagctataacagataaaattattatatataatattgatttcataatcttttcttattgcagattattattagataaacttttcatatattcttctaaaggaattgttactatttcgtctggttttgcctttgatgtagtatttattattccataccaagaacctttaaatttaacttctctatcattagcctcatttccattacgataagtcatagtaatagtatagtcagcctttacactatatttctttaaataagtcgttactttaattaaagatggctcatcaacttctaccggaatagtcaccgataatgttttaggtatctcatacgttgtggaagtataaggagctctaggcaaaaatattgttgaatcaggcatttccccactactaaaattgccaggggcaataaattgcccagctattattgcaggacgtaaaaacatttgttcttcatttgccattggaattttcaaagctcctttttctgtataacaagaagtgtcttttacatctttttttgcataaattgtaatatttgatggtccagcaactgctcctgtctgaccatttgaatacacaacaacagggtctaattccgtcactacagctttaggttcaaatgctatttcttttactttaaatttatcctgaaactctaatagaaactcttgctgtggttgcttattatattttgcataccctacctgcccattactctttacttctatagaataattaaacacactccaaggattattggggtctgccgttcctaaatatgtctgattttcaatactaaaatatcctttatatgttgatggtataaggtcccaacttccagaacttatatcttccgagtcccaaacaaaaacaagtttattgtttgggtcattgttatattgaccacaaaccaatggcttattataagactttgaataaatcaaatatggtattccactactaggtggcaaaatctttaaatagaattttgaagaactataagctgaaagtatcaattcttttctcattccttgagtagaaagataaggctgtccaaccactccacctcctctgactttcaacgcaaaaggaagctctctaacagcatacatatttgatgaataaaattcatctgtctcaggataataagaataagatttcgtttctggcttttttttaaactcatctatattagaaaacagactcacagagtcagcaacagagatagctcttgactggattgaactttctgatgtttccgaaaaatcatataaaagttcagaacttttttcacaagagacaagaccaatagtcattgctcctaccaataattgacttacgccccaaaaagaatagaatttttttttcataaatatagttttaaaattatgtccttagaaacaaatacgcaatagagttcacgtagatttactttctgacgcacgcgaatacgccacatatacaaaaggacgaagagaaaacaaatccatgatgccaaaaacttttaggtaaatatataaatagctcttacagcatattacgttaagagctatttatcccaaaaagtcagttatattttacttaatttcccgaaagacttagccaaagacgaactgttcttttagccttattctgttctccttctagaatctttgcatcacctttcttatagcttatttttaattgagaatcagtctgtatagcatcatatagaggaagcaaaaagaaattatcttcatctaaaagtttttccattattaacggaataatatttttacccatcgcttgcatttctttaaactgtggtaatgttgtataagcgagagtacttgaactatatttagtttgtggatttattgaaatttcttcgttccatgaattaaacaaatcgttaaacttagtctttacctcacaattaatatttgcagctttatcaatgacagcttgtttttctgcatcagaaagttcaatatcttcttgtgctatctgttttgcaagttcctttatctccgacatatcagtctttgttctactctcgataaaagataccaaaattctaccatacaaagtgccagatagctcactccttttatgggtaatacgcaaataacgcccaagttttgactcccaagtaccgctactatatacaacacttccatgagtcatatctatactacttgttccccaaccatcaacagtagcattgctaccttctgtactagtctgttcataattacaagacgaaccatataaagttttagcatttttatactgttctataaaatcattgtaaaaagattctgggtcaatccatttgttagttatccccatagaataagcaatacaattatatgtacctgttgcttctcctgttacagaaatattatttacatctaaatttgggaaatcctttttaagattatccttttccgcttgtgtaggaacccttctcatagaagcagctctagtagtaagttcgtttggattggcattatcctccacagaaccaatctcttcgttttgctgacaagcaataagactaaaagagaaacctaataaaattaaaatttgttttctcataaagcgatatttttaagttagtaattattcagcaaatgcatttgcatatcgcaaatatacaacataaattgtatataatataagaattatactgtttttttcactgttaatgcttaaaaacatgatatatttgctatttttgcaatatacaatctaaattatactaatatggaaaaaacttatcattcattaaaagactttgaactatcctatgggaaaaatgctattgagagagcaaatgatttccagcagtacattgagcaactaaatgatttcggatgtaaaagctattggataacttcacatacaggtatcggttcaacaatggcaattgaaggcttcaacgaacctgttattgcatttatttctaatgattatttaggtatgtcacaaagagaagaaactaaacaagcaggtatagatgctataaaaaaatatggaacaggtgcttgcgctgcacaagtaataggtggttatctcgacatacaccaacagctagagaaagaaatagcttcttttgtaggacaagaagaagctattttattttcttccggatttggagcaaatgccggaatactaagagccttattgggtcaaaatgatattgcattgatagacccttatatccacacaagcgcaatggctggactaaaaggaacaaatataaaacgaattgggcataacgacctagaatatttggagaaggtactaaaagaagtcaaagggcaatatcaaactaaacttgtaataatagatggtgtatattcccaggatggggatttgtctttacttccggaaattattactctttgcaagacttatgaagccatgctgatgttagatgatgcacatggaataggagtaatgggagccaatggcagaggaacagctgaatactataactgtttaggtcaaattgatattattactggcacattcagcaagtcatttggttgcgtagggggatttgcagcagcttcgaagaagataatacaatacttgaaattttatgcggacagcaatgtgttttcagcagcccctaccccacaagtcacagcatccatactaaaagctttagagattataaaaaaagaaccacaaataagaaccaaactttgggaaaatacgaactatcttagaaaacggttgaaagaagaagggttcgacataggaaaatccgtttcccctatttttcctattatgataagagataataaaaaggtttacgaaattgctaaaatgttgcaagaaaaaggtatctttacaattggaattgtatatccggctgtaagaaccaaagaagcaagattaagggtcagcgttcttgccacgcataaacttgaacaattagaatctttagtcaatactcttaatgatataaataagaacataaaaataaaataataatgaaagaaaggagaaagcgaagaagtgccaaagacataaaggaaagcattattaatgcggtaacccatttaattgaaactgaaggattttctaatctaacagttacaggtattatgcgacaagctgaaattgagcctgtacaattctataacagatatgatgatttgaataagttcattgacgagtatgtaaaaaaatacgactattggtttagcgatattgtaaaatcacaaaaacaatctagtaacgataaagcactatatatgaacattcttgtaggtttatttcaatctttatcagaaaataaaatcatgcaagaacttctaaaatgggaactagctaataacaatgaaactagtcaacgtaccgctcaactacgggaattgcacacgttacctttatgccaaaaattctcaaacatattctccaatacagatattgacattgtaactatatctgcactaataataggaggaatatattatcttattttgcatgataaactttcaactttcagtggaatagacttaaaaaaagaatctgacaaacaaaaagttattaaggctataagcaaattgtcagacattttatttacgtttataccttcttctattactaaagaaaatattgatattataataaaaatgagagaagataatattcctgtagaaaaaatagcatattatacaggaatccctaaagaaattattgtttctatctaaaatatccgtccaatgaggaaaagcccattggacgggtctatagcctaaccaaaaatcttttgtttcacaaaacgaccctttttctgtactaaagaaaacggttctttttttgcttaatcaaagaacttatgtcattacggtgtttagttaaccaatcttccaaaataaacgaaactaaagatgaaataggtattttggctttagctttgagcaagccaaacacctcttttacatctgtatcaacatatagaacttccttgcaattataattttttcctttaatgtactctaataagtccgtcaaatccatatcactagagccattaaaattaaaaacttccgaagaagttgtttccatttctacatgaggtggttctttctcctcttcaacttcacatttagcttcttgaataggagtttcatttatactactcccatgcgattcttcacctcttatcattttagctatttccagaacactagaaatgccttcattttgctttttccttaatttatcagccatgcgcaaatatatacaataaatgaataattttataacaaatatctataaaaagaatattttattttattgctccttcttgaatgatataatcataagcattcttcaccttatcaatacactcattactaattgctaatgtatttatacgttccatcgcaacagaagctggtatttcatctgtaacaaaaccaacttgcttaagaatatcaactacctgttctttcgtctcatatcttaccgcagttctcatattgttaggcaaaaagaatattttagcttttacatttaaatactgtaacacttggataaaaaagcctgtactatccattgtaaatttatcgtatttaaatgggcatattattatatccgcagctttaagaatagttcccaaagcatcatcatcaatcttaccgggcaaatctattaatagatttccttgctcaaccttagtaaaatcactaataattttagcaacattagatatatcggtttgtataacctcatatttaggttcattatcataggtcgcaatatcttcttttcttctatccgataatgaacgctgaaaatctaaatccaatactagaacttcttttcctttttctactagatagttggcaaattgtatgcaattagtcgttttaccacaaccgcctttctgatttccaaataatattatcatatcttattctatttattaattaattttgttgctgtcctcttttctttttcctgttaggagatttatcttgctgtacatttatatgctggctaagaatatcacaaatagcatcaatcagattaaatccccttgccagttctgaatcttgttcaacatttattctttccatcttatcaagagtaactagagtaatcctatctttactatagccatcttttataatattgattcctaaatcatcagtacttatgattactttattctttttatctattagataaactaaattatcatcttcaacaaaaagaattcctttttctcttaatgtagaatgtaaatctgaactatgagccaaataactatttatcatatcagaatagacagtattttttttatccatatgctcttgaatcaaaatatcatcttttttcacatgataaattctacttaacaactcggcttctttaactgtagcaacattaaatttatttgcttcatacactctgctattatatctaaattctttcagcagttttttatcaagaaccaataaagccttatcatcaccatttataaatattgtgccattcattgaaaacctataaccgtaatctaacattgatttcttgaaactatccattgtatattttgttccatctttcaaaagaagattaattatactattacagtgttctacttttgcttgtttattaggctctactaaaagttccttcaaatccataacttccccacctttcaaaactctcttatttctataatcaattaatgtatatccataaggtttagtatgtccttttcctgtatgaaagactaaatttataccaaacttatctttcatcaaagtttgaagttctgtataggaaagtccttgcttatatttaaataaaagagctgttatctgttttcttctttcttcatcaggtgtatattgtttagctttatcttttatctgttctaattgaattgaagcgtgcttttcaccacccttatacaaaatcaataatccatccttttctcttaatttccatcctgattgttcaagtaacaacttatactgctgcactgtagaaaaagaaaactccatgtattttgaaatatcatctttagccttcaaagctaaatcaatattcattatttgatttatgactttctgtgagcgcacagcttccatattatcttttaccttctgtccattcttctgtactcgtgtagaaacaatatgtacatgattattttctgtatcagaatgaaaatatatcatataaggattatttccataacccattttatttatatattgcaaagctacatttttcaaatcctctgccgaatattcacgccccttacatgaaatcactgcatgaaattgttttgccttgaccgctggattagtcctacagacagattccatataagctatataatccgacttcttcaaattatctggattcatagcaaaattttctgcaacaagaagttcactcttgccttcctcattctttcgctcattataatcaataccagcaaaagaagttgccgcttttaaaactactactaccatatttataacttcacactgcaaatatacaaacaaatattcaataaaagaatatttcaatataatttattcatataataaatatataaatattatacattcatatattatttatatatataa

SEQ ID NO: 598 - DNA, 5513 bp, Bacteroides finegoldii
  source 1..5513: mol_type = genomic DNA
gttgctctcttccctatccagttgtctttgtagagttctcccgataacgacacacggtttgccagtatatgcaggtgggcttgtctgctgttcttctccgttccgctgtgcttcacgatgatgtactgatggttcatcaagcccatgcgctgcatgaagtcgttgccgagcttcacccagtccgcatcggtcatgcctgcactttcttccactgaagggctgacctcaaaccgaaggcagttgttctttaccttcggaaaatcaacaaagtaaggtttcatctcctgcaccatctcttcacctgtacagccgaaaagctcatggcggtgtatctcggtggctgctgcctccccgtttatctctttggcaaggtcgtactccagtgctgccgtgccatgagatatgctctttccttttgctatcatcgtgaaagtatctttttaagttcattgattagtgcctggttctcctcgaacacttccctgtactggcgcccaccgaagtagttattcagacgctggagtgttcctttcagtcgggctatctcccgaaacagttccctttcttcttccgtgtacctctctttgggtcgtccgcccagtgcgagtgtacggcagtactccgatgtgctgataccgcatcgggctgcctgttccgcaagtgccgccttttcaagtgcagtgcagcggaatgttatcttttctgttcgatttacttccatgtcgcaaaggtaatcttaaaatccttttgagcaaagcgataaaggcaagaatgtccgacaaggacacttcttgctatatatacacataccgcatgggaatacacacagcgctaacacactgcatagccacacacttttttcttttttccctgccattcccacaacggaacacggagagcggtcaagggttcgagcggaaaaaaccgcacagcgaagctgctcaggatttttttcagatccgaacttgcgaagcccttgacggcttcggagtgtggagttacctttgcagaccgaaaagagaaaaaaaacacagttcgcttcactaacgctgactggtcaaaggataccctgttcagatatgattttttttagaatagatacacttacggtagagaagtctgacttatcatagacatccacaagataaacacgaccttcactttccgatgcacaaatcgtgtatgtgataacacgtgctcccccagacttaccctttcccttagaaacaatggcaagtcttattttacggatacctgggctcagttcatccccctgcatggggttcttttccaatgactcgataaaatccttcatgtcagccttaaaagacttatacctttttgcaaggattttcgcttccctctcaaaatgtggggtagtctttacttcaaagctcatcaagaaatgcgtttgcgctcttggctggctgctcaccagcttcgattcgtttcacttcattcaagccctctcttattcgagtggctattttttcttctacggacactggcaccagtttaaaatcaccgatacgtgaagtcagaaagacggattctccctgaatagcacgaagaagggtcgctgtctgattcgtccgaaatttgctcaatggaattacttgcatatatcttaaacttttttgattgtgatacaaatgtaaccattgctaccgatattgtaaccaaattaatatactttaacacgcggggggaaaagcttcaataaccgcacaatcccccaacccccttataagggggctttgtctttgttttcccttttgtttttcatccgttttttccgaaagtttggaagcaatctcaatcttatgagcctgtttctatcttaacatcgactatctatgtctatcctcgcgcgcgcgcattatgcgagggaaaagccctccaagtacgacataaagaatactttaatacgacataaagaataaaaattaacactttaaaaacgacataaagaataaaatatacgacctttatttgttgaggtcgtactttattcgtatatttgctgcaaacctataaaacagcactatatgaaaccaactacttacattgattgggacggtctgaaagatattccgttcttctactgcgatacaaaggaagatgaggaaagcaaagacttcgacatatactatcaagggaaactggtactgcatgactacaaccattgcggacactacctctacacagctgctgtgctgttcagcagaatcaagaataaaacggcagactgggtgaacctgcgcaacctttggattctgcgtgattgcgtgcgtgagaattataatcacggcataggggtggacgacattatctttggagagaattttgatggcgagaacctctatacacttacaccgcttactaagaaacgcttcgattatttgtgtaggcgtattaaggagcttgacccatacgcaacaatctaaaaaagcaagtcctatgagcgaaaacctaccaaacaaagccgtattccagtcctatatatggacatgtgccaaatacgatttcagtccttacgaaaagcgtatcatatatcgtcttatcgaatttgcccaacgatggttggaaggtattaaaatcaaagaccatatgcacaaaatcgagccgacagactgcggtgtaaatatcactatgcctgtggcggatatacttcgagatgaaacagacaacaactataccaaagcaaaggctgcatttacctcactttcaaaaaagggggcggagtatgaagatgatgagatttggttctatacagccataatagagcaccccaaaataaagaaaggcacaggcgttgccactttccatgtctatgagcctgtttggagagcagctcttgatttcactaagggttttaaaaaatatgaacttgtaaccgctatgaaattcaaaagtgtttatgccatgcgattttatgaactcatgtcaggacaaactacacctttgtttgtgccgttagaaggttctgacgggcttcgggaaagattcaatctacaagggaaatatgaaagggtaaacgactttcgcagaaaggttattgatgtcgcaaaaaaagaacttgacaagttctctccttattcgtttgtggctaaggaggaaaaggaagggaagaaggttattggatggactctgttccctgttttctttgaagatagagaagaccctgcactacaggagcaagcacgaatggctaaagttacggcacggctccagttagaaaacaacgtatatgactaccttaaattctcctttgccttcaagtctgatgaaatcaacaagaacaagaaaacccttattgaagggcagaaccgcatccccgattttatgggattcttgggagaattgaagaaaggcgcacggctggcagaaaaccctaaaggatatgttattggcgctatcaagagaaaactcaaagaaatatagttaaaatcctgtttcagagaacaacgagaccaattattttctaattttatggctgataactttaaactaagagcttatgaaaaagattttatttttaagtgcatttttatttcttggatttggacttaattcttgttcggatactgatttaaattctccaacgaatgaagaaaatcaacctgtagagaataatacaaatgatattattaataatttagaatcatcttttgaagtaaaagcaagagcagaaggtgagcaagtttcttaccctgattattattgtggcagctattttaaagatggtatcttggtcataaaagtaaaaggcacaaatataaaagattataaaaaagaccttgaacaaagatgtaaaagccatctattcattatagaagagggcgttaatacaatgaatgaacttttgcaagttagagattttattaatagcaaagatgaaattggagtatggaaaaaattgggtatttctgcttgcggcatagatcctaaagacggaaaggtcgttgttatgttagaagatgcttccgaagcaaacatcaataatttcaaaaatgaagtaattaattcaccgctaataaaattttggcaactttctttttctgaaggaaacacctctttagaaagcaataaacaaaccagttctttagctataaccccaacccccatgataccaggtgcggatttttattgtgcccaaggtggaggaagcgtaggctatcgatgtgtttacaaaacaaaaccgtgtattgtaaccgcagggcatacagtcaaggctgttggtaataagattatagatactcaagatttaacaacaaagttaggagagtgtatcgagtgcgatgttacaggacatgatttggctgtatgcactcttgttgataaagttagctcatccaatattttcaagtataacaatacaactattcaaattgtggacggaacctatgacaatgtaaagaaagacaatatgatagcccttaaaggattttatcattctggtccaggcaaaattattgtagaaaaaacgaaattatcaggaagaacttttaccgaatttgcagttgcaacatataaatcacaagatggagatagtggaggtttgatattcagcccaaatactaaaagagccgttggaatccacattgcttctggtgaaataaaagttgatggtacatttcaaaaagcaggggcatttcttccatgttcagctattaaatggaaatatggaacattacctaagaataattaatataagcacagaaaagcaagaatgaaatttcattcttgcttttctgtttgttcctgctgataatattcataatacctcttgtagttgtccctgtccttggctgcatccacccataggtaacacatcagacaggcgaacaatagggagaaaacagcacaaaggattgaatacatagaagcgttcttgtccacatagctgccgtttttcattctgtttccctgccgttcaaagtccgccaatacgttttttaggcgattttcggcactttcaaggctttccctgtctatttctacctttttggctgttgcgtcctctatgcgcttcgtataggcttctacgcgcttcaattcttgaaacacaagttctaccgcaagctgcggatttactttgggcgttgtgtcctttctctttcgggggctgtactgtccctgcttataggtgtaatcctccgtctttgggtttgagggtgtttccataattcctgctgattgagttatacttcaattttttctgtgtcttctcgatgtgggcaagcgtatagcctttccctatctcgcttgccttgtattccgttccgctccggctcgttacatagtagccgttaagtttgccggtacttgcacgggcttcccttaccctgaagcccagtttttcgagttcccggctgaatccggcaaggtcaaatccctgcatccttgcaaggacaccgtccatagcctgttttatctcttccctgttggctttgcctatgtcctttgactgtaccaagttccgctctctggctatactgttggcggcttcc

SEQ ID NO: 599 - DNA, 4785 bp, Bacteroides finegoldii; identical to SEQ ID NO: 6
  source 1..4785: mol_type = genomic DNA

SEQ ID NO: 600 - DNA, 4148 bp, Bacteroides finegoldii; identical to SEQ ID NO: 7
  source 1..4148: mol_type = genomic DNA

SEQ ID NO: 601 - DNA, 2877 bp, Bacteroides finegoldii
  source 1..2877: mol_type = genomic DNA
tttcagttcttatgaaaaaaaccttctgttgttgaaatgctcatccccaaaatagaaaaacaaccccaaaaaagcaaagagaaacaagggtttaacattgagcaacactccattgagtgagtgctgccgtttggtcgctcccccttgggggacgggagggtgttaaagcgaatagcctttgttatgtctgatatacctttcgggatgcagctttttgtgctgttcctcgataacccctctaagctgtgcattctcttttcgcaagcggtctgccttttcttcggcttgcagcttcgagttctggaagtattttagaactttctggctttgtttctccgcttcgtgcttgtaatgctctctcatttgggtaaaatcctcgtaaatcgccttattttgcttctcagcccatttttcacgcccgattaatggcggtgtgccgatttggggtgctcttgtttcgtaattcagctccatactgttactcggataaatgagccgttcctctatcctgccgtaatactcccttacactgtcatgggtggcggtgctgcctttaatacccctctgaagcccgaatttgttctgcatgacttttccgtaacagtcctgcaactccgacagcttgcgtctgtcacccatgacctctttggcggaaagtctgccgtccacggttaacggcacaacgacacaatgaatgtgcggtgtccgctcgtccatatgtagggtgaagtccacaacgtttctccccccgaaccgttcgctgacgaacctgtagttctcgttcatccattgagtgagcctttcgggattctccccgatagctgtcatttcctcgtgacttcctgtaagaactacattcaggtgggtaacggcatccttgcggatggctgtctttcccttgtaaccctcctgtatgcgtctgttgattctttcctgtaatgaccttcggttcttgaaattgtcatagacatagactttcccattctcgcccaaatggtaaaatagatttttttccgaaagtttcggatctgcattgaggactttctttgtccggtctatatggctgcccaatccgccggctttaccggctgttcctttttcgatgtgaagtactgcgaatcccatttcttttccctattgtttttttggtttagtaatgcaatcaaagagggcggaagccctcccctttcggcttgtccgaaagcccacacttcggaacgaagtatagtgggctatacttccattaacgaaagcgcacaacaaaagtaggcaaaacgcttggaaattccaaatgctttgcctacctttgctgctgaccaaacggtagccgaccgatacgggagagctgctgacattaaaaagccgctggagtgaattgacggattcccgacatctccagcggcttgatgtatgtaagggtagaacggcagggtttgaacctgcaacccctcctctaaaaattgagtgctctgtccagttgagctacgtttacccttagttccttattttgctttttgggcttctttcttgtcttggtggttgaagtaaaccactccgacaatggctattactgaaacaagtccaaacattaccaatgctcccatgtttattctcctttctttttgtctttaacaagccaaagacctgctaaaagggttactactattgacaacgaacctcccacgtatattacccacttttcttgcacatccccgaaaattgaagaaagcacgactgccgtagttatatacttggcaatgtccattagccattttcctaattcttttttcatactgcaaatataataatttaattggaattattgtttatccccctcccgtcccccaaagggggagcgaccaaacggcagcactcactcaatggagtgttgctgttctttagtcctcaaaaggcagttgtggtaaatctccttgttctttcatcacatctattgtacctttcagctttgttgatgtcgtcttatattgtggataattttcattaatgtaagttgttgcgaatgttaccctatcaccgttaaatacgcacatgggatttatgtagtattcaatatccgctctacctcttgctattatttcggcactgcaaagctcgcctaaagctctaaaaatggatacttctgaataccctgtttcttccttgcattcgtccataaaaaacataaagctgtcttgattaggttttagttggccaaggatatatttaaagactttgattgatgcaggctttaaatcaaaaaaagccttgaatcctgctaaaaagaacttcgcaaaactttctgtatctacggctttatttcgtataaatacagaattaccaagaatttccccattaccgtcaactgcttttagaatggctgattcatctttatttgttcccttaactgatttagaaacaagtgcactccctatattaactaatgcttgttttgcaaagggattttctttgttaagctcgaaatctgatagtttacgctttgtcatactctactttcattttcatggtgatttttgatagtaacagtaacattgaatgttattattactttcacaaagatagtaaaaaatgaaagtaatagtttcttttaatgtgttatttatgaaactttcactttcttactatgaaagtcccactttcatagtatgaaagtcgcctatattgattatcaataacttatgctatgtttctttcttaagctcttaaatacccccaaaaatgccattttttagcttattttctttcatcttctgcactttcaaaaattacccaaaaaatgaaactaaaagagccccttcaaaagaggggctctccacgtccacgtttgggtaagttttgcgttttaatgcaaccttaaaa

SEQ ID NO: 602 - DNA, 2161 bp, Bacteroides finegoldii
  source 1..2161: mol_type = genomic DNA
aatgcttaaagatacaaaaaaggcaactaattcgcaatgaagtagttgccttaaattttattattttaggaatatccctatctagtttggggttttggaaagcagggtttaaataaaagtattcactacgtttgtaacgtttaaatcccatttccttataaaagttatataactgtttttttgcgatattactatcttgtctcatttgtttaaaattcattttagtattccattcatttttttgtttagaagggttgggatggctggcttctaattgtaatggaaaagcttttagaatcgcaattccatatgaactatttaatcgaaggagaatgtctttcgtaatgagtctaccatatccttttccgcgatactctggtaaaatttcaattcggtctaaatatagaatatttgaattggatgattcatcgatttcttcttgccattctttcttaaagctattagtctcataatcaaataatagacctcctaattcgttatgatcgagttgggaaaataaatcatcaacccaataattatcttctatacatagctcccataagaaaagtttaacgtctacttttcctattagcgaagaactttctttgtcgttctcatctatttggacttcgtatacctcgatgttatatttattgatataacgctcttcttcaatatttccggtgcttgatgataaactatagtttagtcttagaaatgtaataatgtcagtgtccataaataaagtattattaattttcgaatatagtgattgtttttgagaatggtgtcttgtttcctgctctttttttctgaaaatccccgtcggatagcgacagcattggttgaagttttttcggatgttttgtctaggaaatttggccttgtttggattataaccaagaaagtcgactaaatttatctataataatgctattgtactcttttttcttgttatatctggtaggaataatatatttataaatatcattcatttgtcttgtattttcatgaatttgttggtcccttttcggtagaccccgttggctcccaaaagcaaaatcccgcccttatagtctcctactagagtcggggttcgtttagaaaaggttgtgattggttttggaggattttcaaaatgctccgacgaggtcacagtgtacttctacttattcggagtattttctgattcatttcgattcggtgttggagcttttgaagttgtgtggcaacaggtcggtcaggttcatcttcaagtcatcgtcatattggtgcacattattcaaaaagaaaaccagctactgacggaagccaacatcaattgccttgcagcatgttatcatagagtaaatcactgctgcgtcctttactgaaaagtcgtttccgcagaatagccagttctttctgcccaaggtgatatctcggatttgattctctgccaggttatccaaaagttctgataatcttgcgaaaaacagtatccgccctcttgccttgggaagaaagaattactttttctgtggaaatgatgatgcggcagaaaataccgctgtgatctattctctaatgaaaagcatactataaattatagaatcgctataaacttattagatttatatagcgattctataatttatacggggactttattgggggcttacatctaatttatctttttgcaattttttttcttttttctcaggtaagtctactcccattcgtgatgctcgattgaacgttgcatttataattctttgtgaaaaaatctctttttggttaccaatatattcaatgtaattgggcttgccatcatttagaatgacaggtattttatcatttatattgaaaatgtaactgttctttaaatttaacgtgaaaaatttgttactccattgaattgcttcatggtcattaataaaggaatagcaatcagtttgaactttagataatgctgttgataaaatagcagattttccacttgtaaaagcaaaattataattaactttttcgggccttaaacaatcgcaactttgtgtaatacagattatatattctatttcaggggtgaggttactttcgtgtaaaataggcacttctagtttaaaaatatctcctgattttaattgatgtctccattggtacattttatttttacttgtga

SEQ ID NO: 603 - DNA, 380 bp, Bacteroides finegoldii
  source 1..380: mol_type = genomic DNA
gtacaaaatttccggttggcattattggcatagattgaatccgccgcaagcgccttaaccctaaccccggtcagttgttgttgcagatgaatacagtctttcaaacgtactccttcgttaaaagccttaaaggagatatgttctataaaggagattccgtctatctgtatattgttgactttggctccgaattcaacggatttggtttccttgcctctgataatggggcgaaggtaatgccggtcgatactcacgatacggttggacacttttttgcctgcaaataaattcttcccttgctcaaggactgtctgtatgaccgagaaacgtctttggtaatcagaggatagtgcaagcctgttcctgtaggatgaatgaag

SEQ ID NO: 604 - DNA, 175 bp, Bacteroides finegoldii
  source 1..175: mol_type = genomic DNA
ccagattgatccgcttcatccactaaccaatcctaaaatcgttagtgcaattcgtcaggaactagcgaatcgccttgatgttgagtccctccagttcattcttgccgagcattggaaaccttatcttgagaaccttcatgtctgtatgaccgatgccacctgttatgaaagtcac

SEQ ID NO: 605 - DNA, 144 bp, Bacteroides finegoldii
  source 1..144: mol_type = genomic DNA
agggaatagagaatggagtcgacctaattcactcgttgcaaaactttgacgatattttttaagcatatcgaactcggtaaaacctaaacaaggttcgatttctgagattttttgtatctttaccatgtgtttttattttagatt

SEQ ID NO: 606 - DNA, 128 bp, Bacteroides finegoldii
  source 1..128: mol_type = genomic DNA
acaccacaaaacaactggtaatgaatattaccgtttaaatgctcaatcagttgtgcatcggaaaagttggtataggacttcaagaccatcaaggctattttaccttcgggagaaaaataacttttacg

SEQ ID NO: 607 - DNA, 2667790 bp, Luoshenia tenuis (residues 1-1,333,895 of 2,667,790)
  source 1..2667790: mol_type = genomic DNA
agtatcatcccgcacgggcagggtgctgaccgtgcaccacaaccgcaggtgggacttggactacctaagcatgaagctgaatttaagcaagggttatatcggtaaaccctatgccattacctcagcccatcagcagtggcgccccgtgaaggggccgcagaaatggcgggatattccggagcatggcggcgggttcttttacgactggggggtgcacctgtgcgaccagattttgacgctggatccgaagaataaagtcaaatccgtatatctgcaaaccaaaagcatccatcgtcccctagtcgatgattttgccaaattgcagctgacgatggctgatggattgctgatcgaggtctatttaagcacatatgtgcaaaagccgctgccgcgctggacggtttatggcgacatgggaacctttgatgtcaaggacttcggctgccatggcggcacagtcaaatccatagcctacgaggcatgcgggatgcagatggaaaaagaaggagaaccggtggagtttcccatcgaagtggcgcaggtgcgagatggcatcaccagggatgatgaacgagaagccggtggcgctgcctgggtggagctgtaccgcaacctggcggacgtggtggacaatggcgcggagttgatcgtcaagcccgagcaggtgctgcgcaccatgaagctgctggacgcggcgttccagtccgcaaggacgggcgaagtagtccatacagatatttgaacgattctttaaccaactatagcccctgataagccctcctaaaaatatcggggcgtgttcccccttaaacttgaggccgagttgacacggcttcaaagctgaaagagcatgacgtttattattgaagcgtcatgctcttttgctgcctatcctgtagctgactgtgccggaataaaaagcacagcggatgcgtatgatgaacaaaagggttgatttggggaggatgcgtaaagatggagggtcatcagccgaccaatacagtgacgctaatgggaaaggtacaaggggagatcagcttcagccaccacgtgatgcaggaaaagttttataaattgacgttggaggtcccacggctcagtgggcaggtcgatgtgctgcccgttacgctggcggagcatctgatcgaagggatggcgcttgccgatggcgcacagctttggatcaaggggcagctgcgctcttataaccgtttagtggacggcgccagccgcctggttttaacggtcttcgctctggacgcggagctgattgcagatgacggcatgcctttaaacggcggccccaatgaaatatttctggacgggtttttatgcaaaccgccggtatatcgtacaacgccctttcagcgcgagatcgctgacctgctggtggcggtcaaccgggcctatggcaagagcgattatattccctgtatcgcctggggccgcaatgcccgcaaagccgggcagatgaaagtgggggatcatgtggtgctacagggccggctgcaaagccgagattaccgcaaaaccctgcctgaaggagaggtgacccgcacggcctatgaggtctccatcgtacggttagatttactgtaaacctattaccgtgtaaaaacgctgcttttagaaagcggcgtttttttgatggcggaaatgcagggtttataagaatgtagatttttttcgctggaacgccctttgatttcgcacgctaatatgttaaaataataaaaaagttatcttgagcgtggcaggtgcgtcaacagggaatgttttttacgattgcgttggcgttcgctgcacggaactgttgcggaattaaggatcataaaaggggtgaggccggtgcgcatcgcaagagtggaacgggatggacaggttttttacgcggctgtggagggaaaccttctccggcggctggagggatgcatttttgatgaagtccgtttgacggatgaaacctatcgtttagacgaggcgcggctgctttccccggtacagcccagcaaggtcgtggcggtagggattaattatgccgaccatatggaagaaatgaagcaccaaaagccggaggacccggtgatctttatcaaaccggcttcctgcgtgatcggtccggatgagccgatcgtccgcccgccgcaatcggcgcgggtggattatgaggctgagttgggcgtggtgatcggccggcgctgccagcggatcggcgcagacgaggccatggattatgtactgggctttacctgcgtaaacgatgtgaccgcgcgggatatacagcaaaaagacggccagtggatccgggcaaagggcttttatacctttgcgcccatcggcccctggatcgaaacggcgtttgattatacgcaggcggatgtggaatcgcgcctgaacgggaaggtctgccagcacagcaacacccgcctgttgatgaacccgatctccaagctcatcagctttatcagccaggtgatgacgctggagacaggagatgtgatcgccaccggtacgccggcgggcatcgggcccatggtggccggagatgtggtggagatcgaggtcgagggcatcgggatactgcgcaatccggtgatcgatcgggaatgacgggcattgatgagaaaggagtgggtcagcggtgagaaatgatgcaaagggtctgggggaggacatccagaacctttataaggctattctgacgttgcaaagcgaagaggactgtgtgcgcttttttgaggacttatgtaccatacaggagctcaaggcgatgagccagcgcatggaggtggccaagcttttgcgcaagggcggcacctatcacgagatcgccgaggctaccggcgccagcacggccacgatcagccgggtcaaccgctgcctgatctacggggctgagggctataccactgtgctgaaccgcctggaagcacaggaaacacaggaaaaataaaggggtaatcatgaatctgacagaaaatttaaatacgccacaaaaacaagcggttctgcacacagaggggccgcttttaattctggccggcgccggatcgggcaagacccgggtgctgacccaccgcatcgcctacctgatccaggaaaagggcgtgcgcccctggaatattctggccattacttttacaaacaaggctgccaaagagatgaaagagcgcgtgcagtccctttgcggcccggatggcgacgaggtcatggtttctaccttccactctttttgcctgcgcatcctccgccgggagatcgagcatctgcagccctttacgcggggatttaccgtttatgacgcggacgaccaggataagctgatgaccgcctgcatccgtaagctggggctggcggagaagtcctatccttcctcctgggcgctcaataagatcagtaaggccaaggaccgggtgatcggcccggatgaatacgtgaaggaatttggcggcagcgagccgttggcggcccagatcgcggagatttaccgcacctatcaggatgcgctgacgcagtacaacgcgctggattttgacgatctgatcatcaaggcgctggaactgttttatatgaacccggatgtgctggagtactatgcccagcgctaccgctatatccatgtagatgaataccaggataccaactacgcccaatacatgctggtgcgcacgctctccatggcgcaccataacctgtgtgtggtgggcgatgacgaccagagcatttacgcctggcgcggcgcggatatccgcaatatcctggagtttgaaaaggattttaaggatgcggcggtaatctatctggaacagaactaccgctctactggcaacatactggaggcggccaatcaggtgatcgcccacaacgccgggcgcaagcccaaaaagctgtggaccgagagtggtaagggagaccccatccaggtgatgcaggtcaacgacgagcggatggaggccgagtatgtggcagcccgtattctggatatggtggcgggcggcgaataccgccgggcggatatcgcggtgctgtaccggctcaacgcccagtcccgcgcgctggaaggcgcctttgtacgccaccgcattccctatcgggtatttggcgggctaaaattctatgcgcgcaaagaggtcaaggacatcatggcctatttgcggctgatggtcaaccctaatgacgagatttcgctgcggcggatcatcaacgtgcccaagcggggcattggggaaacatcggtaaatcaaatctttgaggcggcggccaaccatgccgatacggctatgggcctgattttagatgaagagaagatgaagcagctgctgcccaaggtttataaaaaggtggcgccctttggcgagttgatcgcaaggctgctggcctttaaggaaatgatgcctttgcaggaatttgccgagcacctgatcgaagagaccggtattggcccgggctacgaggccgatcaaagcgaggacgccaagggacggcttgaaaatatccaggagcttttgggcgcgatcggcgagttcgccatcaacttccccgaggctacgctggaggactatctggataacgtagcgctgatcagcgatttggataatttggacgaagggcaaagcgcggtaacgctgatgacgctgcactcggccaagggcctggagttcccggtggtatttttgtgcggcatggaagatggaatctttccccatctgcgcatgaatagcgacgaagaggcaaacatagaagaggagcgaaggctgtgctatgtggggatgacccgcgcgcgggaacggttgatcttagtctatgcccagctgcgcacgctctttggctttacccgcagctgcctgccctcacggtttttgcaggagctgccggaaagctgcctggcgggcggacggcgcccaaggacgcccgaacccaagcaggatgacctgttcggtacgatgggcggcgcaaaaccaaccacaaagagaggcggttacggagcgtctgccggccgcggcacgtttccggggggattccccggcggcccaagcgtgaaaaagcccgcgtcggccgcggcaaacaaacctgcggatatatccgcgatcaagcccggcgtaaaggtacagcacaagctctttggtaccggtcgggtgatcggcctgaagggcgaaggcgcgggcaccattgctcaggtggccttcgaaggcaaaggcataaaaaatctggcgctatccatggcgccgctggatgttgtggaggagagttagatggaggacccaaggcttataaggatgcgccagctggtggacgaggtgaatgagcacgcctaccggtactatgtgatggacaaccccatcatcagtgacgcgcagtgggataagctgtttgatgaactgcgggatctggaaaaggagaccggcacgatcctgccggattcgccctccctgcgcgtaggcggaacgattctggaagcttttacgccgcacactcacttggggccgctttggagcatggataaggctaagacccgcgaagaggtagaagtatgggcagcccgggcggaaaagctgtgggccgcttataatgaggatgcggtggagaagctgccgcctatccgctatacggtagaatataagtacgatgggttgaccatcaacctgacctatcgggaggggaagctggcgcaggccgccacccggggcaacggccgcacgggcgaggcgatcctggagcaggtgcgcaccatccctactgtgccgctttccgtgccctgcatggatacctttgaggtacagggcgaggggatcatgcgcctttccaggctggaagagtataataaaacggcgcaggagccgctgaaaaacgcgcgcaacggtgcggctggggctttgcgtaatctggatcccggagaaaccgcgcggcgcaagctggatatattttgctataacgtaggctattatgaggggcagccaccctaccgcacctatgcggagatgaccgccttcttacaggaaaatcgctttccggtgggggaattcttccgcccctgcgaggatctcgatcaggtcatggaggtgatcgagcagatcgacgctacgcggacggggcttgattatctgatcgatggtgcggtcattaagatagacgatctgcgtacccgcgaggtactgggacatacggaccggttcccgcgctgggcgctggcctataagttctccgctgaggaaatgacgacagtagtcgagacgatcacctgggaggtaggccgcaccgggaagctgacgccgctggcgcatgtcgcgccggtggaattggctggagccacggtaaaacgcgccacgctgaacaactttggcgatatccagcgcaaaaaggtgcggctgggcggcaaggtctggatccggcgctctaacgaggtgattcccgagatcatggggggcgtagaggatgcggagtatcccggagaagaggtgctgccgccagaggtctgcccggcctgcggcacggcgctggaggagatcggcgcaaacctattttgtccaaattctctgagctgtccgcctcagctgatctggcggatggtgcactttgcctcccgggaggcgatggacattgaaacctttagcatcaagacggcggaattgctgtttaaagagcgggatgtgcgacaggtagccgacctgtatgccttaaaggttgaagacctggtcgaccttgagggctttgcggagaaaaaagcgcagcgcctgctggatgagctggaaaagagcaagacccggccgctgggtaactttctgcacgcattgggcattccgggcgtggggcgcaaaacggcaagggatctggccgagcattttggctcgctagagaacctgatgcaggccgatgcgcaggagttggagcagatcgacgagatcggcggcgttatcgcccagaatatcgtgggcttttttgcagatgggcatatccgcaatggcattgagcggctgctggctgccggcatcgctccggtgcatgaggtggtggaaaaagcgcaggataacttctttactggaaaaacctgcgtgctcaccggtacgctatccgagttgaagcgggatgaggctaaggcgctaatcgagcaggcgggcggcaaggctgtgggtagtgtcagtaaaaagaccgattatgtcatagccggggaggaagccggctctaagctggataaggcgctgcagctgggtgtgacggtgctcagcgaggctgaatttctgcaaaaaattggatatttgggcaaatagcggttttatagcgattgcgcgccttttaatttgcgcgcaattctgctataataaattcgaatagtgcctaaggagagtgagcatgttggagcaacaggtcgcaagtatgacggggtacggccgggccaccgcgcagatcgagggacgcgagatgacggtagaggtcaagaccgtaaaccaccgttatctagacattgccctgcgcttgccccgggttttttcttttttagaggatgacatccgcaagatgctgcaatcgcgcctgagccgcgggcatgtggagttctatgtgaattaccgcaaccaccgggatgattccaaatcggtagaggcggatgtggcgctggccaaagcctatatggacgctatcgggcagcttagcgctagcagcggcctgcaaaatgatgtgacgctgagctttatcagccgcctgcccgaggtgctaaacgtttccgaaaccgaggaggatcaggacgcgctgcgggaattgatgcgcggcgtgctttccagcgcgctggatcagctcaaggcgatgcgcttgaccgaggggcaggagatggtgcgggacgtaagcggacgcattgagaccatctgtgcgctggtagggcaaatcgaggcgcgctccacgcagacggtggacgagtattatcaaaagctgcgcgcgcggatagctgaattgcttgaaaacgtgccgatagatccggatcggattgcgactgaggcggccgtatttgccgataaggcctcgatcgccgaggaaaccgtgcgcctgcgcagccatatgcagcagtttctcgataccctacggggcgagcagccttgtgggcgcaagctggattttatcgtgcaggagatgaaccgggagatcaacaccgtaggctctaaagcttcggatgcggagatcctgtctaaagtggtggatgtgaaaagcgagatcgaaaagatcagggaacaggtgcagaatatcgaatagagaaaagagatcagggtttggaggagttatgagcatcaggtttattaatgtcggctttggcaatatcgtatcggccaaccggctgatttccattgtcagtccagagtcggcgccgatcaagcggatcgtgcaggatgcgcgggacaggggacagttgatcgacgctacctacggccgtaggacccgggcggttttaatcatggacagcgatcatgtcatcctctcggcagtgcagccggaaaccgtggccaaccgcttggataataaggatagccagacgatggaggatgatgaggagtcatgatcgcaaggacgtataataagggcctattggtggttatttcaggcccaagcggcacgggcaagggcacggtatgcaagcgcttgcttgagaaacacccggagattaagctctccatctcggtgaccacacgccagccccgcaagggcgaggtggaggggaaaaattattttttccgcaccgagcaggagtttaaacaaatcatggaagagggcggctttttagagtgcgcccaggtgtatgattcttactatggcacccccaaaaagtacgtgcgcgaacagatgaacgccgggcacgatgtgattttggagatcgatattcaaggggcgctcaaggtaaaagagcggtttgaagaaggcgtgtttatcttcatcctgccgccgtctatggaggagctgcgcaagcgcatcaccgggcggggaaccgagagtgaagaggcgattttaaagcggttccaatccgcctatcaggagctggattttatgaaccggtataactatgttgtggtgaacgatgaggtagaggccgccgcggaccggatcgcggccatcatccaggcggaaaagtgccgcgtggatcgcaaccatcacatcaacgaacaattattaggaggcgtcatttaattatgctatacgattacctgggaaagttgttggaaaaagcggattgccgctatacgctggtggtagaggtcgctaagcgtgcgcgccagctggtggatggggcggagccgttggttgaaatggacgagcccaacacggtaacgatggcggtacaggaaatcgtagcagataagattacttttgagggcgtgcccgaaaagcgcgactaagcgctgagggattaacggcctttaagagaggggaatttggggatgttgcagggtaaaaacgtggtgctgggcgtaaccggcggcatcgctgcctataaggcggcagagctggccagcgctatggtgaaaaaagggatcggcgtttatgtcatcatgacccggcatgctaccgaatttgttgccccactgacctttgaaacgctgaccaatcaccccgtggtggtggatatgtttatgcgcaatacgccctgggaggtagaacatatttccctggccaaacgggcggatgcctttctggtcgccccggcaagcgcgaattttatcggcaagctggcctgtggaattgccgacgacatgctgtcgaccacggccatggccacgacggcgacgatggtgatcgcccctgcgatgaacatgaacatgtatgccagcgccgcagtgcaggagaaccttgccactttacagcgccggggtgcggtgatcgtccccccgggcgtggggcgcctggcttgcggagatgtaggacccgggcggctggcagagctgcccgagattctggatacggtctatgccgcgctggagccgcgcagggatttagagggacgcacggttttgattaccgccggcccgacgcgggaggcgatcgacccggtgcgctttttatccaaccgctcttcgggcaaaatgggttatgcgctggccgcggcagctaaggcgcggggcgcaaaagttattttggtcagcgggcctaccggtttgcaggccccagccggttgtgagcgcgtggatattttaagcgcgaaagagatgtacgatgcggtaatggatcgctacgcgattagcgatataattatcaaggccgccgctccggctgattttgcgcccaaaagctatgccgcccaaaagatcaaaaaggtgccgggccaggacgagctggtgctggaattggaaaaaacgccggatattgccgccgctttgggcgctgtcaagggcgagcgggtgctggtaggctttgcagcggaaacgcaaaaggttttacagcatgccaaagaaaagctgcgggataagaatatggacatcatcgcggtaaacgatgtttcccagccggatgcggggtttgacgtggacaccaaccggatcgttctgctgaaccgggatggagaggaaaaggcgttgccgctgctgagcaagcgtgaagtggcggaccggattttggacgaggccatccgctatctggcttgacggtaagggaaaacaagcgtgcggcattgcgtccgtgcgctttttatttgtaggctaaaaagggggtgcagctatgccgaaagtggcccaggtgatcgttgacatcgcccacagccaggtagaccgggtgtttgactatgccctggggacgctgcgccctgtgcccggttcccgcgttaaggtgccctttgggcgcacccaaactgaagggtatgtagtcgcgctggccagtgaaacgcaggtgccgcaggataagctgcgcccgatcacggctatcctggatgacgcgccggtgatcgctccggcgctgatcgatctggctttttggatgcagcggcattatcactgcctgctggcagaagccctgcggctgatgctgcccccgggcctgcggggagagcgtatcaaacccaaacaggccctgtttgccgcgttggctgttgacgaacaggcggcgctggagctggcacaggggcttgcccgccgcgcgccgcgccaggcgcaggcacttttggcgctaatagagagagggcaggtattgcccgccgcggcgctggaaaaggagatacccggcgcacgagaggcgctgcgcgctctacaaaaaaagggcgctgtcgtgttgcggcaacaagaggtagggcgcggcgcctatcaggatcttaaaatggaagccgcgcagacgcaaccccagctcagcgccggacaggcaggctgcgcggatgcgatcatgcgcggggtggaagggcatagcggcgtttatctgttgcacggcgtgacgggcagcggcaaaacagaggtttattttgcctgcctctcgcgcgtgttgcaagaggggcgcacggctattttgctggtacccgaaatatcgctgacccctcagatggtggcccgctttcgcgcacgctttggcgcgcaggcggcggtgctacacagccgcctttccctgggggagcggtttgacgagtggtggcgtatccgcaccggccaggcgcgggtggccatcggcgcgcgttcggctatctttgccccggtggagcagctgggtctggtgatcatcgatgaggagcacgaatccagctaccgggccgaaaacgccccgcgctacgatgcggtggaggtcgccgcgcgcagggcacaaaaggagggggcaacgctggtgctgggcagcgcaaccccttcgctggagcgctatgccgcggccagggatggccgtatttccctgcttgagctgccagagcgcatcggcgggcgggcgctgcccgcggtgcaggtggccgatatgcgcgaggagctggcaaggggcaaccgttcgctatttagccgcgcgcttgccgaacgcctggagggctgcatagcccggggtgagcaggcgatcctctttgtcaaccggcgcgggcacagttcttttgtatcctgccgcagctgtggctatgtgatggaatgccccaactgtgcggtctccatgagctaccacacccatcctgaacggatggtatgccattattgcggacataccgctgcggtaccccagctttgcccggagtgcggcagccgctacatcaagtattttggcgcgggcacgcaacaggttgaaaaggccctgcgggaaatgctgccccatgctcgggtgctgcgcatggatctggataccaccaaaaccaagggggcccatgtagagattctggaggcgtttgagcggggagaggcggatatcttgatcggcacccagatggtgaccaaggggcttgactaccccaacgttacattggtaggcgtattggctgcggatattacgctgaatattccagactaccgctcgcccgagcgcacctttcagctgatcacgcaggtggcgggccgggcgggccgggcggatctgagcggtcaggtcgtgatacagacctactcgcccgagcattatgcgatagctttggccgcccggcaggattataaagccttttttgagcgggagatgcgcgcgcgcaaggcctgccagtacccgccatttgcggtatttgcgcgggcgctttgttctgccggccagcaggatgaggcgatgcgcgccgccaagggactgcaaaagtttattgcgcgctatatgcaacagcaatttccgcagtgggagggctgttgcttggccagccatgtgcagatggcgccgctaagcaagatcaaaaatgaataccgcgcccagcttttgctgcggatcgcaaaaaatgataaaatgaaatatgcgctggaatacttacaggtagcctttgaacaatggcaggcccaggaaaagtggaagggacatgcctattttgagatcaatccggtcaacatggcctaaacaagcaggaggatgaaaaaaatggcgattcgatcgatcgtatttgaaggggatgcgctgctgcgcaaaaaatcccgcatcgtgacggattttaacgaccgtttgcacgcgctgctggacgatatggcggagaccatggccgcggcggatggcgtgggtttggccgcgccgcaggtaggcattttgcgcagagccgtggtcatcgacgtgggcgaaggcttgattgagctgatcaatcccgagatcgtcgcgacagagggcgagcaggacgggccggagggctgcctgagcgtgccggaacgccagggtatggtcatccgccccctgaaggttagggtcaaggcgcaggatcgtaacggcaactggttcgagttagagggggaagaactgctggcccgggcttgctgccatgagatcgatcatttagacggcgtgcttttcatcgataagatgtaccaggagtgtagcttcgaagaggaaaacacgcaggaggagcagggcgaataatgcgcattgtatttttaggtacgccggagtttgcggttccctcgctggagatgctttgtaaggagggttatgaggtagtggctgccgtcacccagccggaccggcctaaagggcggggtaaaaaaatgctgccgcccccgatcaaagttgcggcgcaggcgctggatattccggtgttgcaatttgaacgcatccgcagggcggaatgcgtggcgcagctggaagccttggatatggatctgatgatcacggcggcctatgggcagatcctctctccaaaaattctggagctgccgcgtttgggctgcatcaacgtgcacggatcgctgctgcccggctaccgcggggcggcgcctatccagtgggcgatcatgaacggcgaaaagaccacgggcattaccacgatgtttaccgacgcgggagtagacaccggcgatatgctgctgcgccgtgaaacccctatcggcccggatgagaccggcggggaattatatgcgcgcctggccgatatcggcgcccaggtgctaaaagatacgttgagcgaactggaagcgggtacgctcacgcgcacgcctcaggacgaagggcaagcctctcattatccgatgatcgataaaaaagtggcctatattcattgggaccgcacggccgcacagctgcacgaccattgccgcgcgctggacccggcgccctttgcctggacgcggctggagggacagagctttaagatcgcaaggatcgatcccgtggaatgggcaggcgaaaagcggcagccgggcacgattttagcggccgaccccaaggcagggctgatcgtcgcctgcggagatggcgcggcgcgcgtgggcaggctgttggcgccgggcggcaagtggatgagcgacagcgagtacctgcgcggcaaaaagctgccggtcggcgcaatttttgagccgtccttgccgctatgaccgggttggatgcgcgcaggcaggcctatgatgccctgcgcgatattgaaaataagggcagctttgcaaacctgcgcctgaaaaagacgcagctggacgatgagcgggatgcgcgcctgacgacccagctgatctatggcacgctgcaatggcagatctatctggactattgcctgcagggctatattcgcgctaaaaaagtacacccgggcgtgcgcacgcttctgaggatgggcgcctaccagatcttgaaaatggaccgggtgccggattccgctgcctgcaacagctgtgtcgagctggcgaaagccgtagggttgggccggctatccggctttgtcaacggcgtgctgcgaaatctgaccaggacaaaggatagcatttcgctgcctgatgaaaaaaagcagcccgcgctgcggttatccgtagaatttggctggccgctttggctggtggaatattttatcggcgcgctgggcttggaggaggcctccgggctgctgcgccatcaaatggattatggagaagtatgcatcaagcccaaccggcttaaagtgagcccggcgcaatgggacagctggcgtgcggaccaggcgggacggctgcgccccgcgccgctggcgggggatggatactactggaaaggcgtacccgcgcaggagccggcatttaacgagggctggtttaccgtgcagggggaggcttcccaattggctgcgcggctggtggaggcgcggccagggcaaaaaatactggatctgtgcgctgcgccaggcggaaaaagctgcgcaatggccatagaagcacagggtgaagcgctcatcacggcctgcgacctgcaccgccaccgggttcagctgatcgaaaaaaatgcgcaccggctaggggtggcgcttgaaacgctgcagtgggacgcttcgaagccgcggccggcctggaacgatggctttgacgccgtgctggtggacgccccctgttccggcctggggctgctatgggaaaaaccggacctgcgccaccgggtcgttgcgcaggacattgcggcgttggcaaagctgcaacaggatattctgcactgcgcggcccgctacgtgcgcccgggcgggcggctggtctatgcgacttgcaccatgacgcatgaagaaaatacggagcaggtacgggatttcctatccagccataccgattacgaacaggacgatttttcgccgcttctaccttcaggcctaaaagcccgcgtggtagacggcggattgcagctgtatccccatgtggatggaacggcagggttttatatggcgcgcttcaggcgcaaggagaggtaatggaaggcaaagcattattggatttttacccggaggaattggaggcctattttaaggcgcggggtctgccggcttatcgggctaagcaggtcttttcttggctgcataaagggcgggggatcgacgagatgaccaatctgcccaaagcgctgcgcgagcagctggcccaggacatgcggctgggcggcgtgcgcattgaaaagagtgtgaccagcaagctggacggcacggtcaaattcctgtttgctctggaggacgacaatattatcgaaggcgtacttatgcattataagcatggggatacgctttgcatttccagccaggttggctgccggatgggttgcgccttttgcgcctctacccttgcgggccgggtgcgcgacctgcacgcgggagagatgctggggcaggtactctccgtcaaccgcctgctggaagaaaagggcgggcatatttcaaatatcgtgatgatgggcagcggtgaaccgctggataactatgaggagtccatccgctttttgcgcctcgtatcccacccgcagggggtgcagatcgggctgcggcacatctcgctgtccacctgcggccttccccagcagatcaggcagctggcccgggaggggctgccggtgacgctgtgcctgtcgctccatgcaccggatgatgcgctgcgccgcgagatcatgcccatcgcccggcaatatgggctggatgaagtgatgcaggccatgcgggattatgtacaggccacggggcgaaggacgatttttgaatacgcactgatccgcggcgtaaacgatgcggatgagcaggcgatacgcctggctaagctggtgcgcgggatgcagtgccatatcaacctgatccccattaacgccgttgtagagcgcaactgggcgccgccgcctgctagccgcattcaaggctttttaaatgtattgaataaatgcggcgcatctgctaccatcagaagggaaatgggcgacgatatcgagggcgcatgcggccagctgcgcaggcgctatttggagcgggaggaaccctcatgcaatattcagccgtaacccaccgtggctatgtgcgggaacaaaatgaagatgcctattatttgcccggggcaaagggcgcgcctggcaatctggccattgtggccgatggtatgggcggccaccgcgcgggcgaggttgccagcgccatggccgtgcgcagcgcggttatcgcctttggccggttggaagatacaccggggatgacgctgcgggaaaagatatttcaggcgatgaacgaggccaaccgggaggtatatgaggccacccaggaaagcgagcaatacgccggtatgggcaccaccatgaccttggctgtgttggaagagaaaaagatcgaccttgggcacgtgggtgatagccgcgcctatctatttcatgagggcacgctgcgccagatcacgcgggatcataccctggtgcagcagctgatcgaccttggcgaattactgcctcaggagcggcgagggcatccgcagggcaacatcataacccgggcgctgggcacagcgcgcattgtggatgtggacctgatcgaggaaaaatggcaacgtggcgacatgctgctgctttgcagcgatgggttgaccggcgccgtaacggatgaagagatcgccgcggcccttggcgggcaggagccccaagtggcggtgcaaacgctgctgggcctggcgcttaagcgcggcggccgtgacaatattactatagcgttgatattgcacggaggtgacgcgcaatgaaggaccggttggagggtctggtcatagccgataccttcgtgctgcaagagcgcatcggcgccgggggaatggccctggtctacctggccaggcgggtgagcgatggtttgccggttgcggtcaaaatcctgcgcaacgagctggcggaggatcaggtttacgtgcgccatttttggcgggagggcgaaaccctagccaacctgtcccatcccaatattgtcaaaatttatgggattggcgagcaggatgacttattttatatggtcatggaatatctgcctgggcaaacgcttaaacaatacatagaccagcgcggcgtgctggaagtggacgaggcgctggatatcgccatgcagatctgcaatgctatgcagcatgcacaccagaataacgtgatccatcgggatattaagccgcaaaatgtgattttgagccgggaagaggatggacacattcacgtaaaagttatggatttcggcttggccaaacccgtgacctcggccacgcgcacgatgatggatggggtattaggcaccgtgcaatacatctcccccgagcaggccagaggcgattcggcaggtaagggctgcgacatctattcgctgggtgttttgatttacgaaatggtcaccggaaccgtgccttttaagggggatacgccggtggcgatcgcgctgaaacacatccaggaaacgccgccgccgcccaccgtgtttgccccgcagcttcccagggctttggaaaaaatcattctaaaggctatggaaaaagagccgggcaaacggtattccagcgccaaagctatgcgcagggatctggaactggtggcgctgtacccggagggcgattacgtccaggacgaatatgtggacgataagacccgtatgatcgacttgaaggatcacctgcctggcgatgatgagtgggaagatgaggatgaagcgccggcagggaaggatcctgtagccgtggggcgcatcgtgcgtatcttcgtggcgatggtcatcgttttagggttattgctgacgatgttttttattggcaaccggatgatccagaacagcgatacccgggtcaacattaaaatgccttccgtagtggggcagaccgagcaggatgccacccatgtcctgcgggacgaacgcaacctgcgcgtcaatgttaaacaggagcgtaacgatacggtgccagcgggaaatgtgattgaacagtacccgctgccagaggcgatcatcaaagagggtgaaaccgctacgttgatcgtgagcatcggcccggaaaatgtggatgtgccggacctgaaaggcatgcagctggatgcagcgcgcacggagctggagcgggtagggcttaagatcggtaacgtgtatgaggagagcaacacgtataaaccgggctatatttttagacaggagcccccggcgggagaatccatcacggcgggtgaagcggtggacatctttgtcagcgcacaagatgaatagatagagagaaaaaagaaaatggggggacgcttgacatgagtgaactgtatgagcgaccgatccgcttggtgcaaaaccgcatcgggcgcaactacctgggcggcagggagacggaccgtttccgtggcctgccgcaggagcagtgtgtggacgacgaccggccggaatcctgggtaggttctactacgcgggtcaatcgcctggagctgggtgaggacccgaataaggggatggcctacgcggctctgcccggcggcgggcagatgcttttaaaggagctgatcgaccaggcgccggaacagtttttaggcgcagcgcacgtgcgccgctgcggcgcggataccggcgtgctggtcaagctgttggacgcgcagcaccagctgggcctgcaatgccatccagatcgcgaggatgccatgaagtattggaattctccctacggcaaggaagaatcctggtacatcatcggaaagcgcacggacgcggatgagccgccttatgtgctgctgggctttaaagagggcgccagcattgaagaatactccaaatattattttgccggcgacgtgcccagcatggaaaaaatgtgccacaagatccctgtagaggtgggacagatgttccatgtggcggcaggttgcccccatgccattggcggcggatgctttgtgatcgaggtgcaggagccttctgatatcacattgggtgcacggcgcaagcattttgacgacccggcacaagaggcggcgtttgacgaacggaccatgcgctgttatcattacgagggcgccagctatgaggagaatctggccaaatacctggtggagccggaggttctccagcagacgccgcaaggccgagagcttaagctgatcggccggccgtataccagctacttttctgcaacgcggctggaggtaacagggcgtttgcagcctacgcagactggtgcctttaccatcgccatcgttttatccggcagcggtaaacttgaaacgcgtgcagagagcgtgcaggtaaaacagggggacgagatttttctgcctgcgggcgccaaagatgtggcctggcaggcggatggcgaggggctttgcgtgatttgcagccacccgccggagatattttagcgcattttaaactggaggtttgaacttgccggtacaagaggatcagctaaaaaacggaatcatcctgcagggcataggcggatactatgaggtgctggatgccgcgggccaggtacatacctgcaatgcaaggggaaaactccgccaggaggtgggcaaacccctgacgggagaccacgtatcctttttgccggccaaggatcagcaaaacggacgtatcgagcacatcagcccccgtaaaaatcagctggtacgcccgcccgccgcgaatatcgaccagatgatcgtcgtgatcacggccggtgtacctgcggcggatctgctgctgttggacaggctgcttatccaggcggagcagtgggagatggaagcggtgctctgcatcaacaaatgcgatatggatgaggatggccgtgtagaagagggcatccgccgggaatatgcggctacgggttatccggtgctatccgtttcggctaaaaacgcggaggggattgataacatcaccgcccgcctgaaggggaaggtcacctgctttgcggggcaatccggtgtaggcaaaagctcgctgattaacctattgctgcctggtgaggaaatggaaacaggaggtctcagcaaaaaactggcgcgcgggcggcataccacgcggcgtacgcagttattgcgcgccgggccggacacctttattatggatacgccgggcttcagcctttttgagaccaatattggcaccccggaacttttacaggaatattatcctgaataccgaccctaccaagggcagtgccgctttaacggctgcctgcacgaccgggagccggattgcgctgtgcgccaggcggttgcccggggagaactagccaggggaagacatgagcgctaccgcacgttgctttcggaggcgcgcgaacaatggaggagacaatatgattaagatcgcaccatcgattttggcggcggattttgcagccatgggacaggaagtggcttccctgcaggcggcgggggcagaccttgtgcatgtggacgtgatggatggtcgctttgtgccgaacatctctctgggacaaggtatggtacaggccatccggagaaatacggctttgccgctggatgtgcacctcatgattgaagagcctgagcgctatatcggtgaatttgccgctgccggggcggacgtgatctccatccacgcggaggccacgcggcatttgcaccgggcgctgggcttggtacgcgaagctggagcaaaggcgggcgtcgtgctcaatccggccacctcaccggaggccttacgctacattttggataaggtcgatctggtgctggtgatgacggtcaaccccggctttggcgggcaggcgtttatcccgcagatgctggagaagatcgcctgcgtgcgccggatgatcgacgaatccggatatgcgatagaccttgaggtagacggaggcattgttgcgcaaactgcccggcaggtggctgccgccggggccaatgtgctggtagcgggttcggctgtattcggggccgcggatcgcgcacaggccatcgaggagcttaaaagccatgcgcgcgtttgattgcctgattgtactgggcggcgcccggccgtcgctggaacaattgcgcgacctggcgcaggcggcgcggtgggtgatcgctgcggataaaggcgcggaatacctgttagaggcacaggtgccgatcgactacctggtaggcgatatggattcgctcccgccggagcggctgcaggatccggcgcttgcgcataccgaagttaaacgctacccgacccataaagacgataccgacgccatgatcgcagccgagctggcattggccctgggcgccggttctatcgtatttgcggcggcgctgggtacgcggctggatcacatgctgggcaacatccagatcctatataaattgcatcgggatggcgtgcgggcgcagatcgtgcaggggagggcgcgcgctttcgtgggcagcggatgctttaccattgagggagaagtaggcgatacggtctcgctgtttccgctgggccgggcgcatatcgccgatacgagcggcttggagtatccggttatggatgcggacctgcccgcagaccggcccttgggcgtgagcaatgtgctgaccgagcctcaagccgcagtaaccgttgaaaacggatacgtcctggccgtggttccgggtgaagattagcgtgaaatccggtatccaacgatttacgtaaaacagaaaaaacaataaaatatcgcttttaaaagcgcgcaccaaattgatgcggcatacgtatactacagtatgttcaagcaaaagggggtgggcgctttgggcaggtgccgcgcaacaaggggaaggtcctccggttgtacgaaagtgctgggtatattactaatcgccgtgggatgtatcctgattatttcctgcatcccatcctggttttgggcgcttatcaccggcgcagcatttatcatagccggcgtattgtttttgaaatgccgctagtgaaaatggaggaggggttatcaatgaaatttatctgtatccgtgcacccaaatgcctgcgcgggattttgcgcaggtttgcaggcaagaacaacggctaaagccctgcaacaatcacataaggtgaaaagaaaaaagcgaagatcggtttgatcttcgcttttctatacgttttgcctcgatacgagccattagatggcgcgctgaaccttgccggagcgcaggcaacgggtgcatacatgcatctttttcgtggtgccgtccaccatcacgcgaaccttctgaatgttgggcgcccaaatgcggcggctcgcacggtgggagtggctgacagcgttgccgctcatcacaccctttttgcaaatctcacaatatttagccatatctgattccacctccttcaaggtaggcctttaaatctatccataaaacaaaagtattttaccattgtttgtgataatttgcaagctaaaatcgtaatctaaattaaaattaaacttgtcgaaatccctctaaatcgattgataacaggcgattgcgggcaacctccagataacatggttgcgaattcgcgtaaaatatcgtatgatatatgggataaaaagtattttgcgcaaagcggccgataggaggtaacgtgtatggcagcaaaaattataaatgatttagggtatatcagcataaccgatgacgtcatcgcgacgattgcgggtaccgcggctgtggaatcatacggtgtcgtaggcatggttgccaagcgggctaccgatgggatcatggagcttttggggcgcgataatatcatgcgcggcgtccgggtagatacttcgaatgaccgtttggtgatcaacctgtacatcatcgtacagtatggcatctctatcgcccaggcgggctcttcgctggtggaagcggtcaaattcaatgtgcagaagctaaccggcctggaagtggatagcgtcaacgttatgatccaggatatccgcgtgtaagggcttggttgagggaggaaaacagaattgtctattcaggcgttagacgggcagggcctaaaacagatgatcttggctggcgcagcattgctggaggcaaatgttgcgcatttgaatgctttaaacgtgttcccggtgccggatggcgatacgggcaccaatatgtcgcttacgctgagcgccgtcgtgcgcgagctgggcgcgctggatgaccaggcagggacggatgtggtttctgcggccgtggcgcgcggctctttgcgcggggcacggggcaactcgggcgtaattttatcccagttgttccgcggcttttctaaagccatgaccgataaggccatgatggatgcggcgcattttgcaagcgccgtgcaatccggcgttgagatggcttacaaagccgtgatgaaacccaaagagggcacgattttaaccgtggcgcgcgccatggcggatacggccaagcgcgctgcacgcagcgggctggatgttttgggcgtattggatgcgatgctggagcagggtcagatcaccctggaaaagacgccggatatgcttccggtgctcaagcaggccggcgtagtagacgcgggcggaaaagggcttttactgatttatacgggtttccgttattcgatcctgggccagccgctgcccgagggcgccgctgtagaaaaacagcgcgagatcgaggtggaatccaccgctaatgaggtggcggagttcaaaagccttgcggatattaaatttggctattgcacggagttctttgtcgtccgtctgaaagagggcgtgggcgaggctcagcaggatgacctgcgcgacaagctgggcgccatcggggattccatcgtcgtggtgggcgaccctgagatgatcaaggtacacgtacataccaacaatcccggccaggccttgcaatacgcgttggagctgggcgagcttggcccggtcaaaatcgaaaatatgcgtgagcagcaccgagagatcatgcgtaagcagggcagacccgtggacgaggatgcggcgcctgcggcgcaggaaaaagaggttgccctggtatcggtttccgttggcgaagggatcggcagcatctttaacgatctgggcgtggaccgcctgatcgaaggcggacagagcatgaaccccagtattgaggatatcgcccgagcagtggaggaaaccaacgccaaaacggtgtttgtgctgcccaataactccaatatcatccttgcggcccagcaggttaaggatattttgccggatcgcagggtcgaggtgattcccagcaagtcgattccgcagggcatctcggcgatcctcgcttttaacctggatagcagtgtggaggaaaatgtcgagcgcatgaccgatgcgctggcctctgcccattgcgcacagatcacctatgcagtgcgagatacggaaaatggcgagtttaccattaaaaaagacgatattctcggcctttttgacagccagatccaaattgtgggtaacgacgtggatacggtcgttaaagacctgttggccaaatgtattggcgactgtgagatcgttaccggattttatggggaggatgtcagcgagcaggcggctggagccttgcgggatgctttggaagagcagttcccggattgcgacatcgagatgcactttggcgggcagccgctctaccattacattttctcggtagagtaagcgcttataaggtgtggaagaaaaggggcggaaagcgcccctttttttgatagaacggcgggggaggagctgtaatggaagcacccatcagcgttttgccgggcattggcccccaacgggcaaaactattggaaaaactaaacctatttacggtagatgacctgctgcattttctgcccagagggtaccgggattataatcaaacaacgttgatcgcccaggtggagatgggggaagaagtggtgatccgagcgcagttggcctcacagccgcgggaggtgcgcctgcgcggaggaatgacgctgacccaggtgaagatcgaagacgacagcggattgatcgagtgcgtctggtttaaccagccgtttatgaaaagggctttgacaggagaggatttcctatattttgttggccgggcagcacgccggcagggacggctgcagttgctaaaccccactattgaaaagctgaaccccggaaaagacgaaatcctgcccttgatgccagtctatcccctgacgcaaggtatctcacaaaaggtgatgcgcaatctggtgattgcggcgctggaatatagcaggggaaagatcgtagatgcccttcctctgcggctgaggcagcattgcggcctgtgcgaggccggctttgccatagaaaatatccattttccaaaggacaaggaggcgctgcgcctagccggacgcaggctctcctttgaggaattgctgtatttcctcgcagcggtggcgcatttaaaaggagagcgcctggccctaacggatggacaggcctgcgtttacgatgcaactaaattcaatgccgccatagaagctctgccctacgaattgactggggcgcagcgccgggcgctggatgaaattctggccgatatggcgcaaaccaagcccatgaaccgtttgctgcagggcgatgttggctcgggtaaaacggcaatcgcagcgctggccctgtatgcggtatatctttccggccgccagggcgcttttatggcgcccacggagattttggccgcgcagcatgaagagagccttaaagagtttttaaagccgctgggcgtgcgtatcgcacgattaagcgggggcatgcccgcaggcaaacggcggaatctgctggcctttctggaaaaaggacagatcgatatcctggtgggtacgcatgcacttttgcaagacgatgtgcgctttcaggcgctggggcttgtggtgaccgatgagcagcaccgtttcggcgttggccagcgggcgcgtttggccgataaaggcaagggcgtagacgtgctggtgatgtctgccacgccgatcccgcggacgctttcgttgatcttatacggagatttagacgtttcggtcatcgatgagctgccaccggggcgccgcccggtgcagaccagtatggtacccgagcgcaaacgcgcggatatgtaccggtttatcttaaaagaggtcgccgacggcggccaagcctacatcgtctgcccgctggtcgaacagagcgagacccttgaagtacactccgcacaggagctctaccgccagctggccaatggcccgctcaaggagatcgcgctgggatgcgtgcatggcaaaatgcgcccggcggaaaaggaagcggcgatcagcgcatttacggtgggagagatcaaagtactggtggcgaccagcgtgatcgaggtaggggtaaatgtgcccaatgcatctattatggtgatcgaaaatgccgagcgatttggactagcccagctacatcagctgcgtggccgggtaggccggggtaaccgccagtcctattgctttttaatgggcgggaatctatctcaaacggcgcgggaacggctggagctgcttacccagacgcaaaacggatttgagctggcccaaaaggatatggagttaaggggccctggtgaatacttgggcacgcagcagcatggtacgctggacagtcagctgctgaggctgacgcaggacttgcaggaagtttatgaggtgcgcgaaatcgtcgaaatgttaagctctgatgcaaactggcgggcggaagccgaactggtttttaaggccgcgatggcccgacacgtaaaacggttaaagagcattgccatgaattaaatgaaatcaagcgagtgcaaaataccgtcagggaaaacctggcggtatttttgtaaaaattgcctgtatgttcaaaaaacataatgcaaattatagtgctgtggaatcaacgatttcgcaaaaaagtggtaaccgacatttaccagcttaaaaaactcccggctgggagaacataggtttaagctgatgcaagggaggtgagcacaagtggcacgtaatagcagtaaccgtctggttgtaccggaagcgcagcaggcgatggatacgatgaagtacgagatcgctcgcgagcagaacgtgaacctgaagcagggttacaatggcgatttgacctctaaggagaacgggactgtcggtggttacatggttaagcacatgatcgagcagtacgagcggaacatgtccaaataacctaagaccattaaacctaaattctattgaaaggaggtgaatcaaaatggcgaatagctccaaccgtattgttgtccccgaggctaagcaggctatggataacatgaagtatgaaatcgcgaagcagctgaacgtgaacctgaagcagggttacaatggtgacctgacttctcgtgatgctggttccatcggcggtggtatggtaaagtcgatgatcgagcagtatgagcgttctatggcgaacaaatagttttagtgataagctaaattgaagcggcagttaagcaaaagcttggctgccgctttttatttgtgaaaaacagggcaggcttcggctatccacatcatatcccgacgataaacgccataaaatgcaacaatgagaagcatgcgagaaggagggattggggtggatttgcgaaaaccccgcaaatggctggccaagcatggcgccagtacggtgctggtattggcggtgctgatgatttttaccttgacttttggagataaaattttaccggtctggaaggaaaatgagctaaaacccatttatggggcggaaacccaggagaaggtgggagcggtagtctgcaatatctactggggtaccgagtatgtgccggatatcctcaaggcgcttaaggagcgggatattaaggccactttttttattggcggcatgtgggctaacgacaacccggaggttcttaagcaaatcgtatctgacggccacgaaattggcagccacggttacagccataagatgcacagtaagctatcgctggatgaaaacgtaaaagaaatggaaaaggcggctaacgccattgaaccgatcgcgggaacgacaatttcgctttttatgcccccatctggcgattttgggcaggcgacgttgcaggcggctaaacagctgaattataagacgatcatgtggtcttgcgataccatcgactggcgcgaccagcaagacgatgtgctgctggggcgcgtgcaaaaaaagatggcgcccggcggcattatcctgacccatccaaccgcggccacggcgcgcatctacgggcaaatgctggattacttgaccggccagggttacaggctttgcccggtaggagagttgattgccgctgaggattgatgaaggcggagaaaacggttatactaggggaaaacaagttagtagaatacaggagataaagcacggatgagcaaacagttttttgagtatacattacccaatggcgtgcggctgatcgccgaacccattccttactttcgctccgtagcggtgggtatctgggtgcgtaccggctcggtgaacgagcgggaagaacaaaatggttattctcattttatcgaacacatgctctttaaagggaccggacggcgcagcgccatgcagatctccagcgagattgacgagatcggggggcagctcaacgcttttacttcaaaggagtgtacctgctactatgctacggtacgcgatgagcacatcgacatcgccatggatgtgcttagcgatatgttcctgcattcggcatttgatccgaccgaaattgcaaaggaaaagggcgtagtcatcgaggagatccatatggtggaggatacgccggaggacttggtacatgaactgtcgtccagcctctattttgcagggcatccgctggcccgtcccatcctggggccggagcagaatattgctggtctcgatcgtgcggggctggtaggctattttaacgaacgctacggcccggaggagatcgtcatcgcctgtgcgggcaaaatcgatcctgagcgatttgtagccctttgtgagcagcattttggcggatacaaggcagcgcccatcgctgtcaaggataaagtgccgcccgcaacgggagatactagcgaaggccgctataatgggcgggtcaaggatatcgaacagctacatttttgcctggcgctgccgggcgtggattcggaaagcgaagatctctatactttgtctgttttaagcaatatcctgggcgggggcatgagctcgcggctgttccagtccctgcgggaagagcacgggctggtgtacacgatctatgcttatcccaccgtttaccaggctggcggcaagctggccatttatgcggcgttaaacacttctcagggggtaaaagcggcgcagctgattgaggaagaattgaaccggcttaaagatgatttgactctggaagaagtgaccaagaccaaagagcagctgaaaggcaattatatcctggggcaggagtctacctcagcgcggatgagcgctatcggcaagggcaagctgatgcgcaatttcgtgcggacggaagaccagatcctgtctttgatcgagcaggtcacattgcaggatgtgcgcaggctgttttcgcagatgatggagtcggaccggcgctatctctccctggtgggaaggatcgagcgggaagagcagatgtgtaaagctctggggatcaatttttaagaaattctggatagcaaaaggcgcggaatcattccgcgcctttttgatgtgcaaaggttaatttacttttcgtaacaatttacgatctcgccgtagaagtaggtgtggaaatctccgccgccatagtagcgctgcaggatatcgggacagaccagcgtaggttccatactctgcttggcaataactttgcactcatagtgcagttcgcattcgcctacgatcggcgctgtaacgctttgggctacctccgccgtcaaaccgcaggccgcaaatttattgccctcgcgtccggaacgggtcccgcaatagcccagctcctttttcatatcgtgcagcggaatgctaacggtaaagttcttcatctcgttaatggccttaaagctgtggcgggaatagcgcaccatgacgacaaagaccggtttgccccagtaaacccctacagagccccagccaatggtcatggtattgggcgcgtccaggctgccggtgtttaaaaatacgccgccgtttcccaactgccgggtgacaagatccattttatcggtataatctaactgattcattacaaaatccctccttcaaatactatatgcccattataaaatccttattttggaaatgcaagcggcgtacatggaatgtatggttttggaaatactaggggtaaaaagggagggaataccgtttatggaaagcaaaagattgatccctatattatgtgtgctgcccgttgtggcgctgctggtgggcggcggcgccgcatatatcggcaatagatttcaacctaacaccctgccgcgggagattgcggcgcaaagcacgcctgcgccggcagctgctcccactgcggagcaaagcgctgcaccggaggaggaagccggtgcgctgcgggagagcgtgaaccaggataccaaaatcgtattggagaaaaaatttatccaatgcggccataccgtggagaagacgctcccccaacagagctatgcgggtatgacagaaaatgagctggctaaagccgccagtccggcaaaagtggagagcttcagcgcgcaaaaggtgattttgtcgcaggagtctgagggctattgtccggatcatgccaagctgcaatggaaggatgatgcggtggagatcctctgccccaatgaagagggccagatggtgctgaaaaagaaactggagctctcgctggagctgatgccaaaggaagtacgggaagagctggagcagggaattctgtttggatcccttgatgaagtggaacagtggctggaggatatcgccagctgatttgacagccccggtattttcagcgtataatttgcaaaaagcgcatgaaatggggttaagatgatgcagcaatccattgaagaatatatcgtagcgctggcgcagcgtgcaaaaaaagcttcccgccagctggcgcagttgaccagcgcccaaaaagatgaggcgcttgaagccatggcgcagggactggaggcgcatacggcgcagattctggcggaaaacgccaaggatatggcggccggaagggaaaacggactgtctgcagcgctgctggaccggctggcgctagatgaaaatcggctggcccagatggcagatgggttgcgcagcgtaaaagcgctggaggaccccgtcggcgaagtggaaggtatggtcaagcggcctaacggtcttttaatcggttgccagagggtgcccatgggcgttgtggcgatcatctacgaagcgcgccccaacgtgaccagcgatgtggcagggctttgcatcaaggccggcaatgcggctattctgcgcgggggcaaagaagctttgcacagcaaccttgcgctatccaaggtgctgcgcgatgcgcttaagggtacagattgccctgaggatgcgctgttatatatcgaccagggcggccgggaggcgacgacatacctgatgcagctcaacggccttgtagatgtgcttatccccagagggggcgcaggactgatccagcatgtggttaaaaacgccaccgtacccgtgatcgaaacgggcgttggtaactgccacgtatttgtagatgaaacggcgaagatcgatcaggccatcgacatcgtcataaacggcaagacgacgcgtccggcggtgtgtaacgccctggagacgctgctggtccatcgttccattgcggccgagtttttaccccgctgtgcccagaaactgaaagaaaagggcgttgaaattcgcggctgtcaaaggacgcgcgaatggataccggatgctttgcctgccagtgaagaagattatgccacggagtttttggatttgatcctggccgttcgcatcgttgacggtttggatgaggcgatagcccatgtccagcgctattccaccggccacagcgaatgcatcgtcaccgagaattattccaatgcgcaggcctttttgcagcaggtggacgcggctgcggtatatgtcaatgcctccacccgctttacggatggctttgagtttggcctgggggcggagatcggcatcagcacccaaaagctgcatgccagaggacccatggggcttaaagctttaacgaccactaaatatatcgtttacggaagcggccagatccgctgacggggacgggaactaagttttaaaggcgctgtgagcgaggctcacagcgttttttttatttaaagtaggttttagtttaaaaacaggatttataaaacccttttaatttaaagttttttctgttaatataaaactagatatagataaaagaacaggataaaagcaaacgggtcgtttgcaaactgttaaccaaacgggaaaattgaatacgaaggggagaattgtgcatgaaagtctatgagacagcggacattcggaacattggcatcgtagggcacggcagcgagggtaaaaccaccctgaccgaggctatgctgtttgcggccaatgtgatcgaaaggatgggccgggtagaagacggcaccaccaccacggatttcgaccccgaggaggcgaaacggggcatctcaatcggcgctgccatggcgcccgtcgaatggaacaactgtaagatcaatgcgatcgatgttccgggttatttcgactttgtgggcgaaatggtcggcgcgcttcaggtttcagacagcgcacttatcgtactgggcgctaccaccggtctgcgcgtgggcgcggaaaaggcatggtcttactgtgagcaaaacggcattggtaaagtcttcgtcgtcaatcaaatggaccgcgaaaatgcggatttcaacaaagttttagcaagcgtacaaaataaatatggttcttctgtcattcctttgcagctgccgattatggagggtggcgtattcaagggctatatcgatttgctggcgatgaaagccgcagaatttctgcccaaagggcagattaaagaaattgaaattcccgcagcactgcaggatgaggcagcttcactgcgcgagcagatggtggaagcggctgcaggcagcgatgatgatttaatggaaaaatattttgctgatggcgatctggatcaggctgatttggaaaagggcctaaaaatggggattgcaaacggcagcgtggtaccggtgctgtgcgtatcggcgctgatggatcagggcatcggggcgctgatggattttatttgcaaatttatgcccaaccccgcccagcacgcgccggtaaaaggtacgcaggtgaaaggcggcgcggagatcgaactgactgccgatcccaacggcccgtttgtcgcccaggtctttaagaccattgcggacccgttcgtcggtaagctctccctctttagggtgtggagcggtacgctttcgtctgacgctacgatcagcaatgcaaacgtagataaatccgtgaagatcagtagtctttccatcccgagaggtaaaaagcagatcgcggtgcccaagctttgcgcgggcgatatcggcgccattgccaaactgcaaaacacgatgacgggacataccctgtgcgcttcgtctaacttgatcaccatgccggagatccaattccccgcgccctgcatctcgctggcggtggccgctaaaaagcagggtgatgaggataaggtctttgcggggctgcaccggttggaggaagaggatcctacctttacgctgaaaaagcaggctgaaacgacggataccctgatctccggccagggcgaactgcatttggaagtgatctgtgccaagctgaaaaataaattcggcgttgaggcggcgcttaatacgcccatcgtgccctatcgggaaagcatccgcaagcctgtgaaggcggaagggcggcacaaaaagcagtctggcgggcacgggcagttcggccattgctgggtagagtttgagcctatctccgatggctcggctgattttgaatttgttgataaggtagtcggcggcgtggtaccgcgccaatatatcccggcggtggaaaagggcctgcgcgagagcattcgccacggcgtgctggcgggctatccggtggtgggcatccgctgtacgctgtatgatggttcctatcacccggtggattcttccgaaatggcctttaaggtcgcggccagcctggcctttaaaaagggctgcgaacaggcctctccggtcttaatggaacccatttatcagatggatattttggtgccggataaatatatgggcgatgtgatcggcgatatgaaccggcggcgcggacggattttggggatgaatcctgttggggatggcatgcagcaggtaactgcggaggttccactgtcggaagtgtttacgtacgcgaccgatctgcgttccatgtcccacgcgcgcggctcgtttacgatgcagtttgcacggtatgaggatgtgccggccaatatttcggctaaagtgatcgaagaagccaaaaagaggatggctgacgaggagtaaggaattgcttaaaagccctgccaactggcagggcttttttatgtaaacgcttttttacttgacaaagctcggaagggatgcttaaataaatttaagataagtccgcttgtagtgcggtatcggtgtattggagaagcaaagacgcttagaccaatttggtctaggcgtctttttttatccgttttattgaaatagaggcagaggaagtggaaaaaatggtagagcggttgacgctagacaaactgtgcgcgctcccggagctaagcggacttaaacgcgccacgcctgaggttttttatggcaccaatgtatccgagatattcgtgttggagcatgaggaggcgatcaactggatcccaaaggacggatttgtcttgacgagcgaaagttttattcgagagggaaagatgcagtccgataactttatcgcagcccttaaatccaacggctgtacggggttgggcattaaggtgggctgtgagctgaagaagctgccgcctgcgctcataaaggcggccacccaacagcagctgcctttggttaagataccccattactattcttttggccaaatcatgcgtgtagaaagggaacagagcctccgctttgcgctgaatcgaatggagcaaatgcaacgggctatttcccggttgagcggactatacttttcgcgcgccggtatggaaaggctgctaaaagaaatcgcccaaacgctaggagccgctatttttttaacggatactggttttaaggtgttggtgagacgtatttttggcggagagaaatggcttgaatgccaggaaaagctgcaattgctgacggaagcgaacacacagctgtaccagctcaatgatacgaacgggaattaccggcaatttatgttgggagagcgtactgcccgtttttatgtgcaggccgtacctgacgcgaatatttacctatgtatctttacgggaaataatgatttagaacaggaacagcggctttatgttcaaagggcagcggatatcctatcgttggagtggtcgcgcagcggaggtatggaacgcagcaaggaggtccatgaatcctttcttgagtttttaaaaactgcatctgaaaagagcgaatatgaagtgataagccgctgcgcacaatatggctttgattataagcgcaagcgcgtttgtttgacattcatgccccaggacttggacgctgacgtttggaatacaactgacgcgcaggaggcgatgctccagctaataaagagtgatgcgaaagattgcttatcctatatctgttctggttccaatagtatgacggtatttttactgttctctaaccgaatatcttcaaccatggccgttgccgcggcacagcggatcggcaagcgctatcttttgcagcagcgcgcctgcgggctgctgctatgtgcgggcgtaagccgatgttaccagcgaaccggcgcaataggggccgcctactgcgagagcataaaagccatccagctggagcgggacctgggctggaagccggaaatggcgttgtaccgggacggaatgatctatcatttgctgcgccagctgtcccggcaggaattagaaaatatttgccaagatcagatacagtccctggcggactacgataaaacctgcggctctgcgctgatccaaacgcttaaaacgtattttgagtgccactttaatctttctgcctgcgctgcaaaattatcgatccaccgcaataccatgcgccagcgtatggaaaagatcgagagcttgttgcaggcagaccttgaggcagcggcaaatggctatgcgctatatgccagcctgtgtgcatgggagctacttgcgggggaggagaaggaaaaaggaatgcacccattgcaaaaggaggcttaactcgcaggagctggtggtggagataattaaagtgagccagctttaatcgagaggccgccggctgcataaccgcacccgaaataaatagggggtacaggaatgaccctgtacccccaatctagctgtcttttataaccggcttattcaatgggaatgttgcgtgccttatcgacctgctcgccattgactttaggcagattaacgctcagaacgccgtccttataggaggccgagatcttggcgtcgtcgatgccgtccagactgaaactgcgctgcatgtggccgacgcgccgctcgttaaagacatagttttctttttcttctttgcgctcgctgtccatgttggcggcaatcgtcaaaacgtcgccctccaccttcagctcgatcttatcctgcggtacgcccggcagttcagcctccatcaggtaatggtcgcctttatcttttacatctacgcgaaaagcattgccactaaagaagctatcccggaagaagggggcgaagaagctatcgtcaaacagctgcggcaggttattgtcaaggcgatgaccacggaacggaaccatattatacataaagaaacctcctttgcgctcatcggcgcatcattttttattagcttggctcttgggggacccttttattcccgttcccctttgaacagctttagtataacttaatagtcaaagaaagtcaaagagtatacattcgaaaaaaatccgttttgggcgatgaaatgcgtttaacgcagcagctctttgccttgcgcccgcaagcgcgctttttcatagttttaggggtaaaaagaatttctgtttgccaacctcagcctgggtgcagtacaatagagccatatcacgaaagtcgggggatgaaaaagatgatcgcaacagtatgtctcaatccttgtatcgataaaacggtcagcatttcaaactttgtgtatggtggaatgaaccgcattatagaaaagcgggaagacggcagcggcaaaggaatcaacgtggcgatcgccgcccaacgcattggctgtgaatccgctgcgcttggatttatgtatcaggagaattacgcgcctattgaagcgcgtttaaaggccgagcaggtcccgtttgactttgtatggtgccagggcgccgtacggaccaataccaaggtattggatctggaaaagtccattattaccgagatcaatgaaagcggcacgccggttacggatcaaaatatcgaggctatgaaaacttctgtacgggaatggagccaaaaggcggacctgatggtattctcaggcagcgtgcctgccggatgtggcaagcagatctaccgggaattgttggcggccgcacgcccgggcacccgctgtattctggataccgagggagaccggctattagaaggccttaagcaaaatccgtatctgatcaaacccaatacgtttgaattagagaccattgtaggacgcagcctgcaaacgccgcaggaggtttataaagccgctaccactttggtggaccgaggcgcgcagcttgtagccgtttccatgggcggcgacggcgcgctgattacggatggaagcgcgtgttattattctgaggcgttaaaggtagcggtcaagagcaccgtcggcgctggggactcgatggtggcggctttttgcaaggccattgaaggcggcctttctctggaagaggtattccgctatggcgtagcgggcggcactgccggggtaatgacggaggggacggagttgatccgccggcaggattttgagcaagtgatggggcaggtcaaggtccaaaaaattgcgtaaaggatacatgaaaaagcggcggatatccgccgctttttttacttcatttggttcaacttctggctgatggggcaaagggggatgcacaataaaaaccagtaaagggtataaagagggcagatctgccctaacaggttgaagcgtttatcggaataatcccatacgcccatatttagttttttgttgaccacgcaacccacggcaaattctaccgccgtgatacaacctgctccggccagacttttagccagcaccttgcgcttccccatcttctggttcactttgcacaacgtgactaagcaagcgccaccggtcagcgccatggtccaatgggtacgcttacgccaggccagctccagcaggctgtagcccattgcacccaggccaaaaatggccagattttttccgcgcggagaggacataggctagatgtcgccccgggtcaggttatcggcataatcgcacaggctttcgtaagaattgatgtggtctgcacggtagcccatggcctgtttgacgtaaaagggaagggtctcataaaacgcgctggctttggggtcctgctcgatcaggttatatagatcgctgtactttgtcatattcatcacctcatcccctagtgtgggccgcaccgcgacgcattatgtgtggggaaaattaccgagtttaggtaaatggatttttggtaaaatagttgtatgattggctaaaaaatccataaaatatacttgcctcccccggcggttcatgctataatatgctggtcgcgagttctagccgataaatgtggagagatggctgagctggtctaaggcgcacgactggaaatcgtgtatgggctaataccccatcaagggttcgaatccctttctctccgccaaaaagtccgctgtaattttaagagaattatagcggactttttatatattatttgcaaaagagatcgagtgattagattcggaggttaaccaacatgaatgataaatggttggatttcgctgttagaattcaaggtattgcacaggcggggcttcaatacggggaaggtgtctatgatcgggagcgatatcaagaattaaggaagattgctgcggaaatggtatcgacaaggacggaaacccctattgataaagtgtatgaccttttttgcaacgaaactggctatcagacaccaaaggtcgacacgcgtgccgctatttttattgacggtaaaattcttctcgtccacgagaacaacggtacatggtcgttaccgggcggatggtgcgatgtagaccaatcggtagcaacgaatacggaaaaagaggtgcacgaagaaacagggttcacagtacattccccaaaaattatcgccgtgcaagattggcgtagacataatgtagttaattatatttacggcgtagtgaagatttttgttctatgccgatatgaaagcggagaatttagaaaaaatatagaaacaacagaaatcgctttttttgatagaaaatctatccctgttaatttggctgtagaaaaaactacaaaagagcagattttgatgtgttttgattcttatgaaaatctggattcacccactttatttgattaggtttagcagtacgaatattcgattttcatgctactgctaagttaacataatgattcctgcttttataaagttttattaagctgaaagccgccttgtttatcgaaacgtgcttatcaggtttaaaggagagagcaatgacagaccggttaaatgaaatcctaaagcaagcgcagcaagatgagaatgtgcgcggtgccgttctttatggatcacgtgtaaatcaggagatacagcccgacccataccaggattatgatatttatttcatcgtgcaggcggttgaacgctttgacgtctccagtatatccggcgtgaagcttagttttgagccgagtagggtttatccagcgctgtttccagatgaatgcgtatacctcatgttgtttgaagacgacagccgggtggatttaacggtttgtaccctcaaaaccttcttagaaaagcataataagggcgaattgatgcggtgccttctggataaggatggaaagataccctcactgaaccaaagcgatgctagcagaacgtgggtaagccccatggacgaaaatatgtttcaggaaacctgctcagaatttttctgggagatacagaacatggtgaaaggcctgaaacgggatgcactttcctatgccatgtttatccgggatatttcgttgagggatatgcttaaccgccttatcgaccaatgcatagggattcggaacgattttaaagtatcggtgggcacgcttggcaaatttagaaaaatctatctgacgcagaacgaatatgaactttaccaaaagacatatcggtccaacacccagcaggatcgcatcgattcattattttatatgctggatttattcagctcgattggaaaatgggtagccgcagcgcgacgctttgattatccggaagaaaaggagcaggtggtgcgtgattatctgcaaagggtaggattgacaggaaggtaggcagccgtttgaaccaatttgcagattttttggtgcgtatgaattcgtaatgcttcaggagataaaatggcagtgtacggatattccattgaacgccgcggccagatgtggtataaaatgaatagcatcttataactagaatcgtgaaaaggagtaaccatgaatcatacgatcatccgcgtgctccccggcagcattgccgaggaggttgggctggagaggggcgacgccctcgtttcgatcaacggccagcccatcgttgaccggatcgattatgaatattttatcgcggaagacgccctggttttgcagatcttgaccaaggatgggcagcaagtcgaggtggagatcgaaaaggacccggaagagcatatgggcctggtctttgaaaatgaattgatggatcatatgcataaatgtgccaaccattgcctgttttgctttgtcgatcagctgcccgaagcggcgcgcgatagcctgcactttaaggatgacgactggcgcctttccttcctaatgggcaactacattaccttgaccaacgtgaccgagcgggagtttgagcgtattctggcacgcaggcccagccccatgtttatctccgtccacgctacggaccctgcggtgcgctgccacatgctggggcataggcaggggggtaaactgatggacaggctccatcgcatggcgcaggccgggatctatttccacacacaggttgtattttgtccggggatcaatgatgcagcggtcttagaccgcaccattgatgaactatcggccctgtacccgcactgcgcctctctggcggtggtgccggtggggcttaccggccaccgggaagggctaacgcccctgcaaccggtaggcgctatggaagcggaggctttgattttgcaggttgccgcctggcaggaaaagcttttatccaagctggggacgcgttttgttttcgcggcggatgagttttataccaaggcggatcatcccctgccgccgggggaggcgtacgaggggtatccgcagattgaaaacggcgtggggctggtccgccagtttcaggatgaatttagagaagcgttggcggcttacccggagggaatacggcaaatttgtgcctgcagcgttgtaacaggatgttcggcggcgccatatatcgctgaattatgtgatataataaatagtaaggcggctgcggtgcgcgtatttccggtggtaaaccgctttttcgggccgagcgtaacggtggccgggctggtgaccgggcaggacatcctgcatacgttaaaaggcgcgcagcttggcgagaaagtccttctgccgcgctgcatgctgcgcagtggggaaagcgtgtttttagacgatacgccgctggccgatctacaggctgcgttgcaggtgccggttgaagttgtagatgtggatggggctgcattttttagcgcccttcaaagaaaaactgttttataataggtaaggagcaaccatgattaaacccttagtcgccattgttggccgcccgaatgtgggcaaatccactttttttaaccgtatagtgggtaagcgcgtctccatcgtagaggatacgcctggcgttacgcgcgaccggatctatgcggatgcggagtggctaaattaccactttaccttggtggataccggcgggatagacctggccagcgaggacgtgctgctttctcaaatgcgcgcgcaggcgcagatcgccatcgatacggcggacgtcattttatttatggtggatgccaagcaagggttgacggctgccgatgaagaggtggctgattttctacgccgttttaaaaagcgcgtgatcctgatcgtcaataaggtggataactaccccaagcttgataattactatgacttttatgctcttgggctgggcgatccctgggcggtttccgccgggcaggcgctgggtctgggcgacgtgctggatgagatcgtttcccattttccggaggaatcccgcggcgatgaggaagaggatatcctgcatatcgccgtggtaggcaagcccaatgtgggtaaaagctctctggtcaacaccatcctgcgggaggagcgggtaatcgtcagcgatattcccggcaccacgcgggacgctatcgacacgcccttccaggaaggagaggaccgctataccatcatcgataccgctgggctgcgcaaaaggggacggattgaggacgaatccatcgagcgatacagcgttatccgcacgctgaccgccatacggcgctgcgatgtggccctggtcttggtggacgcccaacagggcgtgaccgagcaggatactaagatcgcgggctatgtgcacgaagagggaaagagcagtatcatcatcgtcaataaatgggatttgatcgaaaagcagaccaataccatggaaaagatgcgcaagcaggtgctcagcgacctgagctttatggattactcgcccgtgcactttatcagcgcaaaaaccgggcagcgcacccagaagatattggacatggtcaaggccaattacgctgaggcgacaaagcgcatccccacgggcctgctcaacgatgcgctgggagatgccaccgccgccatccagcccccgagcgataaggggcgccggctgagaatttattatatgactcaggtcggggtcaaaccgccgcacttcgtcttgtttgtgaacgatccggaactgatgcatttttcttatctccggtatttagagaattatctgcgcaagactttcggctttagcggcacgcccatcaaattctctctgcgcgcgcggggtgaaaagggaggcagaatgaaatgatctggcgcatcgtcctatccggcgcgatcggttattgcctggggtgcatcatctcggcgctgatcgtaggaaagatatttggaaagatcgatatacgcgaccacgggagcggcaatgcgggctctaccaatgtccagcgggttctgggctggcggtatggtttttatacgttggctggggatgcgctcaaaggcgttgccgccgtcgcaatcggatggctcttggccggagagatcggcggctatgtggcgggcgtatgcgctgtgatcgggcacaactggccggcctttagccgctttaagggcggtaaggggatcgccacttcggtcggcgttgtactgatgacgatgccgctgtgcggtgggatcgtgttggccatcgggctgatcgtgatctttgccacgcggtatgtgtccctgggtgcggtgatcgccgccggctcgctgatggtcgtggggacgctgctcaacctgcacaactattgggccatgggtacggcgcttttgctgggggtgatggcgatcttttcccaccgggccaatatcaagcggttgatcgggcataccgaacgcaagatcggcacccccaaaaaggatgataaagggccgcaggcttagcggatacgtaagatgaagcgcgatgataaactcgcgcttttttgctgcccataaaaagcgcgcgattatttaaaaatccatgcatgcagccagtccctggcacataggaatagaaaagacaagaccatggggaaatgctaagggaggggttttgggatggaaaaatttgacctttattcagatatcgcgcagcgcaccaacggggatatttatatcggcctggtcggcccggtgcgcaccggcaaatccacctttatccaaaaatttatggacttgatggtgttgcccaacgtgcaggacgcctacgcccgcgaacgcgtgatcgacgagatgccccaaagcggggcgggacgcacgatcatgaccacgcagccccacttcgtcccgaacgaggcggtggctgtagaggtgcagcagggcgcggtcctcaagatccgcctggtggattgcgtgggctacctggtacgtggcgcgctgggctacaccgaagatggggaagagcgcatggtgcacacaccctggtttgaacaggatatcccctttaaagaggcggcagagatcggtacgcgcaaggtgatcgccgatcattccaccattggcatggtcatcaccacggacggcagcatcacggatattccgcgcccgagctatatcgaagcggaagagcgcgtgattgccgagctgaaagagttgggtaaacctttcgtgctggtgatgaacaccgtccacccggaggaggaagaaacgcagaagctggccgagacgctggcgctgaaatacgatgtaccggtcaaggtgctaaacgtcatgcagatgacgctggacgacatcctttcgatcctgtccgatgtactctttgaattcccgctgacggagatcgcctttgagattccgcgctggatccaggtgctttcgccggagcacgaactggtagctgagctgctggataccatccgcgcaacgtctgaggatatgtcccgagtgcgggattatagccagttcctggaggcctttagcgaatcagaacgcatcacgggcgtggagatgggcgatattaacctggggcagggtaaggtcacactggatgtcgtcacccaaccctcgctgtattaccaggtactctctgaagagtgcggcttcccggtggaaaacgaatactgcctgtttgcgctgctcaaacagttggcggcggccaaacaggagtacgaccgggtggcggaggccatccgcagcgtacgggagaccgggtatggcctggtttcacctacgctggaagaaatgcggctggaggagccggagatcgtcaagcagggcggccgctttggcgtaaagctcaaggccagtgcaccctcgctgcacatgatgcgagtggacatcgaaaccgaggtatctccggtagtagggacggaaaaacagagcgaggagctggtcaaatacctgctatccgaatttgagaacgatccgcagcagatttggcataccaatattttcggcaagtcgctgcacgagctggtcaaagaggggctgtccaataaattagcccgtatgcccgaggatgcccagatgaagattgccgagactttacagcgcatcatcaacgagggcagcggcggattgatctgtatcctattgtaggccttatttactgaaagcggagccctttttctgggctccgctttttgccgcctgcgctgggctatgatataatacccctgataaaaggagggatacgcgcgatgggatttgacgatgcgatgcgcgcgctgctgggagaggcttatccagcctatgaagaggcgatgcgcgccccggcggtcaaaggactgcgttttaaccctttaagaggagacccagttaaactagaggcgctattgccttggcaggggcagcctgtgccctggtgcccggaggggcgcactttacctgaaaatatacgggctgggcggtatgcactgcacgctgccggcgtttactacttgcaagagcccagcgccatggcgcccgccgtacagctgaaggtgcagccggggcagcgggtattggatctttgcgccgcgccgggcggtaaagccggacagttggctgcggccttacagggagaggggctgctgatcgcaaacgaaccggtcatgagccgggcacgcgtgctggcggagaacctgcagcggctgggcgttgtaaatgcgatcgtaacggcggaaaagccgcagatgttggcaaggcgcttcccggattattttgatcgtattttggtggacgcgccctgttcaggagagggtatgtttaggcgaaatccggatgcgcgccaggaatggcaggaggggagcaatgcaggctgtgcgctgcgccaatccgagattctggaggcggcttatcaaatgttaaagccgggcggagcattggtttactcaacctgcaccttttcaaagatcgagaatgaacaggtctgccaggcttttctggatgcgcatgccgacctgtcgctggaagaggtgccgctgttcccgggatgggagatggggttcggcggcgtcggcgcgcggttatatcctcatcgcctgcagggcgaagggcaatttttagctgcctttataaaggctgacaaagacggggaggaggagtgcgaaccggataagataaaagccgttttacacaaaccctcgcgcgccatggcggattttttcgccgccgcgttgccaatgcgaccgcttccagagcgggtgatttgttggggacggcagtgctttgcgctgccgcaggatgcgccgccgtttgatgggctcaaaatcgttcttcccggccttcagttaggcgaagatcgtgaacggtattttatccctgcacatgccttggcacttgttacggccccgtttacgtccgcacagggatcattgctaaattacgctgctgaagatgcagaaattgtgcattacctgcggggagagacttttgctatcccgaaagaactagaggggtggcataggatcgccgtgcagggatttcctatcggttgggtcaaagccgtgcaggggagggcgcagaaccatttgcccaaggggctgcggctgacgggtgagatcgcttggcgttatgcctaaggggaaagaagaagttataggagaaaaagcaacgcactaaacgcactaaaagaaaaaagagcgcaagcggctcttcccgcgagcgctctttcgctttgaagcgaatatttaagaagtagagggtaaaaggaaaacagaccagatataatctggtctgttctggtgcgagacacaggacttgaacctgcatgaagttgccttcacatggacctgaaccatgcgcgtctgccaattccgccagtctcgcatacggaattaatggtggagggggatggattcgaaccatcgaagtcgaagacggcagatttacagtctgctccctttggccgctcgggaacccctccatgttggagctggtgatgggactcgaacccgcgacctgctgattacaaatcagctgctctaccaattgagctacaccagcaggagtaggaacgagaactattatatcacaaagctttccgtttagcaagtatttttttattggtgcctcagagtggaatcgaaccaccgacacagggattttcagtcccttgctctaccgactgagctaccgaggcaaggtggcgacctggaaggggctcgaaccctcgacctctagcgtgacaggctagcgttctaaccaactgaactaccaggccataaatggtgggccttcagggacttgaaccccggaccaaccggttatgagccggccgctctaaccaactgagctaaaggcccatgaccgcaagaaaaatggtgacccctaggggaatcgaacccctgttaccgccgtgaaagggcgatgtcttaaccgcttgaccaaggggtcatgcctatactggtcggggtggagggactcgaacccccggccccatgctcccaaagcacgtgcgctaccaaactgcgctacaccccggggctattcgctcgcacttgcgccagcgacgaatataaatatacaacaagacttgcggcttgtcaaggcaaatttacaaaaagttccgccttatttctcgctaaaaatctatatccatcttcctattggggccggcgcctgtcgaatgatggaaaaacttgcgaaggcggccctttgcgcttataatattatattgtaacgatataaaatgtggggaaagtgaggctttgcatgccgcagatagaggagcaatataccgccgatagattggccggcgatatggcctgggtgatgagcaggctgccggaaggtaaatgcaaatataaaattgaaacctatggctgccagatgaacgcgcacgattctgaaaagttagcgttcatgctggatagcatgggttatatcgaagccggaaacggcgaagagccagatttgatcatattcaatacctgctgcgtcagagagcatgcggaattaaaagtgcatggcaatgtgggcgcgctgcgaaagcgcaaagaggaagatccgaatctggtaatagcggtttgcgggtgcatgatgcagcaaaaaagcgtcgcccgtgacctggtcaagaaatatccgtttatcgatatcgtatttgggacccataatctacacactttcccggcgctgctgcggcggtgcctggaggggaaaccggtgcgggaggtttgggagcataacgacgctttggccggctcgaacctgccggcccatcgcaaagatggggtaacggcctatgtcaacatcatgtatgggtgcgataactactgtacctattgtatcgtcccttatgtgcgcggacacgagcgcagccggccgcatgccgaaattctggaggaagtctcgcgcgtggcggcgcagggttatggcgagattatgctgctggggcaaaatgtcaattcctacgggcacggcgtggccgacgaatgggattttgccggattgcttgagcagatcagccggatcgaagctgtaaaacgcatccgctttatgacgtcccatcccaaagatctgtcggaccggctgatcgaagtcatggcttctaaccagaaggtatgcagccagctgcatctgccggtacagtctggcagcagcgatattttacgcagcatgaaccggcgttacacccgagaggattaccagcgcctggtggacaagctgcgcggccgcgttggagagcatattgggcttacgaccgatattatcgtaggttttcctggagaaacgcaggagcagtttctggaaacgctctctttggtacagcaggtacgctatcacgccgcttatatgttcatgtattccccgcgccaggggacgatcgccgcgcaaatgcccgatcagatcccggagaccgttaaaaaagagcggctgcatcagctgattgagctacaaaacagcattacaggccagattcatcaaggccttatcggtaaggtagagccggttttggtggaatcgcgctccaaacgggatgcgcatgcggtatcggggcggacggattctggacgcatggtcaccttcccgggcggggatgaattgatcggtaagatggttcctgtcaaaatcacacaggcgaaccccaataccctggggggagaacggattgacgatgctttttaaccataacgtttaagaaagaggtataagcaaatgggtgagatgaaagaagtatacgagcacgcacagtctttggggcaggctttggccgattccccgatttttacgcgtatgcaaacggcgcaggccgccgttgaactgagcggtgtggccagcgcctgcatcgccctttaccaaactaaacgcagcgaattgcagcagttgatggctaccgctggcgccacgccagagcagatccatgcggccagcgaggatttggagctggcggaaaaagccttaaacgagaatgacgaagtaaaagagctgctggaagcccaggcggctttccagcagatgatgaaacaggtcaacgcacttatcggcttttacgtgggcggctccgcctcgggcgaggggagctgcagcgggtcctgcgagagctgtgctggttgccattaattcaagaaatgaacgctgcaaaggatgaaattaggagaaaagaatggctgaactgacccctatgatgcagcagtacatgcgcaccaaggaagaatataaagactgcattttgatgtaccgtctgggtgatttttacgaaatgttctttgatgatgcgctggtcgcttccaaggagctggagatcaccctgacgggcagggattgcggactggaagaacgggcgcccatgtgcggcgtcccctttcatgcggtagacggatatgtcaaccggctcattgaaaagggatacaaggtagctatctgtgaacagatgacggatcccgccgagtccaagggcctggttgagcgcgaggtccttcgggtgatcaccccgggtacggtgatcgaaacagccatgctggacgagaaaaagaataattacctcgccttcctgcatagcgaccgggatgcggccgccatggcgtggagcgacttgtccaccggcgaattctcggtgcgcacctttgccattgcagacggatgggaaaatctgttcgtcaatgaactgttctgtttacagccagctgagatccaggccagccctcaaatggccgagaaattgaaaaatatcgagtggccgcggcagatccccgcgctgcacatagcccaggaggaggatttcaccgaccctgaggcgtgcaaggcgcttgaaaaacagttcggtcgccagccgctggaggaactcaatttaagcgatgcggccatccagtgctgttgggcgatgctgcattatctttatcagacccagaagcgttcgctcaagcactttgggcgcatatccgtccaaggagaccaaagttacatggttttggatatggcgacccggcgcaacctggagcttacggagaccatgcgcagccagaaccgcagaggttcgcttttgtggctgctggataagacgcaaacggcgatgggtgcgcgctgcttacgcggatggatcgaacacccgctcatccagcaaaagccgattttggagcggctggatgcggtagaatggtttaccgaaaacctgatgctgcaagacgagttgagcgcctacctaaaaaagatatatgatattgagcgtttagccgcacggattgcctacggctccgtcaatgcgcgggattgtctggcgctttcgcaatccctggcggtattgcccgagatcatcagtctattgcaggaggcgccggtgtcgctgatccagacgctatgtgggcggatcgacccgttcaccgaagtgaccgatctgctcaacagcgctatcgcaccggagccgcccatctccgtgcgggaaggcaagatgattgcaccgggttttaatgaggagctggatgagctgcgggcggcgtccgcgcacggcaaagaatggatcgccgcgcttgaggcctccgagcggcaagagacggggatcaaaaacctcaagatcggctttaacaaggtgtttggctactatattgaggtgaccaagtccaaccttgctcaagtgccctaccgctatgtgcgcaaacagaccttggccaatgccgagcgctatattacccaggaactaaaggagatggaagaaacgattctgggggcggaagaaaagagcgtgcggttggaatacgtgctctttaccagcgtgcgggattatttaaacgaacaggtgccgcgcttccaacagaccgcaaaggccctggctgccattgatgcgctatgttctctggcccaggtcgcccgcgaaaacggatatgtaaaaccggatatagatgagtctggcgtattggatatcaaacgtggacgccacccggtggtggaaaagacgctgtccaagcagcagtttgtccctaacgacgcgtatttggatcaggatgaggggcgtttggccatcatcactgggccgaacatggccggtaaaagcacctttatgcgccaggtggcgctgatcgtgctgatggcgcatatcggttcctttgtgccggccaaacaggcgcatattggcctggtggaccgaatttttacccgcgtgggagcctcggatgacctggccgcagggcaaagcacctttatggtagagatgcacgaaatggccgagatcttggcgcaggcgaccagccgcagcttactgattctggatgagattgggcgaggaaccagcacgtttgacgggctcagcatcgcctgggcggtggtggagcatatttgcgacgaacagatcctgggcgctaagaccctgtttgccacgcattatcatgagctcacggagctggaagggcgcctgcccggcgttaaaaactactgtgtaacggtacgcgagcatggggaagacatcatatttctgcggcgcatcaagcgcggcggagcggatcgtagctttggcatacaggtggcacgtctggcagggcttccggaggatgtattaaagcgcgcccgccagatcttaaagcggctggaagaagcggatatcaacaacggttctatcggggccaatatccttgcggctcccggtgcatcttccgcgcagatcgatctcttcgtaccggtgcaggctgcgccggagagtaaccctgtagtcgagcagctgcgggatatggatatcggaaacatgacgccggtagaagctatcggcgtattgtatgacctgcaacagcaggtcttggaaaaggagtagaacatggggcggatcaacgtactatctaaagaaacggcgaacttgatcgccgctggcgaggtggttgagcgcccgtcttctatcgtcaaggaattggttgaaaatgcctttgatgccggagccagtgccgttacggtggagattcggtccggcggcatacagatggtgcgcgtgacggacaatggctgtggtatggatgaagaggacgcgctggcctgctttaaaagccatgccaccagcaaaatgcgcgatgcgcaggagctggatcatatccgtacaatgggttttcgcggcgaggcgctggcctctatcgccgcggtttcccgcgtgatgctgcgtacccgcatgcaggatagcgatatcggcacgcaggtgcggatggaaggcggtacgctgatcgccaaggaagaggcgggctgcccggaagggacgacgctgatcgttgaagatctattttataatacgcccgcccgtctcaaatttttaaagcagccccgcagcgaagcgggatatgtctccgacctgattgcgcggctgatcctgacgcacccggagatcgcgctaaagttcatcgtggacgggcggctgatctaccatagtccgggcgatggcgacctcaaaagcgcggtttataccgtttatggccgagagggagcaatgggcgtattgcccgttgcgttgaaggattcggggatcagtatctccgggtatgttggcttgcccagtctggcgcgcggcaaccgagccagggagacctttattgtcaacggccgttatgtgcgggatgccatcctgaccaatgcggtagaaacggcatatgatacacgcttgatgatcaaccgctttcccttttttgtgctttgcattgtggtcgagcctgaagaagtggatgtcaacgtccatcccaataaactggaggtgcgctttcgcaatttagatgtggtgcgcgcgcaggtgcacagtgcggtagtgagcgcgctacaggcgcaaaccgaggcggcaaggccccggttgcagccacagcccgaagcggagctccctaagggtacttggatcccctcgcggcgggatgaggtgcaagataaaaggcaaggccagcagaccacgcaagcggaaaaccgtcaggaaccggcgccccttggggaaaggcctgcacctttcaccccgcagatgccgcccaagcgagaatataaccgggattcaacgcttcatctggccgagttattgaagcaaaatatcgccgcccgtacaggatcggcgaaaacctccctgggggaaggggctgggccggatattagtattatgaaggatagggcagaggtgccgcgccacgacgctgcaccggagcgggcgctgcagcaagagcaggtcatcttaacgccggagccggatggaaaagatgctacaacggtcttagaacccacggtttccgagcgcagccggttgattggcacggcttttgaaacgtatatcatcctggagatggacaagcgcatactgatgatcgatcagcatgccgcgcatgagcgcttactctacgaaaagtatacggcccagatcgaggcgcaacaggttgccaagcagccgctgctggttcctgccgtggtcaatcttacgcccagcgataaggtacggcttttggaaaagcaggactggttcagtcagctgggatttgagatcgaggattttggggatgatgctatccagatacgcacggttcccttggtgatgggtaatccgcagccgcagagcttttttaacgagctgttggatcgcagcgatgatatgcgcgtgcgcgctccgctggatctgaagcgggatcggattgcgcaaatggcctgcaagcacgcgatcaaggcgggcgacagcctgtcccaggaggagatcattgcgttgcttgcgctgatcgaaaaggaaaagacgccgttgacctgtccgcacggacggccgatttttatcgcgattacgaaaagtgagctggagaaacgatttggacgcatacagtaacaaaaaaaagccggtagtcgccctggtggggcccacggcgtccggcaaaacggcgctatccattgctttagctaaggcgacgggcggcgagatcgtctgtgcggattccatgcagatctatcaggatatggagattggttcggccaaacctacactagaggaaatggcgggtgttccgcaccatatgctatcggtggtatcgccttttcaaagtttttccgccgccgcgtatcaggagatgggacgccctattttggaagatattgttgcaagaggcaagctaccgctggtcgtaggcggcacgggcctgtttatcgatgcgctcctgcggccaatgacctttggcgatgcgcctgccgaccctgcgttgcgcgcaaagctggaggcggaaattgagcaagaagggatcgcggcggtttataagcggctgattcggttagatcctgcttcggcggagcgcatccatcaaaatgaccgaaagcgcattgtccgcgctttggaagtcatactcctgacagggaagcctctgccgcccagccgcaagttgtacttgcgtaaacctatggtgtataatacaattatgtttgcactcgattggccaagggaatgcttatatcagcgcatcgaccagcgggtggaccaaatgctcaaggacggtttgtttgaagaagttgcccatttaaaaaagatgggatgtaattctcagatgcaatccatgcaggggctggggtataaagaactgttgggatacctggacggcgcttgttcgctggaagaagcggtcgctcagatcaaacaggattcccggcggtatgccaagcggcagctcacctggtttaaggccgatccgcttgtgcaatggttgccgggccagcagcccatatccagtatggtggatacggtgctcgcggctttaaaggcatatgaatttgattcctcgaacgattgaagtgaagataggagtttgactgccatgacgaacgctaaaaataccacaaatttacaggacctgatgctcaaccaaatccgtaaagaacatataccgtcaacgattcatctggtcaatgggtttcagctgcgcggcctagtgcgcggctttgataactttgtcgtcctgttcgagtgcgacggcaagcagatgatgatctataaacacgcgatctccactgttacgccgcagcaggcgatcatggtcaaggatttgatgaatacccctgcgtctgaagattaaaacggggtagaaggcgtctgatgaagaagggataaaaatgacaatttcagatagcatgcaagccatcggcgcgctatggcatatttcgccagccgtattagaggcggtttcaaaggcggaaatgcgcgcaaagcgggctcaatcgttgatcgatgaggtcgcaaaagtcaatcaggccagggtgctggccgcatttcagaaggaaaaagtcgccctgcgccactttgcgccaacctcggggtatggatacgatgataccggccgggatacgctggacgcattatttgcggatgttttagggacggaagacgccctggtgcgcccgcagatcgcctctggcacgcacgcactgggcttggcgctatttggcctgttacgcccgggcgataagatgttttccatcgccggggcgccttatgatacgctggaagatgttatcggcatgaagagcaaccgggatggctcgctgtcttcctggggggttggttatctgcagtctgcgctgaacgatgaagcagagttcgaccttgaatatattcgcctgtgcctggaaaaagaggaaagtattcggctaatcttcatccagcgctcgcgcggctatgcctggcgcccatccttatccgtgcagaaaatcgatgaggtgatccgctatatccgccagattcgggatgatgtgtgcattgtagtggataattgctatggcgagtttacccagacgcgcgaaccacaggccgatgtgctggtgggttcgctaatcaagaatcctggtggtggtctggcgccaaccggcggttatatcgccggtaagaaggcctgcgtcgaaaaaatcgcagagcggtttacaacgccaggaatcggtaaagaggtgggttcttattatgccagctatcagcccttttatcaagggctgttcatggcgccgactgtcgttgccgccagtttaaaaacggcggagttgttcggccatctttacagtaacctgggctttgatgtgctgccaaagccgggtgaaagccgctacgatatcatccagtcgatacggtttggcgcgcctgacccgttgatcgctttttgccaggggatacaaaccgcatccccggtggatagctatgtggtgcctgagccttgggatatgccgggctatcagcaccaggtcatcatggccgcgggcgcctttacccagggcgcttctattgagatgagtgccgacgggcccatccgtccgccctataccgcctatttccaaggcgggttgacttatgagcatgggctgctgggcgcattggtcagcctgcaaaaaatggtcgaccaaaaaattgttaaattataaccgaacggaccgacagttatggcagggtagagaagggggagtgctgctttcatgaaaaacccaagcacagctgataagtcaaaatactgtattttagacgaagaaaagatttgtgatgattgcggcgagtgcgaccgctgcgatctggaccctaataaaatctgtgataattgctgccattgtatcgacacggatactgattatggcgagatcgaaatcgatggcatctatacggatatcgagagcatcgagcagatcgaggaaaaagagagctaaatactatataattgaaaaaaagggcggggatgattaatcctcgccctttttattatcttgattttggtcgagttctatttcgctaccgccgtcctgttcgtgagcgctttgacgcaataccacggccctggcagcgctgcggcgctgatcctccgcaatcgcggcgtagtgcctgcgcgtggtattcacgtcgctgtggcccagtacatctgccaccagatagatatcgccggtttcccgataaagggaggtgccgtaggtgctccgcaatttatgcggggttattttctttaacggcgtactggctgaggcgtattttttaaccagctcctgtatgctgcggttgctcatccggcgtttttggatggacagaaacagcgcgtcctcgtgccctgggagcgtagttatctcgcggcgctgctccagataatgggtcagtgcatcgtttacttcgtcgccgaagtaaataatcgcctctttgccgccttttcggatgattttaaagcagcgattatgaaaatcgatatccgatatatttaaccctgtgcactcgctaatacggacgccggttcctagaaaaactgttagaatggctacgtcgcgcaccttggtataacggtgatactgcttttgcttatccgttagcacggtgcccgtttcaacgctatccagcaaacgcgcaacctcgtcaggttctaaccggatgatcgccttatcgcgaatctttggggtcaccatcagcgatacgatgttgcttgagatctgctgcgtccggtaatagtatttgaaaaacgagcgcagagaggctaactttctcgccttgccgcgttcctggttttcgtgctcatgttcgtctttttcgtaataattcaggtaatccaaatacatctccagatccgtcagggtaatggcctctaaatccttaacggtcaaagcctgcatatccttatcctgaaaataaggaatatcttttagcagataatcgaagaagacgcgcaaatcgtaagcataattgatgcgcgtcaataaagtcgttgtcgactcgatgccgataaaataatcaaaacagaagggcggcaaagagagcattaacttgcgcaatttttcgatctggcggcgtctcagggattgctgcgctttctttttttgctgatcggccataatccacagcctccaatgcttccacagccatgtactgtggataattgtggataaccgcgagttttccacagcttcaattataagttatctcgtcttttttgtcaatactctgcgcaaaacttgtgttttgcgcagagttgaaaaagttcacaaagaggggtcgcgctcctctgctcagcttatgctgatgcagcgcttccaacatttagctttcttgggtaaataaaaaagcacgtcgggtttttaaccgcaaacgtgcttcactttcttgacttatttgtaaatccctaaaagaaacttagtcgatctcaatggctggcgccttctcctgaacggatagatggcgatttgccttgatctgcccgcgcgccatttcatcgcaacgattatttagcgggttgtcctgatgtccgggcaccttaacccattcgacgctgtgacgctgggtttcagctaaaatcgcgcgccataagtcctgattctcaaccggctttttagtgctggttttccagccgttacgctcccagtttttgagccagcctttttgaaaggcattgatcaagtagctgctgtccgagtgtaattttaccgtgcaattttcctttagtgctaaaagcccctgcaatgcagcgaacagctccattcggttattggtcgtatccggaatgtaaccactcagctctttcgtgtgtgggccatattgtaaaataaccgcccatcccccgggccccgggttccccgagcaagctccatccgtatatacgacgacctctttcatgattgctctttacatcctttcaacgtactttaacatacctgcttattttaacagttcacgcagcttaaggcaatactattgctttttttatgagtgccaaactatttaaaattgcgtgcaaatatatattgaattttgtataggcttttattgacataagacctctagaatgatataattttatacgttgcaagaccaattataggggcatgatgtaattggtaacatggcagtctccaaaactgctctcgagggttcgagtccttctgcccctgccaacggcatttgcgccgcattagataccgtcatttacttcggtaagtggcggtatttttatattcaaagcggccaggtactgcaatgctttttaattgcaaagccaaaggcactaccgtaagtgcctttggccgatttcattatgctatttatacttcgcgctgtgcctgacgtatttcatttaaaacccgattgcttatttgcgccgcatgtagggcgggctcacctaaatagtaaccctgtaaataactcacgccacagcgtatcaacgtatccatttcgctgcgggtttccactccttcggcaatcacctgaataccccgttccctggtgtaggagagcaaattgctcaaaatcttttgcctatcttcgtcgatatcgatatcccgaacgatggacatatcgatcttgacatactgaggagataaataaagcagcatcgcttccccattatagcctgtaccataatcgtccagcgctaatgcggcgccccatttttttgtatattccttttttagcgtgacgaatacatcgttttgcttttcctcttccgtcagctccacgacgatgcgcgacagatagcgctcataacgtttttcaaaaagcgcaagatcctgcaaggaaagggtttggttggcgatggaattgataaagatatggcagctgccctctaccccctccaaattagcaaaagcatccattgcattaaaccaggtcagccgttcgatttggtatagcttggattgtgaacgcgccagcgttaagatctcctgaggcgtaatcagagaagccgattttgagcgaatcaacgcctcataggcaaaaatctttccatcatgcgcgtctacaataggctgaaaatggtactcaaatagcttttcttcgataaatcggttgatctcttcactgttctccaatatataagagcctgcctgatattcattccggtcaaactgccgaacttcgccttttaccgtatgcttgacggtgtacatggcaaaatccgcaaaacgaatgagctcttcataggtgtttgcatccttcgggtaccaggatacgcccgcagaagctttgactttaaacagcgcattatctggcaacggaaatagcgtgttgctgatctgcttccgcatattttgaatggcagaaaacgcgcgagcctcctgtgcataaccgtagatgaataggtagaactcatctccggaaacacgggaaattaccgcccggcgcggtgcgtattttttaagcgtcctggccatgcagcggatatattgatcgccaaaatcgtgcccataagtatcgttgatatattttaaattgtctaaatcgaacatgaccatagcgctgcacttcagttggtctttattgagaaacagttgatccaacctggcataaaacgctctgcggttgagcagattagtcagcaaatcatagtcacgctcgtattcaatcttccgcttttcgataacctcttgggtaatattttcgataatgccatatatcttgttatcgccttgctcaatctgcttcatgcgtacccattgcgattggcctagggcgtctttgatcttatagatttttgccccttccggctcaatcgattctaaacaatcttttaacccctgcatgatttgtgtaaaggtatccgcatccgtgtatccataatccttctcgttatcgtgcgcaattcccacaatctcgaaaaagtgtttggtataaataacggttttttcatccttcctgtattcaaacgcgccaatcgcaacactggcgctctcgatgatcgcacttagccgtgaagctgattcagccacattgctgctgcgcacctttttaacaagctgtgtaatcgggttggtgacgatgcgcgtcatgatgaccacactcaaaaggccgatcaacaacacaatgcccactgcgatcaacaccgtttttcgcatcgcctctgaaaaactaaatagcctgtccccctccaggattcccaccaggccccattgttcatcgacaaagggagtattgctgttatataactgaaagtactggatgcatccataaacatccttagtcatgttgccctgctgctggatctgatgacaggtgccgtactgcgtctgtaaagcgaaactagtcgtttcttcgctgccaatctgctgcttataaaccggcccgttagccagcagattctcaaataccagcgtttcagaatcatcagcggtatgtaggcctaagaggtaggaacccgttttatcgtttgcaatttcatcgtagggcagcaactttttaatatagtctgtcgaaatctccacacctaatacgccgtaagtttcgccgctttctgcgcggagcggtacagaataagtcatgatttcgatgtcatttggcgataaacgaaagggtcggctccaataccccaggtcgccgtattgaatatccggatattcctgagcagcacgatagggcttataataaaagtcgtaggtagtgttttcggtttgggttaaatcgaactgcgggctccagttggtatccatggatatccctagtttctgcgtaatttctgacggcgcgacctcaaccattatatcgctatcatcatccgcgttggacagcgggtcaagatcgcggaagtatatgcccgctttcttatccccggccctatccgtatccagaatgaggaaagcaccggtgacggattgctttcgcagcatatatattacgttttgagagttcgcctcaagaattttactcgccagcgctggattattttcaatctcggcataactggcccctttggcagctaacgtttggctggcggcgctttggatggattgaacagaatcatccagtttggaccagcgctggatcatctcattttccaggtagtttttacggttgattacccgctcgttcaaaatatccacggcattttggttcatttggtccaatataccgctcaatataatgcttccgccaaacaggctcgtttggagcagcagtacgacgatcatagggatcatcagcttgcgcatcatagacgtgcccctgccctttatatggcgcatgctgctcctcatctcctctcggctgacttttttaggaatttaccgcctcatccaaatcctctttcaactgggcaaaccaggcatcaaaattctcatccgtatcatattgtgcgatggcctcctcgcgggacattcccccggccatcaattccacaatagcgtccctgtcggctttagctttgtctatcatcgaattctccaatacagcacgggcattggttccattttcaaaagccttactggtatacagctcatattcgtttaccgtttcaacggcgaccggcatggaaaccttaagattctccgtcaccgctgagggctccaattgatccagagcgctaagcagcagctctgcgtcattcgccgccgttttgaccggcagatagccagattcaattgaaaaggcgatatttcgctcttcctgtgtaaaccatttcaaaaattcaagcgacgcgcgctcacgcttctcgtccgtcttgcttacgaccatgcccgccccctgctgtacggcaaccttagtgccgttttcaaaacacggcgtgggtaatacgctgacttcaataggatagctttcctcgtcatttaccacaacgtgatccggaaagtaggcggcaccagaagtagagccgaccagcgcaattaaatcgcccgtctttgcatcgtctgaacggaaacgcccataatgggcaaagtatccgttaatatagggaatataaaaattatcccaaagtttacgtaagatttcttgatcgcagttaaggctgacctttccgtcagtcacctgaaaaatttcggttcccaattgcttgcagcctatgatcatataatttgccatcgcatcccgcccaaaaaaggccttcccatcattcagttcgggggtcaggctatccgtccactcataataagcctgcgcggtttttgtcaacccttcgatggtcgaaagcgcatctgtcgatgcgccggttgcctgtgcaaacttgtcccaatcggtttggttaagcataaatacttccgtagattttgccgtcggaaagatttttagcttactcccctcgccaatgcgcccttcttccagatattcgggaatatactgcgccagatcttcttccgtcatatactgcccaatatcggcaaccagccccatttggtcgatctggtacgcggtatcggcataagcggcgaagatttcaggaatctcgcccatccctacttttttattggcggcatctactactttttcagtcaaatcatttacgctgccctgcccgatggtttcgacgacgatccctttttcgagtcccatcgtctcgttaaactcactcaccagcgcatcaaacgccattttttgcggtccattataataatgccatacctcaatcacagtgggattttcagcatccagctggccattctgttcatcttgcggattgcaacccggtacaaggaacaggccgcagcataacgccccgattagaaatgttgtaaaaatacgcttcataccctcattatcctcgtttctcaaaatgcatctgccgaatgccaaaaagccaaaaaacaagctatggcacacgagtgtacaatagcatattaaattcattatagcatttactaaagggcctgtccatcgctgcagattttaataaaaagaaataaaagagctgcgcgaatgcacagctcttttctaaatccgattaatgttacccttacttaggatagacctttacatccatgttcacaccgatagctttgcccaactgataattcggcgcgggcgcttcagctttaggagcctcgggggccgcagcagcaacgctcttgccctcctgctgctctttgcgagctttaaagaagttcattgccacctgcgggaagagcgcgtagctgagcacatcctcttcctgctggatccactcggcgcactctgcacggtatttatccatctcaggcgggatatcatccgccggacgatgggtaatcacgggctcatcaccgatgatcttcttacgaacttcctcattgaccggagcgggcagctgaccgtattcgccacggagcaatcccttggtctccttggagttcatcttatagcgctcacccatcagcacgttcaaaaccgcctgcgtaccaacgatctggctggtaggcgttaccaacggcggataccccatatcctcgcgcacacgcggtacttccgccaatacatccatcagcttttcgctggcattttgctgcttcagctgggagatcaggttggagagcattccgcccggcacctgataaagcagcgtattgatatccacgctcagcaccttgggatccaggaacccgtcagccttcaggcgatcggcaaccttgcggaagtgcacggcgatctcgctgagctgctggagatccagaccggtatcgtactgcgtacctttaagggtcgcgaccagcggctcagtagccggctgcgaggtaccgttgcccagcggggacagcgccgtatctacgatatccacgcccgcctcaatggctttcatcagcaccatatcgccggtaccactggtgttatgcgtatgcagctggattggcactttgaccttctccttgagttgtttgaccagctcataagcatcaaacggcagcaaaaggttcgccatatccttgatgcagatcgaatcggcccccatggcctcaaatttctgcgccaactcaacgaaatattccgtcgtatggacaggactgatggtatagctcatcgccaactgggcgtgaccgccgtactttttgatggacttgacagcctgctccatatttcgggtatcgttcaaggcatcaaatacgcggatgatatcgataccgttttcaatggactttttcacaaactcatcgaccacatcgtcggcgtaatgcttgtagcctaagatgttctggccgcgcagcagcatctgcagtttggtattgggcagagccttgcgtaattggcgcagcctctcccaggggtcctcgttcaaaaagcgcaggcaggaatcaaacgtagcgccgccccacacttccagcgcatgataacccaccgcatccagcttatcgcagatcggcagcatctcgtctaagcgcatacgcgtcgcggcctgcgattgatgcgcatcgcgcaggatcgtatcgcaaatcaaaactttagccataatttacctccatgtttatttggcaaacatagaaaggaatacgccggcggcaacggccgagccgataacgcctgcaacattcggtcccatggcatgcatcagcaggaagttcttgggattctccttctgtcccaccacctgagatacacgcgccgccatcggaactgccgaaacgccagcagagccgatcagcgggttcaccttgccaccggtgaccttgtacatgatcttgccaaaaagcacgccgcccgctgttccacaagcaaaggcaacaagtcccatgagaataatcccaagcgtatctgcctgcagaaagcgctcagcattggcagtagcgccaacggtcacgcccaggaagatcgtaacgatattgatcaactcgttctgcgcggtcttgctgatacgatccacgaccttggattcgcgcatcaggttacccaacatcagcataccgatcagcggtgcggccgagggcaacagcagcgctacaacgatggtaacagcaatggggaaaacgatcttttccgtctgggagaccggacgcaactgctccatgataacgttgcgctcttttttggtcgtcagcgctttcatgatcggcggctggataatcggcaccagcgccatgtaagagtacgcggccacagcgatgggccctaaataatcgggagccagccggctggtaacgtagatggccgtcgggccgtccgcaccgccgatgataccgatggaagcggcaacgttaacgtcaaagcccagcagcagcgcgccgatgaaggccacaaagatgcccagctgcgcggcagcacccaaaagcaggctcttggggttggcgatcagcggaccaaagtccgtcatcgcgccaatacccaggaaaatcagcggcggatagacgccaagttttacgccttgatataggtaatatagcaatccgcccacttgttggacctgtgttgtcccatcctctgcgacataataggtcggctcggccatcaggccgcccatgggcaggttgacaagcagcataccaaaggcgatgggcaaaagaagcaacggttcatattgttttacaacggccagatagatcagcacacaggaaaccagcagcattacgccctgttgccaggttagcgtggcaaaaccggtgtcctgagcaaatttcattaaagtctggcccagatcgatatctaacatttttcaacatcctttccaaggccctttcgtaaagaaggacggattattcgatcgtagccagcacatcgccggagttgacggcagcaccctgagcgatctgcacactggtcaccttgccatcgcagggcgcaaacagctcgttctccatcttcatggcttccagcacaaacatgacgtcaccgcttttgaccgtatcgccaaccttaacgttaatgctcaaaatggtacccggcatcggcgcggctaccgtttccccattgccagaagcggcaggagcagcagcaggagccggtgcggcggcgggagcgggagcagcagcaggcgcagcgaccggagcggcagccgtgcccgttacttcttcaacttcaacttcataagaaacaccgttaacattcacaacaaacttgcgcattatgtggttcctcctctaatttactctaggataaatgcagtgctcgcaaaccgctttacttattggggatgatctcacgaatcgagcgaatcgcgatatggccctgatccagacccgtaaatgccgcaatcgccgctgaaatcgccaccaccaggccctgttcaccattcgcagccggcttggccgccgcttgaggtgttgcaggggtctgcgtcttcggctgcttgttcgccgtcattttccctaaggtcatgctcatgatcttgaccagcaagatgataagcagcagacccacaaagacgatgacaaggccgatgaccatgaccattaagccatagattagtttatccatactctctttccacctttccctctacattttgtttaggatacaccctacggattgcttatataaaagccagaatagaatccgttttgggaaaggcaggtgcccttatcaagaaaaaagccccaacctagcccaaattctaatattctacatttaacctttttttcctgcctctggtcgatattttttattctaaggcctgttttaagccacaaacgattgtgcagccgcgcagaataatgtctttatcttgtggcataagcgttaacgctgcacagtagcctttttatttccgctcgatcacaaaccattgcggggcattttctgtctggtttgcaaaaacaagatgcagcgccgtgtattcggcctccctcagcgttttaagccattcagtcaaggcttccgcctcctgcctgccctcagtatgccccggataagcgcagatcgatacgcgcccgcctggccgtaaaaggctgagtgccgatacaatggctttttgagtagaaggccaaagcgttttgacggcacgatccccggccggaagatagcccaggttaaacatacatgcggccacgggcgcctgtacatgccgggtcaggtgttcatggctgtccaagatcagttgacagcggccatcaagcgcctgctcttccagtttttcgcgcgtgcgcgtcagagcgagctgttgtacatcaaagctaaaaacccgtcccagctcccccacctgtttagccagaaaaagcgtatcatatccgttgccggcggtggcgtcaacaacctgctctcccggctttaccacttgagagatggcccaatgggaaagagccctggcgctttccggaagaggcacgagcccgctttgactttcttctaatacacccatcttctatatccccttttgcatggcttaggcatgcagcccgcagacctgtttgatctggcgcagttcctcatccgtcaacgggcgcacagcgccgataggaagggtgcccagcgtcaacggccccatggctgtacgctccagcgatacgacttcgtgccctaccgcctcgcacatcctccggatctgccggttacgcccctcgcggatagcaatctctatatcggagtagattgcgttgcttcgcaagatccgcacctttgccggcgcagtcatccgcccgtctaagggcaggccttctcgcagccgctgggcctgttcgggcgtcagtttgcccgcgatgcgcgcgcaataggtcttatagatccggtggcgcggatgcatcagcgcaaaggaaagatccccatcgtcggtcagcagcagcagcccgctggtatcgtagtccagccggcctaccggaaaaagccgcggcgcgccgccgggcagcagatccacgatcgtcttgcggccctgcgggtcgtaaagcgtagtcatcaccccgcgcggcttgtgcatcagccaatacgtatgcaacatgaccggggttacggttttaccgtctaccgtcacgctgtctttttcttcatctacctcaaatcccatctgaatgatttgctcgccgttgaccgtgacccgtccagatgcgatgatctcctcgcactttctgcgggaagccaccccgcattgcgctaaataacgttgaagccgcacgctttatcgcccctactctcatcattactcacagctaccagtataacccaagtggacggtatttggaaagatgaggtttttaaagaaaagcgttcttgcatgctgttttcaaccatgataaggtagaaaaaaggggggcatagtgatggagcaaaatagctattgcgaaataatagccgaccagaccgagcgggcgctgtgggaagtcaaaaacgtgatcgactgcattccggacgcgctttgggaccgcatttattgcgacatgccgctttggaagcatgtttatcataccctgcattcgctgaaccaatggtttattaaccctatggtctatgcgcagccgcccttccattgccccgcgcttaatgatttggatgtggtaaccgaaggctatctgtcccgggacgagatccagcgttatgttcggtccgtatccgagaaaattcgcgcttatttaaccgagctcacggatgaactgcttttaagctgtccgcagagctgcccctacactcggtttacgctgatactggcgcagcaccgtcatctccacacgcatatggggatgctgatgggctacatcattgcggaaacggggcagtggccgcgcgtattaggactgacgcatgaaattccttcgcagagatacgataagtttttttagtaaagcaaagccgccttaataggcggctttatcattccatttgcttaactacgcgttggtgttgtcgccgggcgtgcagcactctttttgctgaagcccttcaacaaattttttgatctcacacagcacctgcggcactatgtccacgatgcggtcgtacggcgagttgcactgggtgggcatgacccgcatctgatcctcagaggccactaaaaaggccaccggggtcagggatataccggcgctggttcctcccgcaaagggaaaccggtgcgtatcgtccgccgcagtgggcgtacccggcgcgggattgccgtattccccgcctccggcgacgaaaccgaaactgaccttggataccggaacgatcaccgagccgtcgtccgtctgcatcgggtcgccaataatggtattgacgtcgatcatatctttaatattttccagcgtggttttcatgatgttttcgatcggatgattcacgtgctatttcctcccattcatacgccgcatccggaacaataacatcaggatatggcgcaactttactgttattatggtttgaaaaacaaattccatgcacgttttttggaattcgggcagcactgttgcgctgtagtgcgacatttctcctgcacgcgttgaaaggatcgaagcgctgcaggatacaatggtctgcagatacccacagatcagtgcggttttatccgcgtggccgccgattcccaggcgaaacttaaagtacagttgtctaaagcgtaggtaaggaagtatgggcccctttagacggatattttgttttgggcgtagcttgaccacttgtatgcgctcttgcagccaatcgaccagcactgcttcctggaggagctgctgtttttttccaaagatcaggatatgccacgccccgtcctcggccttttgaaaagttactttccgcgcaaaaagagttgcgcggaaaaacgacgcgcgcagcgccatatcctttccctcttgcgttatatttacgttggtttctaaacgcacgccgcaaaaaaagataaaggacaggagcagcgccagccccgcaaataaaaaaagaatacctgcatccatcggttttggaacgccccttccctatctgatggatctagtattccttttgattggcaaattcatacaatccgcctaagattccgtatcttcatcttccgtctccaggtcaagcacggcttccgatgcgccggtatcttccaaatggatctgctcctgctcgggcggcaggcgccactcatcccggcccggcagatcctctatccgctccagcccaaaatgccgcaaaaattcatccgttgtccccagcagcattggccggccgatgctctctttgcgccctacctcctggatcatgttctttttcatcagggaattgatcgcatactcgcagcgcaccccgcgaatctgctcgatctccgcccgggtcaccggctgacggtatgctacgatagagagcgtttccatcacagcctgggataaagactgtttccgcttgggaaatagtaatttctccaccaccgtgccatgttcgtttttagagcccaactgtactttatcgccgaatttgatcagcattagtccgctgtccggccgggcatatttttcgtccagtgcatctaaagcgtcgtacacctgcgccagggaaacctccaatcccttggccagctccttgcgggttagcggatcgccactaacaaataagatcgattcaataagtgacgccagggcaattttatccattcgtttctctcctctacgctttaaccggtttggcgatggcgcggatataaatctcgctaaaggcattatcctgcgctacctgtagccggccggccttcagcagctccagcagcgctaaaaaggtggtcaccacggcagcgcgctcgtaacggccctcgaaaagctcgtggaaggtgacttgcccattctcgcggagaatttttctaaggtactgcatccggttttcgatggtataaacgtcgctgtcgatcttatcgctgaaaacattgggcctgtcgatatcctgcgcttggctcatcacggcggcaaaggcttcaataagcgtgtctatagacatgttttgcagttcgaccggccgctccttggtgatccattcctccggcagcttaaaaaatacgtttttataggtctcctccagcgcgcggagattttcacccgcttctttatacttcttgtattccgtcaactgccggatcagctccgcctccgggttctcttcttcttccacagtttcagctggtttacggggcaacagagaacggcttttgatatataaaaggttggccgccatagctaaaaactcgctggccgtatccatgtccaaatcgtccaactggcgcatataggccatgtattgctcagtgatctcggagacaaagatatcttcgatctggatctgcgcccggttgaccaggtgtaaaagaagatccagaggcccgtcaaaatcccctaagtgaaagacatatgccatagctacgccaccttataatcccaaaagggtaaaaagccaaacgaacagctcgaccatatgcgccagcaaaaagcctacgatattgctcaggataccgctggtaaagcccaacagtaccaggaccatcaggagcagaggtccatacttttcaaaagtccacatggcctttaggttgcgcggatggataaagtttttaacgatgttatagccgtccaacgggggcagcgggatcaggttaaatacgcaaagcaccaggttgatcgataccatttcggatacgatattgtaccagatattgccataggcgccataaaacagcatagcgaccagtataccggtaaatacgaagccgatgatcagattcatcagcggcccggcaagggacacccatagcatcgcatggcgcccgcgcatccggcctgggttgacctgtacgggcttggcccagccgaacccagcgatcagcagcatcagcatccccagtatatcgatatgggcaaagggatccaatctcagccgcccggtaagccgcggggtatcatcccccagccggtcagctacccatgcgtgcgcatattcgtgaaaagtaaagcccacaaacagcgccggcaggcggtataaaatcgtcatcaaactcagattgcctatcatctttatctccaaaacaattattcaatacaatttatttatgatagcatgctgtacaaaaggatgtcaattcatacacctggataaagcaaagccgccgggcacagcgccggcggccttataaaggcttagatcattcctggtggaaccatcgccccagtatcttattaaggtgatcggcatattcggccttggctacggcactctctgcgatcagcgggatgcgcgtcagctcatggtcgccctcggttacgatcagctcgcccagcggttgcccctgttcgacgggggcgtttacctcttgctgcagattgacctgggtctgcacctggcgcggagaatttttagacatcaggaggctgtagccctcctgggtgaccgcgttaacggcaaactccttaccgttgataacgttggattgcccgtatacctggttgggctggatcacggattgtagctgaaaggtattaaaaccaaagttcagcaggtcgctggcctcctgaaagcgcactttggatgagggcgcgcctaaaatcaccccgatcagccgcacgtcgccgcgcttggcggtagcgctcaggcaaaagcccgcttcctgggtagaaccggtcttgattccgtccgccccgtcgtaagtctgcaataatttattggtgttgctcagcatggtctcccggttattggcgtgctgaagataatccagccagatcgtgctgtattgaaaatagacctcgtgcttgatcagctcccggctcatgatcgccacgtcgtgtgcagtagagtggtgcccctctgccggcaggcccgtgcaatttttaaacagcgtcccttccattcccagttcctgagcgcgggcgttcatccggtccacaaaggccgcttcgctgccggctactcgctcagccatggccacgctggcatcgttgcccgaagcgacaatgatggatttgatcaggtcgcttaccgtgtattggcccccctcatccaacaacacctgggagccgcccatccccgccgcatttttactgatggtcagcacttcgtccaaagcgatctcaccccggtcgatcgcctccatgaccagtaccagggtcatcaccttggtcacgctggcaatgggcatctgttcgtccgatttatattcgaacagaacctcgccgctgaccggatccatcagcaaggcagatttggattggaactcgtaatcaaacgcctcctgcgcccttgcgttctggaatggcagtaccaagattgccagcgccaacaacaacaccagatatcgattaagcttgcatttcaaattgacccctccccaaatcatggtatctcgcgcacaaaattaacccctgtacatatggtctatgcccaggggttacaaaacatgtctatattgtgtctttctgccggattttgggggcgaaattccctacaacgcagccaggatggtatcgaccagcgcggtaaagcgcgcctcaacggccttacccgtctccataacctcctggtgagaaaggggctgatccagtattccagcggccatattgctgatgcaggaaaggcccagcactcgcagcccgcagtggttggccacgattacctccggcacggtggacatgcccaccgcatcggcgcccaacgtgcgcagcatccgtatttcggccggcgtttcaaacgaggggccgctcatcatggcatagacgcctttttgcaggccgaatccgcattgcttcgcggcgctgtcggccaaagcgatcagctcccggtcataagcgcgggacatatccggaaagcgcgggccgaacccgtccaggttggccccgatcagcggattattgccggaaaaattgatatggtcttctatggccatcagatccccgggctgaaactgctgattgaccccgccggcggcattggtgacgatcaaggtttcaacgcctaacgcgctgagcacccgcgtgggaaacgtcacctgggccatatcatagccctcgtaatagtggaacctcccgcacatcaacacgatgtcctggccctgatggcgtccaaaggccaactggccggcatgtccaggcaccgtggtcttcggaaaatgcgggatgtccgcgtaagggatcgtctgcatctctttacaatgcttagcgtaattgcccaaaccgctccccaggatgacggccactttagggcacaactgcgtttgtgctttgatagcctgcacggcttgctcgaaccggctcattttttatccacctcgtctttagtatatcaactgatcagccaccctgaaagaccgcttaaaatccagggcgccaagaatgcctcaaacaatacgacgcctaataaaatcaccccgccggagcagcaggaggacagatagctctttttccggtctagcggcatatgcaggtgcatgattttcagccgcagcgcttcggtagacatctggatcgacttaagagcgagaaaccacaacaccggcaaaaggatgagcgccgggataaacagcgtcaaaaatgcggccagcgcccctttaaacccccatacatagcacatggaagccagcgtaaacccctgtgaaaagccccgaacccccacgatcgccagcgcgaccggcgggcccaaaaccgtaaagccggatagcgtgattaaaatcagtgcctgatagtgtgtaaatagcgagcgctgtagcgtttcagacaaagggcgtgccgtattatcggtcaccacgcccaggatgctttgcaatccatcgcgctgcccatccggcagaatcttaactgtgaccattccgctgaccaatccgatcagaaaaaagaagaggatgagcagatacagcccaaaattctccttcaggtgtgcggccaagcggccgcttaacctccctgtcaagctgatgcatcctcctctccctttggtttgtcctgcgcatatcataacctatgcaccaaagggaaggggtatgcttagcggctgcgcactttatcggccaccatggcgatgaactcgctattggtcggcttgccgcgattttcttctatggtatatccaaataaagaatcaatggcctctagattgccctttttccaggcgacttcgatggcgttacgaatcgaacgctccacgttccccggggtagtattaaactttttggctaccgcgggataaatttttgtggtgatcagcgttgaaatatcccgctcgtccatggccaacaatatcgcttcgcgcagatattggtagcccttgatgctggcaggcacccccacctgtaatatgatgcgggagacccgctcttgcgggatcatggtcaaaagcaaaatcttatcggcgagcttttgcacatcaaaaggccttttttcgatcaaccggcagcccagcgcctccaggtgctgggtaaaccgcccgtctggaagcatggaggtgaccacgactttgggcaggtaatcctccgtgcgctcgtagagcttttgcaaaacggcaatgccatccagctcggatatgatcaaatccagcaggatatactcgggccgcgtttttagcaccagctccaaacccgcccttccgtcaaaggcctgtccgatcacgtcaaaaacctgcgttgcctccagcgcgctggtcatagcgccgatcaaaaaatcgtttttgtcaataatgacgacgctgtgccgtttatccaatcaaactacccccaacctcgttttttaacattataccacttctacggttcttgtgctaacatccactctataaacataccatatccacgcgttggatcatttacaaatacgtgcgtgaccacgcctaccaggcagccgttctggatgatcgggctgccgctcatcccttgtacgatgccgccggtgcggcttaaaagttcaggatcggtaacgcgcagcaccatgctcttgggcgttggtgtcccctgctgggtcacccgctcgatctggcaggtataacgttggggtccgctgtcgtccagcgtggtcacgatctgcgcctctcccggctgcacggtagaatgcaggccaatgggaatgctgcggcctttgagcagcgtatctaaagcggcgtaagaatggccatacaggccaaaggcattgttttgggcgatgtcccccagcgccaacggctggtcaaaaaaatcgccctgcagttcgcccggctctcccaccttgccctgctggatgcccagaatatgcgattcgtagatttcgccgtttttaaccgtcagataattgccggtatcgctgtccgcaatgccatggcccagcgacccataccatttttgcgcgggatctaaataggtcagcgtgcccacacctgccgtggagtccctgacccagagccccagccgccagacggaatcctgcgggtccaggatcggcgttaggctgacatccatctccttacccgagcggctaatatgcatttgcagcggatcgctgttgcccacgttgatcaattcggaaagatgtacggcgttttgcacttcctgtccgttaacgcttaaaatggtatcgcctgccaaaagcccggcttcattggcgggattgcgcaaattcccgtatgaatccataatatccgaagtgccgacgaccagggcgcctttggtataaagcgccacgccgatagcctgcccgcccagcatcacgtttttctccggcgtcacctcaagggccacctgctttacggggatgcccagtatctggagggtcagcttatcctctccgggttgctgcgccaagaggtctacattgccgcccgtatccgataaagtggttcccatcagcttggtcacagccgtatcgtttttttgtgcggtaagcagccccgggatctccagcgtataagcctgaccttcggaaattaaaatatggtctggaatggcaaaaatctgacggacaaagggagagtttgcgccagcgacgacggccagcgcgcaaacccagcctactatttgcttgattcgggtcttcattcgatcacaccttcgctccttaatatttctttaggattggcgaaggccctatgattctataccctttggcgcaattttttgcggatggtctgcgcctgatgaaggatcgcccgggcatgttccaggtcgatctttgtgatctgtgccccggcgttcatccgggcgatttccgaaatgcgcgcttcatcgttcagcggcgtgagttctacggtggtatcctctccgttttccgtcttgcgcaccagtaaatgctcatcgccaagcgcagcgatctgggatagatgcgtcacgctgatgacctggcggtcgctagccaaccggcacatcttttcacccaccgcttgtgcgatacgcccgctgatgccggtatcgatctcgtcaaaaatcatgcaggggatatcgtccgccgtagcgctgatattcttgatcgccagcatgatgcgcgacagctcgccgccggacgcaatctttgccagcggcatcagcggctggccagggttgggggagatcaaaaactccacctggtcgatcccgctgctctgcaaccggtcgcggaagattgcatcatcctgcggaaggggggcaaaaacggttttaatttccagcttctgcatgcccagatcctgcaggtggcctttcagcgccgcttcaaagctttgggcggcgtgcatccgcttttcgtgcagcgccagcgccttctcttttaccgcctggaacagtgcgctttcctcgtttaccagctgttcgatatgcgcctcgctatcctgcagttcggcatattcctgctcgatgctttcggcgtatgccaatatctcctcgattgagctgccgtatttgcgtttgagcttatagatctggttcagccgttcttccacgctgtccaaactctcgccggcatcctcccagccgctatctagcgcatggaggtcgccgtcgatatcctccaaagcataatatacctccgaaagcttggcgtgtagggcctcaaagggctggtgtatgcgggtcatgctcccaatggtcgattgaacctcgcccaggatatccagggcgctttgcgcatcctctccaccttcaaaaagcgcctggcgcgcaaaggcaagggtctgcatgatctgttcccggttttgcaaataactgcgcctttcggccagttgttcttcttcgccggccgtcagctgggcagagtggatatcatctagctgaaagtgcagcatctctatccgccgggccttttcctgttcgcttaaacggcttctgttaagggctttgcgcacttcgcgccagttggaaaaaatgcgcctatattcgctaagttcctgccaaaaatcatcgccggcaacccggtccaaaaacgcgcggtgccgtgccgcgctcagcagcgattggtgctcgtgctgtccatggatatccaccagcagcgcggataactgctttaattgagaaacggataccagatggccgttgatccggcagatatttttccccgccagcgtaatatcccgggaaagaatcacgttttccggattgtcaggatcgtcataaccctgctcctgaagatggcggatagccgcatgccctttgggcagcgcaaaagccgcctctacctgcgcccgctgggtaccatagcggatcaatccgcggtccgcccgctctcccaaagccaggttgaccgcgtctattataatggatttacccgcgccggtctcgcccgtaaggatattgagtcccgggccaaagggcacctccaaattttcgatcaaagcgatattatggatggtcaggcgataaagcatgttggctccttacttcatcatttccttgaatttagcgaccagcacctgggcggcgtcattgtccggcgcgaccactaaaatggtatcatctccggctatactccccacgatctcgggccagcgcatgctgtcgatggtattgccagccgcatgggcgctgcccgaaagggttttgatgatgaccaggttgttcgccgccacaatggagagcacagcctccgaaaatacgcggataaagcggttggtcatcaccttatcggctttatctacggttgcatatttataggtgttgttcggcgttagcactttgaccagccgtaactctttgatatcccgcgagatcgtggcctgagtgacctcgtaccccgtttcgcgcaatgcctcggccaaatcttcctgcgtttcaatatcgtttttatcgatgatatccagtatcatggcgtgtcgtcccgatttcatgcgtcatccccctttatgctttttcttccggcagttcttcagccatgctccattcggaaaacttactatgcaataattgataaaaattgcgcccctttaaccgaataaaggtagcctgcgccttggcgcgggtgatctcaatgcgcagcttgttggaaaccgtaagcagcgtctccccatccagcgccagttgcgcatccttatccgcagcggtcaaaaccagctcgatcttgctgtcggcccccaccacaataggccgggagtacagcgtgtgcgcgcagatcggtgagagtagaatacactccagactgggcgcaaggatcggcccgcccgtagagagcgcgtaggccgtcgagcccgtagggctggaaaccaccacgccgtctgacatatagcgatctacatactgcccatcgatataaatctgcactccgatgatgcgcgaaaacgccccacgggaaagcaccacgtcgtttaaggcgatatgctcggccgcctgtggatggccgatgacgcgcgcctgcagcatcatgcgcttttctaaagcgtagtccacctgaacgatgcgccgggcgacctcctgcacattatctacctcagcctcgctcaaaaagcctacgcggcccatattgatccccaacacgggaatatccgcggcggcagcctcccgggcggcgtgaaggatcgttccatcgccacccaagaccaatacgacgtcgcacccagcgatcaaaccagcgcgatccatccccagctccggccgtttgagcacgccggcacagtattcatccatccggacggcggccccataatgttccagcgcgtctaccagctggcccgttacccgaaagcctacgtccttttcatggtttatccaaatcgaaacctgcaccgcgcaacctccttcagcttcatacagtaataattgtaccgctttgtgaatatttattcaactacatttttttaaatattcggaaccattcgctatttagaaagcaacctcagcaaattgagggaaatgaaaaagcgggacaggcagcggtacaaatatcgctgtctatcccgtatcgaccctaaactctatgcgcttcgtgcgcctgcgccactacgccgcagcaatccagcggcgcgggcggaatatcggccgcgcaggcgtaaagcaaaaactcgatatttccctccggccccgtaataggcgaaaaggaaaggcctagcggagaaaaaccacacgctgtcgcaaaggcgacggcctcctcaacgacctcaaggtgcacctttgcgtcacgtacaacacccttttttccgactttatcccggccggcctcaaactgaggtttgatcagggtgaccagctgcgcccccggttcaaggcacttgaccagcgcaggcaagatcaatttaatggagataaaggatacatccatcaccgccagctccagcgcatcttggaaccagtctttttccattgcacgggcgttgcagcgttccatcactaccactcgctcatcctggcgcagacgccaatccagctgtccatatcctacatcgaccgcgtaaaccttgcgcgcgcccttctggagcaggcaatcggtaaagcctcccgtggaagcgcccacgtctatcgcggttttgcccgctgcctttatggggaaaacctccagcgccttttgcagttttaacccgccacggctgacaaagggatgcactttgccccgaacctgcagttcctcccaatccttttccggcaccatttgggaggctttaagcgccttttcttcccgaatatagaccgcaccgctcatcacaagcgccttggccttttcccggctgggcgcaagccctttatcgaccaatagcacatccaacctttgcttattattctccatcgatttcctccaaggcaaccgccagcctttcagctaggctcgcagcatccatgccgtaacgcgccattaaagccgcgcgcgcaccgtgttcaataaatttatcaggatagccaaagcttataaagcgtgccctagtccctttttgcaagagaaactgccctacagccgagccaaatccaccgatcaggacattgtcctccagcgttgcgatcaacggaaaggtgtgagccatctgactgagcatctcctcgtccagcggcttaataaaccgggcgttgaccacggaaatcgcttttccctgtttcagcagccgttcccggatgtccaaagcctcctccaccatatttcctgaggcgatcagcacaccgtcatccccttcgcgcagccggatccatttgcccagctgaataggaggcagtgtatcgtcattgggcaggtgagatacggcttttgaatagcgaatcgcacagggtccatccagcgtcagagcgaattccatcatttggcgcaattcatccacattcgccggcgaaaggatcgtcatattgggcaacggcagcagcattgacaggtcaaaaaggccttgatgagtctccccatcctctcccgttagacccgcacgatccagcgcaaagacgacgggcaggttttgcagacacacatcgtgcaagatctggtcaaacgcgcgctgggcgaaggtagaatatacggcaaaaaaggggcgcaggccctgcgtagccagccctgccgccagcgtcaccccatgctgctcggcgatgccaacatcaaataaacgttgagggaacatctggcgaaagggcgtaagccctgtcccctccaccatcgcggccgaaatagcaatgatcttttcattatgcatggccatcttggtcaagtgctggccaaaagtggcggagaaggtaatgctctgttccttttctttcatgccggtatcgataaagaagggcgctacgccatgataccgttccggaaagatctctgcgcgctcatatcccttgcctttacgggtcacaacgtgcacaaaaaccggccggtcatactcctgtgcgctggtcagaatctgctctaattgcccgatatcgtgcccatccaccggccctaaatacttaaatcccaactcttcaaagaggacgccgggcacgacaagatattttaagctgtttttaattttttctacaaaatgcttggtgggcgggcctattaccgggatgcgctccacaaagtcctccgtccagcgcttgacacctgtataggttcgtccgctgcggatcttggacaggtgcatggatacggcgcccacgctgtgggagatgctcatatcattatcgtttagaatgacgatgatcttgctggggcactggcccgcatcgttcagcgcctcaaaggccattccaccactaagggctccgtcgccaataacggagatcacggaaaagtcatcccctcgctgatcccgcgcgcgggcaatgcccagcgcagcggatactgatgtgctgctgtgcccggtatcaaaggcatcgtggcagctttcctcacgcttagggaagccgcttaacccatccatctgccgcaaagaggcaaactgcgctttgcggccggtgagcagcttatgtacgtaagcctgatggcctacatcccagatgatcttatcctgcgggctgttaaagattttgtggatcgctaacgtcagctctaccacccccagattggaggccaagtgcccgcctgtctgagaaatagattgcacgagaaattgacgaatctccccggccagctgttccagttcggggatgttcatatcctttatatcctgtggcgaatggatgtcatccaacgacttatacattttactcccattcatcctccctaacccgggaaggctatttatgcttctgccggccaatatggaaaaaggccagtacgcgcccggcgcgcagcagaatattggtagagtgtaccagtgcaaaccgcttgccggcggccttgccgcctaccgtcagagccgccacaacgctgctgatgataatattgagcagcgcggacggcgttgccggcgccagcaccacgatgcgcagcacgatggccgcactggctgcgcccgaaacaataccgcacacatccccgacaacgtcgttacaaaaactggccacctggtcggtatgctgcagcaaaaagacgcactgctgcgcgccgtgtacttttttggaagccatggccaaaaagggcttaggtccagcggccgtagcggcgatgccgataatatcaaacacgatgcccagcgcgatcaacgcgatcaaaatcaaaatagctaccagaagcggtacgctgcccaacagcacctcggcaacaaagctgattccgccggatacgatcagcgtgatcagcgcgatcttaaccgcccagtaatttttctttttccttccccgtttggctttgcctccgccgcttttccgttttaacgggatatccgcatcttctttaggcaagtgcgcaccctttctttccaactatactcttatctatgcgccaaatttatggcgtatggtctttaaataaaaaaaggtggtggcaaaatgagtaaaccttgcggcttcaggtctagtagggtttccccgtctgctactccccgtcgccgaaaagagcggtttcccttgaaagcagacgccgccgtgtcgccacgcggcgggactagattaccactaagtccacactataatccccaaattgcctgttgacagtctaggagctttcctcaacaacgccactggttcctagcctcttttgcagatcaggtttcatccggcgatcatgcccgatgcacgggccctgtgcatccgggcacgtattcctgaaatccccccgcgccacgcaaggcaggctacgctgtacacagttattattaccgcatcacaggttttaccccaaggagtgatcacgcgatgtttcacacccgtttgggtctccgcggaagctgggtcatcgcctgcatgccattgcagatcgcccttcttccttatcccccagcagcaacccccgactgggcgtccgaagccaccaccaggaacttcatcgatatgcccttctacggtcttttatccccgttttgagaaccagctttgccgactagaatactgcaccaccttatttgcattaaaatgcaggtaggattatatcatgtttcattacaaaaaacaaatatcctacttaaaggtaaaaaggacggccaccacgacgcctaatatcgcgcccatcagcacttcgaacccggtatggccgatcaactctttcagcttgctgggcgggacgaccatgttgtgcgtcatcatatccacgatctcgtttaacacgcgggcctgtttgcccgccgcctggcgcacgcccatggcgtctgtcatcacgatcgccgcaaacgccgccgccaccacaaagatagccgaatcaaacccttccgagatgccgcaggacaccgccagcgccatcacaaaggaggtatgcgaactgggcatgccgccggagccgaataatctggccagatcccatttgcggtatttcataaaattcgtaaacactttgaggatctgcgccagtatccatcccagaaaagtgggcagtaccactgggtttctgaaaaactcggtgaagaaatccactctatcgttcctcctactgctcgcgcgtcagcaaccgcatcgtcaattctcttaaaaaccacgcgcgctcgccgaaaatttccagcgcctcaaccgccgccagggaatgctccctggccaattcacgcgctttctcgctgccgtagagggtaacatatgtcgtcttttggttggccgcatcgctaccggtagctttgcccaaggtctgggcatcgccctcaacatccaaaagatcgtctacgatctggaattgcagcccaagacggtaaccaaattcgcgcagcgcttccaactgctccggcgtaggtgcggccagctgcaggcccgccagcagcgcggcggtgatcagcgccccggtcttgtgccggtgcagccaggtcatgctttgtgcgtcatcccccgtgccaaccaggtcgacgcattgcccggcgatcatcccctcgatcccggctccacgcgcgatgtgtgctagtgcacgtatatggttgggcagattttcagggaatcgttgcatgtgagcggccattacttcgaaggcgctgttcagcaatccatcgcccgctaaaatcgccatgccctcgccgtacactttatggcaggtcaatttgccgcggcggtaatcgtcgttatccatggccggcatatcgtcgtggatcagcgaataggtgtggatcatctcgatggcgcacgcataccccatggcctgcgcccgatctccttgcaaaagatcgcatccagccaaaaccagcatggggcgcaggcgtttgccgccggccccaaggctgtaattcatcgcgctgcgcactggttcgggcgcgctttgtgtctccatccaatgggagagcgcctcttttgccagcgcatataattgcgcatagtatgcctcgtaattattcatttccatcctcgccgggcagagcatcttttaatgctacgccgcccagctcatcctccgtcaacactttgagcttttgttcggtctcatccagccatcccgtgcaggcccgcgccagggcgatccccttttcatacagcgccagggattgctccaacggcatgccgccttcctccatctgcgcgaccagctcctccagcttttggatattatcttcaaatgtggtctttttctttgctgccatggccattctcgcccccaatttgctcttgtccctcacgggttattgtagcatagcgcgccccatcctggaagaggatctctacctcgctgctgacggccgcctcatgcgcatgcgtcagcatcctgcccgtttcggcgtcccgagctaatgtaaaaccacgggagaggatctgcaatgggttcgccatttctaaacgcgtaaggatgctggcaaaccgcatctgcgtttgccgcaattcgtggccgattccttcttgcagggcgcgcttgagttgcgcaaggcgttcgcgcttgtgctttaagtcgttctccgggctgacctttgccaagcgtagctccagccacttaagctgttgacgcattccgccgatctgctgaaaaaccgcccttttcatcccttcgcacaggtaatcaaggtgctccagcgtttcctcacgggagggaaataccaattctgcggcggcagaaggcgtaggcgcgcgcaggtccgccacaaaatccaaaatggtaaagtcgatctcgtgccccactgcggatacgaccggaatttttgaggcaaagcacgcccttgccagcatttcatcgttaaagacccacagatcttcggccgaaccgccgccgcggccaacgatgatcacatccaccttgggttccagcgcgttaaacatccgaattcccttgcgcacgctggccgccgcatctactccctgcaccaatgccggatagagcaccacctcaacagccgggcagcgccgagccgagatctgcaaaatatcctgcagggctgcgccggtgggcgaagtgaccacgcccacccgctgcggataaaccggcaaggcttttttattagactgatcgaaaagtccctccgcctccagcttgagcttgagcgcctcaaaagccgcatagccggccccctgcccgtccaggcgcatggactgggcataaaattggtaccggccatcccgcggatagatcgaaacattgccggtcatctccacgcgcatgccatcggcaggcaaaaacttcagcttttccacctgcgagcggaacatcaccgcctggatcaccgaatcgctgtcccgcacagagaaatacatgtggcccgagctgtggagtttaacgttggagagctcgccggacaaacgcacgcttttcagcagcggatcgcggcttaaaaggttttttacatattcattcagttggctgacagaaaataccagcgcgctaggcattggctttagccgcctccagggtattttccagcagcatggcgatcgtcatgggcccaacgccgcccggcaccggcgtgatgtaccctgcgaccggttctaccgattcaaagtccacgtctcccaccacttttttagattccggcagccggttcatcccaacatcgatcaccacggcgccgggtttgaccatatccccggtaatcaggttggccttgcccacggccgcaaccagcacatccgctccgcggcaaatgtcttttaaatttttcgtgcgggagtggcagatcgttaccgtagcgttgcgctggagcagcagcatggagataggcttacccacgatattgctgcggcccacgacgacagcgttcttgccttccaaatcgatatcatactcctccagcaggcgcatgattcccttaggcgtgcaggccaccagcgccttttcgccgatgaacagcttgccggcatttaccacatggaacccatccacatccttggctggatcgatggtgcgcagcacggaaagttcgtcgatccccttgggcagcggcagctgtaccaagataccgtggaccttatcgtcccggttgagcttttcgatcagtgccagcagctcttcctgggtggtctgtgccggcatccgaatcacgtcggaggccatccccgcttcgttgcaaccccgctctttattgcgcacataaatctgcgatgccgggtcctctcccaccaaaatcaccgttagccccggcacataaccgtactctgctttaaatgccgcaacccgctctttgagctgtcccctgattttagccgacaggcccttgccatccatacgtactgcgctcattatttccactcctttatcataagtcctgcgcgcgcccggctagcgccacgcccatggcattgtcgctggaaaactcgggctttgcaaaatagatttttattttctgacgatgctttttcagccgtttgggcagctgttcgcgcacccatccgctggcagcaacgccgccgaagatcagaatctgacggatacctgtgcgctgtgcagcacagacgatcatcttttccagcgtgcgcgccacgcaggaaagtgtcatagctgcgatctgctgggcgggcaggccgcctgcctgtatcgcgcgcaaagccgcagcctctccgccggaaaagtggcagtccattccgttgaccgaggccggaatgtgcggatcatctccgccaaattccagggccagcctgtccatctccggcccggcggggaatcgcagccccagcgccacgccgatacggtctacaaactgcccggcgtgcaggtcctgcgtagcgcctaatatctcgcaattaatgctgccagcctgccgcttcgccaaaaggatctccgtcgtaccgcctgaaaggtggagcgctaaaaacgcctctgtttccggcatattgcccgaccaggcagccgcgcgcagatgcccctcctgatgcgaggtctcaaaaaacggtacgttcagcgcctgggaaagcgcgcgcccaaatcccgccccaaccgtaaaaaccggcatataagatccctccatatttcgcgggcgcgcggaggcgcacaccgcggcgatatcccggggcgcaagccccgttttggcgtagagattctcgatgagggtaggcagattctgaacatgaaaaaaaacggcctggctttgctggagccccctagagccggagggcacctgcaaaatttgccgctgttgtgctgcgatattcaagttttgatcgatgacggcaaccgaggtcgtataggcgctggtatcaaggcccagataaaacctcgccccgtcttttgggccaagcatcttacgcgccgcgctcccgtacaaaattagacaaaaccccgttgacgaaagggccggattcctgcccgccataggccttggccaactcgattgcctcgttaatcgccacgctctcggggatatcgctatacattaattcgaaaagggcgctgcgcaggatgcaaagatccatccgcgcgatccgctccaacgtccaccctttcaaataccgcttgatggtttcgtccagctctgctgcgtgggcctcaacccctgtcaccaataggtcggtaaacgcccggtcctgctgggccagctcaacgcccatggtctccagcacagcaccgtcatcgctgttgctgccctgcaggcgcgcgtacatcaagcgaaccgccgcatctcgtgcagttttacggctcatgtgaactaatcatccttccgcttgccaaatttaaatagatgaaagaggccgtccaaaaggttggatacctccgcattccggtctccccgggaaccgatgaaccagcccaccgccacaaaggcggccagcaccaaaaagcgccacaggccgatacaaaggataatgatgcctaagatcagcccggtcagcgcgccggttacccgcccgcgccgcgtctcgataaaggcatcccacaattctttcataagcgcctcctacttataccggcgcgaggcttttgttgctgggggtctccactaacaggcggatctcccgcactggcacgccggcctgctgctcaatcgcctctttaatgccgccctgcagctgggtagaaatagcgggaatgtcgatatccggcttgaaggagacctggatgcgcatggcgatccccccctcctgcaaagcggtatggggtttcatctcccgcacttccaccatgctggtggcgtacttggttgcgatggcttcaatagcctgtaaggagatcaggatcgcgccatcatcactttttttgatgagtgcgtgccgctcccgcggcgccttgggcacggaaaagatcaccttaaagcataaaacgatccataccaaggcgatcactgtgatcaagatctgccagagcagggaaagcttgacctctagaagcatataacctagaaccggaaaagagaacaggttccaggcaaagcccagggccaccgcgccaactccgatgcaaaacagcatcagcacggtcatcaccacgcgatcaaaaacgcgtaacttcatggcttgtccacctcgttatttaatcttttgcatggggaaaaacaaataaaccctccgattatgaaaccagagggttttctctgtttacttcacgcggttgacgatttctggttccttggtttctttttcgatgtaaacgccctggatattgatgttgcactccacgacgcgcagccctgtcatcgattccaccgcttttttgacattctcctgcaccgctacggaaacatcccgcaggttgaacccaaaatcaatcacgatggacagatcgatggccgcttcctcattgccgacctcgactttgacccccttggtcaggttctttctgcccaatagctcggcgattccaccgacaactccgccgctcatccccgcaacgcccgatacctcggtcgcagccaggccggcgattattgcgataacgtcatcagcataagaaatggttcccccgtccacctgatttgcgggaatcacctgattttcattgctcaccaactacggcgcctccaatcttgtgttgtaattactatagtgcctattatagcaaacccgattgctttttacaaatgattccccttattttgccgggataatcttaatattttcgggtttctgactggattcgcgctgaacgacctcgacgatctgcgccacctgcgcgctggtcaacccatcttgtttgacgatgacgttggcggattcatcgtgcagggagaccacggtctgctcaaatcccttggcctggagcagcccttcgatggtgacttctttttccatatttgaaacgatgcccatcttttgctcctgcgcgctcttcaatgtagcctggtcggtctggtcgtcgttgatgatctgatccagatgttcgatctcggtcttgcggacggtctcgcgctcggccttgtactcggcgatcttaaatccaacggcctgagcggcggcttcctgcgtgtcctcatctccctccccttgggcggtatccgtggatgtgaccgcgctgggtgtggcctgtggcagcgaggcgctttggtcatcgggctggttaaattgataattgatgtagctggtaatgaccagcagcactaccaggctggttacgacgatggtcttacggttgattttggacataattttcttcccctcctgtgtaaacaaagatataattttttattccaaccgccctgggccggatcatttctaacaggccttaaggcgggtttctttctttagggcatctcgggcgttctttcaaatacctgaacctgatctgccgggagattcaacgctatgcgtacagcgtccaacacttttgccttgacccccaggtctcctgccccttcggcgacgaccagcaccccttgcaccttggggtaagcgttctcctcctgtccaaggcctgtcgcagtttccacgattgggccggattcaaaggtgatcatcacatttacatcccccacgccgacgatctgcgaaagaatctgcgcgagctttttttccagtgtccccgagtactccgtaaggtcctcctgcgcgccgctctccagcaggttgctgggcaggggctgctcatccggcgctttgtcccatagcgtagaagcgtaaatgagcagaatcgccagaatgatgacgccaaggataatgaattccacgttttttttattcttgatccggccaacggcgcgctttaacagctgtccgtagtcaatggcgggccgttttgcaggttccggctctggggccggcgcaacttgtctgagcatggcgtcttaaactccttttattctatggtgatggcgtcttctggtatgttatatattccggccaaggtctcttttatgcctgcctgtccgaaactgtcccctataatttgtgccgcgccctgcaaacggagggttataccggtgacatcggtgccgttacagtgcacctctacttctccatcttcaaaatccggataagcgctgagtatttgccggatctgcgccgcgtaggcctcggcataatcttgcctctgcgctggctgcgcactggtctgcaccgctaccagctcgctaaatgggaggctgaccagcgacaagctgccctgcaccagtatggctacgatcaaaacgccgctggcaaagcggaccagcggtttgattttcccctccggcgccaccgcctccacgatggctgccagcatcgctgcgaccagaatatccctcagccatccgccaagccaagcctgcatccgctttccctccttatcagcgcatcatcagtatccagtccccggcgatgacgaacagggtgatggtgataatgctcatgatcgccgtggtgatcatacacgccatcaacagcgacagcgcggtggaaaggtcctccatcgcctggctgagcttctgttcgcctaggggctgggccaccgtactgcaaaggcgcagagtgaccatcagcaaaaatattttgaccacgggcagtgcggcgatcaaaaataggatcaatacccccgtagtgccgatagagtttttgaccagtgccgagcaggcgatcagcgtatccatcgtatcggccaccatggtgcccactaccgggattgcggaacccgccgcgtaccgcgccgtccgcagcgatattccgtccgctgaggctgcgcccagccctttgatggccatgacggccagaaaaacggtcatcacaatgccgatggtccatttggtcagcgaaagcaacaatttcggcagtttgctgatcatgtctttgggcgcaaaatggctgatcaccgttgcggcggtggaggccatcgtcaaaggcaaaacaaggtaggcgatcgtttgaatgatgccgccggataatagcagcgtcatcggctgaaaaatgccgctggtcaccgctccgcccagcccaaccagcaggatggtcagcactggcgtgatcagctccatccattggccgatctgtccgatcgtttcagccgtgtctaccgaaagggatgcgatctgcgcgatgatcaggcacatcgcacaggcgtacgtgcacagggataccagattggtggattgccccgtacgcagcccgctttgcatggcgttggccacggcagacaggatcacgatcgcgatcagctgcacgcaaaagttgcgcatttgcggccaggcgtttaaagcgtagtcctttaaaaagtcaagcgccgtttctccatcctgcgctccgccctgcatctctccttcgatcaggggacggatcccttccggcagagcctgctgcgcctctggcggcagctgctgccaatattcttccagcggagccagcggaagcgtatctaattgcgcctgcgcgtcctgacgcaggcccgcatccggcgccgccgcggcgctctggggagatagcagcaccatccccagaaccaccagaatcataatggcttttgctgtgcgccgcttcatgtcatcaaccccatgacctgttcgaccagccccaccagcgttggcgcgatgacgaccacgatcgccagcttgccgcccaaaacgatcttgctgccaatgcctttttcacccgcatcctcgcaggcctgcgcagcaaattccaccagataggaaatccccagcacccgcaggaggatggtgaagatcgcgccatttccctccgaaagggctcccagggtgcgcagcagcgctaggacctgctcaatagcgggcagaaaaagcaataccaacacggtaccacctgccagcaccagcagcattcgccaagtgccgtcctggcggtgcagggctacagccataatcgctatcgccatagcgacccctacgatctttagaatatccatgactttacccggcctttatcttatagttggaacagggtcctgacgctttgaaataattcgttgatcagctgggccaccatcatcaagacgatcaccagccccgccagcgtgctcatcagggcgatctcttcgcggccggctttggtcaataccaggttcaggatcgttatcaggatgccgatcgccgcaattttaaagatcaaatcgatattcatatcctcttcccctttatctaaagcatcatgatgccagctacgctgcctaaaaggatgccaaggcgctggaagagcatcctacgcttcatcacagcatcctcccggcgtgcggcgcggctgcggcagatctcctgcgtatcatccagccactgcttttgtaatgcaaggtcggtcttccccaagtgctccccgatcgcgttccatctttcgatctcctctttaggcaggctgccccactcgccgctgtcggccaatttgcgggttgcctcgctccaagcccggccgagaagcgcgccgctatccaaacgctttgcgacttctgctgcaaatttgcgcagtttttccggccctttgcgcgcagcctgctccatgacctccggcagcgcttccgtactatagctgatcttttcataaataaaaagtaaaaagtctgcaaaacaacattgcacgcggtaaccggccagctcccgtctggcggccaatacgccgcccagcgcgccgagtacgaccatgctgcaggcacagaaaatccgcattccgttcaaacgatctcctccttaacgccgcatttgagccaccttccgtccgcgctgcaaacctgaatggtgacgatctgtcccagctggctccctttacccaaaaccgctaggcagctaaatgcgccgccatccagcatgtcactaagggcctcgcgatgtatcagctcttccacgctaccggcgtgcacgctggcgagcacgccgatcccgcaacgcgccgcgtcccgtaccgctgcgatatcttccatggctcccaattcgtcggttacgatcacatcaggcgacagcgtgcggatcgccatcatcatgccctgcgctttgggatagccatccagtacgtcgcagctaaaaccaagatcaaatgaagggcggcctttatattgcgccgctaactcgcttcgctcatccacgatgcaaacctgcataccccggcggctgagctgtgcggcggcatctcgcagcagtgtcgtcttcccgcagcccgggggcgacaatatcagcgtagagtaaatgcgcccgcccctcaaaacatgcggaatcagcgctgatgaggccccttcgatctggcgcgggatgcggatgttaaagctggacatgtctacaagccgcgagatgcgtcccgcttctaccaccgccctaccggcaagtcctacgcggaatccgccgggtaagggaataaagccctgacgaagggcgtcatccagcgcataaagcgaatagcggctcatccgttcaatcatttcctgacagagcgccccatccgttagaatggttttcccgtccggcgcggccgtaaagccgtcctccgacaaatacccatactgtgcgggcatgcgcaactgcaccggcgccccctggcgcacccgcacttccgtgacccgctgggccactgtttcgggaacccgcgctaaaccgcgacggatcgcctgcggcaaatagggctctaacttcactcgccaatcgctctgtaacgctatcatctcggtctgtcccctttcagagctatctatatgtaaaaagatatagcgttatgacagatccctatatcctgtcaccttctgggcaaataaaaaaagacctgccgtgcgtacggcaggtcttttaaccccaatattttagctcagattattgcgcgtcctcatcttcctccagcagggcttttccgcagctggggcacagcggctcatcttcgtcatccaggcaatccggatcgaaataaaccgtttcgccgcagtgagggcagacaatctctacgaaatcatcatcctcatcctcttccagcgcggcaagatcgtcatcgatacaatccacgtaatcttccagctcttctacatcttcctccagctcggataccgtctggctcatgtcgctgagcagttccaatacgcccaaaaggatcttgccttctttggaggtatcatccagtttcagcccttcggccaggccctgcaggtaagcgaccttttcttttaaagtattcatctttcctccacgcgttgcttaaacgcgctccatatattcgcccgtgcgggtatcgatacgcactgtatccccctcgttgacaaacagaggaacgttgatgcgcgcgccggtctccagcacggcgtttttcgtggcaccggtagccgtatcgccacgcacgccggggtcggcctgggtcacttccagctcgacaaagttcggcggctccaccgagaaggcagcgcctttgaagaagcgcaccgtcacgttcatattctctttaacatacataatcgcatcttccacctggctgtggttcaggggcagctgctcgtaggtctcgttatccataaagtaatacagctcgccatcgctgtacagatactgcatttccttcgtctcgatatgcgcgcggggcattttatcagaagggttaaacgtgcgctccaaaacggcgcccgtcatcacgtttttgatcttcgtgcggacgaatgccgcgcccttccccggcttaacgtgctgaaaatcgacgatggtgtaaacgttaccctcgatctcaaccgtcaggccctttctgaaatcaccagcagaaatcataacacaacctccatataatttatccttacagaacaatcagttccttcgttgtcgagcacaaattcaggtagccctcctgggttacgatgcacaggtcttcaatgcgtacgccgcccagatccggcacatagatcccaggctctaccgtaacggccatgcccggctccagctgcatatcgataagcggagacagccgcggcagttcgtgcaccatcaggcccacgccatgccctaacgcatggccgaaataatcgccgtatcccgcctcggctataatgccccgcgctacagcgtctacgtccttgccatttttacccgggcccagtgcctcaagcgctgcaagctgtgcttttagtacggtatcgtaaatctttttcagctcgtccgatacgtttcctatcgcaaaggttcgggtcatatcggaattatagccatccaccaggcaacccatgtcgatcgtcaccagatcacccggttgtatctttcgcccgccggctaccgcatggggcatcgccccattggggccggacgctacgataaactcaaacccaaaaccctggctgcccaactttccgcactgataggccagctcgatctgcacttctttctccgtcatgccaggcttgacaaaatcaaggatcttgcgcaggcccatatcggccacctgcgcagccttggcgatcgcccgcagctcctggggctccttgatcgcgcgcagcttttcaacggtattgccgatatctccaaactgtactgcatcaacaccctcggacaactgctgatagcccgcacatgtcaggaagctctcctcaatgcccaaagaagcatatccgttttttcgaaccagggcgattaccgtatctagcgtattccctcgctggctttcgatcaccgtccaccccggcgcctgtgcctttgcctgcacgatataccgaaaatccgttatcaatagcttatcttctccggagatgagcaatgcgccttctcccgtgtaaccgctaaggtagcgcatgtcctcacgacgcagaatcaaagccgcgtcaaactgggtaaagagcggttgtgccagaaaacgatccaaacgcgtcaaaattccaagcctcccctctatacataagccgtcatttattttagcataaaaagcagcggctagcaaggcgcagtaaagctgatacccaaattattcccttaaaacctgcgctttagccacagcgatgcttttacgggtaaagcggggtgctggtttcaccaaagggaaaaaggcctcgcctaacggcacgggccttttcagtgttttggattacagcatatactgttgtaaattcctttacgctattctatccattcgtgcgggtccagctcggaggtgccccagggaaagccgcccgtgatcttatcaggcatacaatagcggcaaaaaggggccggcgtcgccaaaaacgcaaagatctcctcactggactgcgccttataaatatcgatcccatcggcctgcgaaatggggtaatccgtcccaaaacagcggttaaacagttccatatgcggtattctggagcaggtgtacatcttgccgtaacccagccgcaggcactggttagcctcccagcagcgcataaaattgttacgctcgttctggtcgcgcagcttatcttcgttcataatattttcgctgatcgggaacttcatcaaggtcttttggctttctccggtatcgtccataaagtcataccctacgccatggtactttgccgtttcccgtatctgatcaaaatccagttcgatgggatatttcgtctgctctatcaccagcccggtatcccggcaggcgctccaaaacgcctcgggctgacgcagaagcagcaccccatttgtaaccaggcgcaagtgtaccttggggaaatacttgcgcacgatataggggaactcgctcacccgttcgtgcagcaacggctccccgcctgagatcgtgatcagctgcaattgctcctgatcaaatagctcagagatacgtttaaggtcacgatccaactgttcgggttccatttttaggccttctgtcctcttggcacagggagaaaaggtcaggcatcccctgcaattgagattacaggcgtcaataatatctaccgcaaaggacaaaatacgccgcggcgtcgtcttaatcatagccatccggctaagctccagctgatgattagtataagccaaaatagacttgagttcttgtacctccgcatgaagggcatttaagttctcagcattcgcgtgttgtaaagacttgatgtgttctgcttctgtctgcgatgtggccgaactgtttcctactaggttggcaacaccatcaaatttttcggatagatcgttatgccacttttttctcaacttcctaatcatatctatagcaatcacttcccatgttgccattatagtatatatacatcaggtatgcaatgatgatttatactaaagtgaggctacattcatggaaagctatctaatacttttttattgcaatacaatccttatcccggcattccgacagaaaccaaaagcgcttccatgctcattgtaaggaccaatacgcctttttcatctccaacgcgtcctgatcctgcgtacccgcagattcgcagatcacggtcgggtacattttgcgccgcacgatctccgctatcagcccctggtgttccgggccaaaaactttatcttcaaacgtcaggtggcgcttttcccccatctccgtatactcgatatggctaaaatgcatgtgcagccggtccagccgctccttccctagatcgttctcgatcctatccagaacagccttaaagtccgcctgagtgcgcaggctgccttgggtgcgcgcgttgagatggccaaaatcgatgcaggggatgaggcgctcattcacgctgcaaagcgacagcacctcttccaggtcgcccagttgattgatcttccccatggtttctgggcagagaataatttcgccaaatccggccgcatccgcctgttgaatgatctttttaagctcgctgcaagcgtaggctgtaatctcctggcgcgaacggctgccgctggcagaaccggggtgaaagatcacgcggcgcgcgcccatccaaaaggcggcctgcatggcccccagtatatagcggtgggagttgaggattttttcgctatcctcattagccaggttaataaaatagggggcgtgtacgctgataggaatccctgctttttgggcctgacttccgatctcccgggcggttttttcactcatcctaagtccgtggccgcccgaatattcaaaggtatccaagccatattctctcaaatattctggcatttgggacgagcgtttattgccctgggcataaaaattctccggcgaaccagccgggccgaaaatcgcgtgcgccaacaaaacggcctcctttacacagttcagggttcattgtaccctaaccctgggggcctgtcaaaccagacagtgcacggctagcacagagaagaatcactgtttttttcaaaagcctgctgcagcttttccagcgcctttttctcgatccggctcacataactgcgtgaaatattcagttttttagccacctcccgctggggaagcggcttgctgcccatcagcccatagcgcagcgtgataacgatgcgttcccgctcagttaggcattttgatatatggtcgtaaagcgcttgagattgtatgcgcagttctacatcatcaaacacattgtcccggtccgagcctagaatatccagcagcgagatctcgtctttttgccggtcgctccccaccggttcctgcaaagatatatcgtcccggtactttttgctagagcgcatgctcatcagcacctcgttttcaatacagcgggcggcataggtggccagctgtacctttttatccgggttgaaggtcatcaccgccttgatcagccccacggttccgatagaaatcaagtcctcgctgtcgtagccctgcaccgtatattttttggagatgtgcgcaaccaggcgcaaattggtttcgatcaaacggttgcgcgcctcgatatctcctttttgcatggcgatcaggcaggccctttcctcttccggcgagagcggctgaggaaaggcgttggcggaaatatgccctacaaaaaagccgacttgttgcagcgcgctgataagcaaagacaaaagcatagaaaattcctccgacattttttgatggaatactccaatatatgccgttgcggcaagtcctattgcttgcaaaaaataacaggcccgcgcgatctctcgcacgggcctgtaccctctacgcatctaaaatcaatagctaccgttggtattttttatccgcctcttcccacagcggtttgtactgcgctacgttggcgttatgctccttcaaggtctttgcaaacgccagctcgccagaatccggatccttattggcaaagtaatacattccttctgcaataaacgtttcgtccggatagagcgccgcccggatggcgttttcgcccggactggtaatagggccgatcggcagccctctgtttttataagtattatagggcgagtcaacggccgtatcgttattggtcaggttcaatcgtttggtgttcaaaacgtattggaccgtcacgcaggattgcagatagtcgtttttatccagccggttatggaacactgccgataccttggaaaaatcgtccgtcttggcctccttttcaatcagcgaagccagcgtcgtcacttcgtccatggtcatccccagctcattggcccgctcatagtaggcccctgcgatttgctgatagcggctgagcatcttgttgatgatggtctcttccgatgaatcgataaaaatctcgtacgtatccgggaaaagatagccttccagcatatacttgcgcgggttctcctccgacatatccagcgccgcgatgaactcgtaatccaaaaagctctgtccatccttgcacagttcaagaaaccggtccttgctctccagcgccccctgcttgaccagcgaatcggcaatctcctcaacgctgttgccctcaataacgcgtatggtcattacgttggattttccatcgcccaccgccagggtttcaatgatctcatccagcgtcatgtttttggacagctggtactccccggctttaagctgggcgctgcggtcggtaaaatccacataatacttaaacacgcctgcatttctgatcaggtcgttatccttcaacgtctgggcgatcgtcgaaaccgagccgcgaagggtgatggtcaccggcgcagtatcacccgtatctaccggggcaaaatagtgctgataaagataacggaagccaaaatagcccatgcagaccacgatagacaggctggtcacaaaaaccgccagaggcctgatccaccgccaattctgcttgagcgcattggaaaccacgatttcttttttaaccctattgggcatagcattcctccaaggtctttgtttttgcatcataacaaacaggcgctaaaccttccgcgcgccatcttgcgtttctcacttgccactatattatagcgctttgacgcgctgcctggcaagtttgctagtccgcccgcgcgttttccagcttgcggatatccttgaccgagccgatcaccagcagtacatcccccgataacaggatgttgtttccatttggcgagatttcgatgccattatcccgcttaatggcgatcacattaatcccatagcggttgcgcagctccagatctttgagggtatagccgatccaatcctccatcacggccatctccagcatgctataatcgggtgaaagctcgataaaatccaaaatattattggaaaccagcgtgtgcgcaacgcgcatccccatatcccgttccgggaaaaccaccttatccgcaccgattttgtagagcactttggcgtgcagctcgttttgcgccttagcaatgacgtgtttgacccccagctccttacacagaagcgtaatgagaatgctggattggatatccgtaccaatggtgacgacggccacatcaaagttgcgcagccccagcgcctttagcgccccctcatcggtagcatccgcctgcacggcatgggttacgtaatccgatatttcgtccacccgctcggcgtccgaatccaccaccagtacatcgtgtcccagcatgtaaagcgtctgggccacactggaaccaaaacggcccaggccgataatcgcaaactgtttcattgaacttatccctccacaagccttgctttagcctaccatcaaccggtcttccgggtacttgtaagctgcgctcttgttgtgcgactggcgcagtgccagcgccagcgtcagcgtcagcggccctacccggccaaagaacatggtaatgattaaaataaacttgctcaccacgtgcaggtccgctgtgatacccgtgctcagccccaccgtgccaaaggccgagaatacctcatacatcaggctttcactggggatactggtgggctccaccaggctcatccccattgcgctgatcaaaacgatggcgatgctgatcacgatgatggacagcgcgcgctgcgcgataccgggcgagagcctacgtttaaacagattcaagttgggcttgcccgcaatcgtattataaaccaaaagcatgacaactgcaaaagtcgtagtcttgacgccgccgcccgtcgaagccggcgaagcgccgataaacatcagcagcatggataatatcttggaagaaaggctgagatgatcctggctgatggtgttgaaccccgccgttcttacggttaccgattgaaatagcgctcccattcccttggaataccagggcatatccgggtcgcccagcgtcttgggattatcgatctccagcgcaaaaaacgctacggcaccaaataaaatcaaaaacaccgtaacgcataaaaccacctttgtatgcagggaaaaacgcttgaatctgcgctttttaacgatatcatagatcaccgagaagccgatgccgcctaggatgatcagccccatgatggtaaagttgacgaccacatcattttgaaaagcgataatgctttccgattcgaccaccaggtcgaacccggcgttacaaaaagcggatattgaatggaacacgccataatacagccctttagcccacccatatatgggcacaaagcgagtcgacagcaacagcgcgccgcatagttcgatacacaccgtcatgatcaggatattacgcgttagccgaaccagccccgtcagacggaattcgcccagcgcctcctgcatgaccagccgctcgcgcagggtgatgcgcttgcccagcagcaaaaagatcgtggtggccatggtcataaagcccaagccgccgatctggatcagcgccagcagcacgatctgcccaaaaagggatagatcgcgccccacctcgatcacggtaagtccggtaacgcaaacggcggaagtcgaggtaaacagcgcgttgaccgcgccgatccccaaacctgtggacgaagaaattggcaacattaaaagcaacgttccggcaaggatgatgcccataaaacccagggccagaatctgcgccgggcgcatttttttctgccgagctgtgaccaacagttaacccctctttttacacaatcttaatgatgccttgaattgtaccacactttatcgggttccgtccgttttttatagaaaatttaataattttacacaataataatattgatcaagccgcatagctattggcggctgcaaaacggcaaaagaaaaagcccgccataagcggactttttctttaatataataccatttatacaaatggaacgcgccctttttatttgcggttgcgcagctctacccggcggatcttgcccgagatggtcttgggcagttcctccacatactccaccaccctgggatatttgtagggagccgtattggttttaacgtaattttgcagttccttggtcagcgcgtcgctggcctcatacccttgggccagtacgatcgtcgccttgaccacgatcccgcggatcgggtcctccgcgccggagatagcagcctccaaaaccgccggatgttgcagcagtacgctctccacctcaaagggcccgatacggtaaccggaggatttgatcacatcgtccgcccggccctcataccagaaatagccctgctcatccttccaggccatatcacccgtataataaacgtcatcatgccacattttagccgttagcgcatcgtcgcgatagtagccgcggaacatgcccagcggtttgcccttatcggtacggatcacgatctgcccgacctcgccgggcttggagggcttgccgtcctcatccacgatatcgatgtcatagcccggagagggaagccccatggaacccggccgcggctccatccaggggtaggtggccaccgtcagcgtggtctccgtctggccaaatccctcatagagcttgataccggtcagtttgcggaactggttgaacacctccggattgagcggctcgcccgctacggtacaataggacagcgagcttagatcgtaggaggagaaattcgctttgatcaagaaacgatagatcgtcggcggcgcgcagaaagtcgtgatgcggtatttctccagcacggccagcaggtcctccgggatgaatttgtcaaagtcgtagacaaagaccaccgtttcggccatccactgtccatagagcttgccccataccgccttgccccatccagtatccgatacagtcagatggatgccatcctcctgcacctgatgccaaaaggcaccggtgacgatatgccccagaggatagacaaaatcgtgccccaccattttgggcatccccgtagttccggaggtgaagtaaagcagcatcatgtcttcattatgcgtagcttcctcgccggcagggcgcgggaacacatcgctgcacgcctccatccccgcatccaggttgagccagccctcccggtcgccattgacgataaacttcatctccagcgtgggcgattcagcctggctggcctccacatgctcggcgatctccccatccgaggtgcagatgatggccttgacgcttgccgcattgttgcggtacaccagatcctttttcgtcagaagatgggtcgccgggatgcagaccgcgcccagcttatgcagcgcgatgatggaaaaccagaactgataatggcgcttaaggatcagcatgaccttatcgccgcgcttgatgccctggctcttcaagtagtttgccactttattactgttgcgcatgatgtcggcaaaggtaaagcgccgctcgtccccggccacattggtccaaagcagggccagcttatcgggcttttccatgcccagccgatccaccacgtcaaagccgtagttaaagttctccggtacgttgaccttaaagttctccttaaaatccttataagaagaaaattcgctgcggtttaaaaattcttcaaagatacgcattttaaaaactccttacgcaagtaaaatatcaatagccctacttcatgatgatggccaggaattccgcgtcgccatccaacgcttccatggcgtgaggatagcctgaatcgtaataaatacaatcccccgcctccatgatgaactcgctctcccctacgagaatgcgcatctttccggaaagcataaagtcgaactcctgcccttcatgactgttgcgctccgggcagccggccttgtccggctcatagggcacgcgtacctgaaagggttccgcctttttattgctgaaggtgggcgccaggtgctggtagcggtaggctttgcgccggtcgatcgccagcccctctccctttttgatgaagcagcacatgtgcagcttcgggctgtcgccggtgagtaaatcagtaaaatcaacgcccaagaaattggcgatcttataaagcaggctaaaggagaagtcctctccacccgcctcataacgggcgtactgttccaccgtcatggaaaggtgctcggccatttgctctgcactaatgcctaaaatatcccgcagcacctgtatgcgcatggcaatctgtttaatctgttcctgcatgttttttctctcctttactaacgtccttggggtattaaaaaacctcctacatctcatatgagacgcaggaggctcttgcgcggtaccactcaaattgattggataaaccaatcctctttagccggattccatcaaatccgctatctgtaacgggatatcccgtgaccccttacttggtaacaccctttgagaggtcaagctccggagtgatggctcgatgaacatagctgccagtttgcaccaaccactggctctctgcaagcgtctgccctttggctttctccatcattgcgctgatgtttaattgattgcacttactctagcatatcttatcccagttcgtcaagcactttttacatttttaacccgagattttccatctgctggcagatgaccgcgcgcacgcgaggcagctccgcgaccagtttctgctctaacgcagccatgcagggttctttaaacagcttaaagtcaaacccgcgcgccaggcaccccagtttatagccataagggaagccgatctttttcaattcatcggtcaccgctaccacagccttttgtgctgcgccagcccgtaccatgtctcccgcgcggtaagcatttaatatttcgcgcagcacctcgggtatgatgccgccgcaggacaccgtgcagcccttgacgcctgccgtcaggccagggagcagcaattcctcaaaccccaccatcacgttgatatcgatcttttgttcctccagggcgcgcatgagctggtacgtaaagcgaatatcgccgctggactccttcacccctaccacgttgggatgggcgcacagcgaaagcaggttatccatctgtatagcgctggtaaagccgggcgcgttataaaggatgaccgggagcgacgcgttttccaccacctccttgagataggtgaggatatactcttgcggataggggtaatagtagggcgcgcagatcaccaccgcgtccgccccggcccgggcgctataatgcgccagcgcaatggaatcctttagcttcacatcgcacacgcccggcgttaccttgagcttgcccccgcccgcctccaacaccgcatcgatcagcgcctttttctcgtccatatccatatggaggaattcgcccacattgcttacgcaaaaggcaccatcgacctttttttcgaccaagaatcgcgtaatggccttggcttgatccgtatcgacccgcccctgcgcatcaaagggcgtcatcatagcgctgtaaatcccttctggtttcatcatcatttccaaccccttcaaaatttatcttctgcccccaggtttcaaatacgctatcattataaaatagaagccctgtaaagtacagggggacaattcaccccagcggctatagcggtaaaatccaaaattctggtacaccaatactaaacagtaggtaaaaaacacgctgttgccggcaacaacaaaaattttttgtcgctattttagctgttttttcatttttataaaaacgctgaagcgcctgataatagggggattaatgcttctacgtatacttatcatcaccttcacgatcaagaccggcgcgcagaataactattgacatgttttgcctaaatatgttttaatacttctgccaattgtttagtttatttaaacttgatgtttaaagatttgtacccagaaagagggggttgaaagtggaaatcggcagtaagatcaaacgcatgcggatgcagcacgggctgacccagcaggagttggcggaccggtgtgaactatccaaggggtttatctcccagctggagcgggatctggcttcgccctccatcgccacgctgatggacatcctcgaatgtttggggacggatctaaagaacttttttaacgaagactcggctgaaaaggtgatcttctccgcggaggatacttttatcaagaccaacgaggagctggggacgacgatcgaatggttggtgcctaactgccagaagaatgatatggaacccattttgatgaccctacagcccggcaaatgtacggatcccgacagcccgcacagcggtgaggagttcggttatgtgctctccggcaccattcaggtgcatttgggcaaccagcgttaccgggcccgtaaaggagacgctttctacttccccgccgatacggcgcacagcatcagcaacccgggtaagtcggcggccaaattcctgtgggtatcgacgccgcccagtttttaagtcacgatcatttatgaggaggtccgtcccttgaacgcagagaacaagcagatcgaactgatcgatattaccaaaaattatgacggtgaagacgtccttaaaaatatcaacctttatataaaagaagatgagtttttgaccctgctggggcccagcggctgcggcaaaaccacgacgctgcgcttgatcgctggatttgagtaccctaccaacggcaaaatcctctttgacgggcaggatattaccgatatgccgccctataagcgccgggtcaacaccgtgttccagcgctacgccctctttccccacatgaacgtggcgcaaaacatcgcctttggccccaatctgcgtaaagaggaccggaaaaagaccgataagcgcgtcagcgagatgctggagctagtcggcctcaagggatatgaaaagcgtgcggtagacgctttgagcggcggccagcagcagcgcgtggccatcgcccgggcgctgatcaatcagccggatgtactgctgttagacgagcccctgggcgcgctggacctgaagctgcgtaaagagatgcagggcgaacttaaaaagatgcagcagcacctgggcatcacctttgtctacgtcacccacgatcaggaagaagccctgaccatgagcgacgaggtagttgttttaaaagacggcattatccagcagatcggtaccccggtagatatttataacgagcctaagaacgcctttgtagcggattttatcggcgagagcaatatcttggacggcatgatggaaaaagatctggtagtgcattttgacggacaccgcttcgagtgcgtggacagcggctttggcaacgacaagccggtggatgtggtagtgcggccggaggatatttatatcgtggatgaggagcacggcatggtctgcggccaggtgacctcgctgacctttaaaggcgtgcataacgaaatgttcatccatagcgacgatgggtttgattggatggtgcacgataccggcagcttccccgtcggctcccgcgtggggctgatcgttcgtccggatgacatccatatcatgaaaaaaggtgttcaaaatgcgtagacgttattttgcctatccctatagcatctggatggtgatcttcatcgtcgtccccatgctgctggtgctctattattcctttaccgacggcagcggcgcctttacgctggagaactttcaaaagtttttccagcccatgtacctgaatattctgtggcgctctttatggctggcctttatctctacggcgctgtgcctgctgatcggttacccggcggcgctggcgctggcctctaaggacctgagtcgggccaaggccttttcggtcctgttcatcgtgccgatgtggatgaactttttgctgcgtacctatgcctgggtggtactgctggagcgcaccggcattatcaactcctggttgacggcgctggggctgcccattcaaacgctgctgtataccgatggcgctatcattttgggtatggtctataactttttgccctttatgatcctccccatctactcggtgctgcgcaagatggaccgctcctacatcgaggcggcggaggacctgggcgctaacgggctgacggtgtttcgcaagatcaccctgcccatgagcgtgcccggcgtgatctcgggcatcaccatggtctttatgccggcggcttccacctttgtaatttcacggttattgggtggcagcaagaccatgctgatcggcgatctgatcgaaaatcagtttttgctcacgggtgatatgaactttggttccgccctgtctgtggtgctgatgctctttatcctgctgagcatggcgatcatgaatgcgtttgacaagaacaagaagacgacgggagggctgtggtaatgatgcgatttttacggcgcagctatttaacgctgatcctcatattcctctacgcccccattttggtgctgatcgtctattcttttaacgactctaagaccatggggaattggggcggttttaccttccgctggtatgcagagctgtttcaggacccggagattctcaacgcccttttctataccgtcgtgatcgcgctgcttacggcgctgatttcgatggtgatcggtaccatcgcggccatcgggatccactatctcccccgggtatcgagcatcttttataccaacattacctatctccccatcttgaacccggacatcgtgaccggtatctcgctgatggtgctctatctttctatgcagatggaattggggtttgttaccctgctgctcagccatattacctttagcgtaccgtatgtaatcttctcggtgcttcccaagctgcgccagcttaaccccaatacctacgaggcggcgctggatctgggcgcaaaaccgatgaaggcgatctggcaggtcacgatccctgagatcatgcctggcatcattacaggcggcatcctggcctttaccctgtctctggacgactttgtcatcagcttttttaccaccgcaggaattcagaatctatcgatcctggtctattccatggcccgccgcggtatcaacccagcaattaatgccttgtcggcattgatgtttgtctgcgtcctggcgctgctgttaatcgtcaacaagcgctcgggcgaggacgcgatcgactttatttaacggagggatattgtacgatgaaaaaaacggggaccctgctgctcgcgctgttgctgttggtaaccacctgctttgcgttggtgggctgccagaacacccccaccgtgcaggtgtacaactgggaggattatatcgatccggaagtgctcaaggattttgaggaagagaccggcatcaccgtaaaatactcccgctttacgacgaacgaggatatgtatgcgctgatggaaaagggtggcgtcagttatgacgtggttttcccttcggattatatgatcgagcgcatgattcaaaacgacatgctgcagaccatcgatacctccaagctggagaactacagcaagatcggcgaccagttcaaggatttggattacgacccgaataacgagtactccgttccctatatgtggggaaccgtgggcatcctttacaataagaccatggtgaacggcacgccggacagttgggatgtgctgtgggatgaacagtataaagatcaaattttgatgatcgattccatccgagactctctgggcatcacccttaaaaagctgggctattcgctcaatacacagaataaggatgagatcgaggcggctaaggtagccctgcaggagcagtggccgctggcgctggcctatgtggtggacgagggcaaggataagatgatccgcggcgaggcggccatggccgtggtctggtcgggcgatgcggtatacgccatgagcgagaacgaggatctggactatttcgtgcccaaggaggggtcaaacttctggtttgacgccatggtcatccccaaaaatgcgaagaaccctgagtatgcgcagaagtttatcgactttatgtgccgcccggacatcgcggcccgcaataccgaatacatcggctactctacccctgtgcccgaggcgctggatattttagaggaaaacgagtatccgtttatggaggccgaggccttcaacccttcggacgatgtcattaataactgcgagattttccacgatctgggcgacaacctctcttactacgagcagatttggaccgagatcaaaaacaccccgcgataaggcggtataaaatagtaaaaaagcgcccggagaaaatttctccgggcgctttttatgcctttttaatcttttgctgcttatcctccaagatgtgcgcaagctccctttgcaggttggccgtcatctgtacgatacaccggttcaacaccagaatgtcctcaggcggaaggttcgaaagcatcagccgctcgttctcatctgaaacgcggcgcagaaactcgtatgcctgctcgcccttctctgtagaaaaaatgcgggatatgcggtgatcgcgctggtcgcccttgcgctctacccaaccggcccgctccatccgcgtcagcataacggtcagggtcgctgggcgtatatccatggcatgggccagttcgttatgcgtacaaccgctcatctcatgcagcaacatgatgaccggcggctgcccgggagaaagcccgatatcccccagctgcgcatccacaagcatacggtgtagccgccggatctgtccgaaccgatggccaatattgtttttcaccattctcaactccaacaacgtttttgccacacccctcaatgcagcacaaacacattataaccatgcaattgtaaaattgcaaagcatctgttcatttttattttacccaaaaggggcgccagctacttttctaggccagcgcccctttaatcgttgcatctatctagcgattaattgcttgcatagtcgtcaaaatacccctgtatcaacaccaccggcgtgcccttgtcgccgctgccgctggtcaggtcgcaaaggctgcccagcaggtcggtcagctggcgcggggtcgtcccttccgaaaccatctgccccaccaggctttctccctgcgctcttttctggcgaatcgcttcctgcatggcggcgcgcgcctgctcgccctccagatgggcaaactggttatcggccaggtatttgagcttcagctcgttgggtgtgccctttaacccgctggtgtatgctggggataccacaggatcggccagctcccagatcccaccctggggatctttaaagccgccgtcgccatagaccatgacttcgatatgcttgcccgtgcgctctaaaagcatctgggcaatggcctcgacaaagggctgcccatccttcgggaatagcttaactctgtcctccgtggccttatttgagcctaaaaggccatagtccgggttaaaaccgctgccatcgacggattcggtcagcaggtcgtccagccccagcacgattttggccccagccgctttcagcatgcgcttggtgcgcttacgggtatggatatccgcggcgatcaccgtatcggtatactgcagcatggccctgggatcgttggcgaagatgatctcgatatggtcggacaggcttttataaaagctgacatagtccacgcccgtaaaaggatgggtaacctcgccgaaatatttgcggaacgcggcctcatccaacacgtcggtaaagggattcaggccggattcatccagcatatcctctgagatcagatgattgcccacctcgtcagctggatagctgagctggacgatcagcttgtctacgcccttagcaataccgctgagcagcagcgaaaaacggttgcggctcaggatggggaagatgacccccaccgttccgccgcccgttttagcgcggacatcagcagcgatctgctccaacgtcgcataattgccctgtgcgcgtcccaaaaccgcctctgtaatgccgatcacgtcgcggtcgcgcagcgcaaagccctcgctctgtgcggcttggatgactgaatccgccacgatcttgaccaagtcgtccccttgtttgatgatgggcgtgcggatgccccgcgatactgttcctaccgttctcaccgtttaaaccccttccaatcagtctttaataatgatgccagccggcttttgcactattttttaagatactgcatcaggatatcccgcgtcagcttcagctgcccagcagggtccacgctctgctccgcctttaaaatatcttctcgtgaggccagacgtacgcacagccccaggaaaatattggtaaaggttacagccgcatccttcgcatccacctcaggacgaatcaacccctgctgtatcccactttcgatcatatcccgccggatatttctgccctttttaaagaaattccggtaccggttctggagatcctccgaaggataccgttcccgataataatggtcaaaaaggcccacgaagcaaaaataattcgtatgcttttggtaaaagtctatccaggcgtccagatgattgcgcatccgcaccagcccgtccagcgtactatcgtctaccgaagctacatagtcgaacagcgagcccaagacctgcatttgaacctcaaaggccacctcgtctatggatttaaagtatttatacagcgttactcggctgatgccggaattggcggcaatatccttcatgcttacgccattgagatccatctttaaaaacagcgtccgcgccgtctcgatgatctcgctgcggcgtgcctgcctttgctgctccagctgttcctcccaagtaagttccatccactcacctcatttaaaaatcctaacgtacaaaaaggttaactcgcctgcagcctccccagccaccgcaggcaaaggttcatccaatcggtattctgtaaggcctcctccgttgcgccaaggccatgggggccatgggcaaacacgtgcagctcataagccacgtttgcctttgccagcgcatcgcccaacatcagggaattttgcaccgggaccgagcagtcctccgccgtatgccagataaaggctggcggcatagccggatgcacgcgcgtttcaagcgaccatcgtttccaaagatccggcccgccggattcgcccagcagattactgcgagagcctacatgcatggctttcagaaaagaaacaaccggatagcataataccacaccatcgggcctactgtctaccctatccaccggatctgccacatcgagctgtgcctcattatacatcataccggcacatccggccaaatgcccgcctgcggaaaaccccagtatcgccactggcttaccggctatatcccactgctccgctcgatggcggaccaggcgaacggcgcgcagcacatcctgcaaagccgccggcgcgcgataaggcgctacgcggtaatccagcacaaacgcatgccaacctcccgcacccagcagttttgccaccggctcgccctcgtgctcggccttaaaagcgtaagccccgccagggcagacgatcaccgcgcctttaggtttttctctatcgcacagatatggcgttagcgatggcgcttcctgtccgatctcgccatcccaaagcgggatacgtctctcatcccaaagcggcaaacgcatgctctttaagcccctttcgcatgatatatctttattatagcctaaaattgcaaggttcgtcatccattatttcattggactggcaaatatttctttgatttgcaagatgttggggcagatttagaatttcagttggccttttactgcatgttttaggtgcaccttcgccatactaacgacatatgaacagttaataaaacgactatctttgtaaaggagtattgtacgatgaaagagactaaaacgattattcttcaggagatcgaccgtcggctggaaaacctctatcagcatgaagacgatgagatcatccagacagggaaccaatacgaagcgctgaatcaggcgctatccaaggtgatcagcgtacctctcgtgggcgagttggagagcctgcgcgactttgtctctcagctttaatcaaccgcacctgccccaggccagcgcctggggccttttatgcgatggcggggaaaatgcttccttctcaatcccctatctatgaaaagcataaggtaaatccctctacatacatccaatatagaaaaagcagcgaatcatatgatccgctgcttttgatgcctgttatccctcttgattttccaaaaaacccaggtcgatctggaccgcatcgcccaggatcttaaaaatatcgctcatcagctggttcatccggtattccgccatcaggtatgcgctgatgtcttgattatactgcatcaccaaacccatgcgcttgaggttttccatcagttccgggtccgccggtttgccgctgagaacggctgcctgcattttaaactgctccttttggtaggcatccaccattttcttcgcgttttcatccgcattgatccgctcttttagcgcctgaaactgctggtactcatcgctctgtgccagcgcgtgggccagctgatgcgccagatcataaggattcatggtactccctccctaaatctcaaccacgataggcaaaatcatcgggttgcgcttggttttttcatataggtactcccgcagacggttgcgcaccacattctttacattaccccattccttacgcggggtattgcgcgtagtagaagcgatagcgctctcaatggcggcgcgcgcaccggcgatcaagtcctcgctttccttaacataaacgaatccgcgggaaatgatctcaggctcggagatcaactcgcccgtctccttggaaagcgccagtaccgcgaccatcaaaccgtcttcggagagatgtttgcggtcccgcaggaccacgttgcccacatcgcctatacccagcccgtccaccagcacctgcccggcgacgacctcgccggcgcgctgcgcgctgttgcgtgagaactccagaaccccgccgcactcggggataaatacgtttttatcccgcatcccaaggcttttggccaattccgcatgctgtaccaggtggcggtattcgccgtggatcggcacaaaaaacttgggtttgaccagagagtggatcaatttaagctcctcctgacgcgcatggccggaggtatgcacctcagccagggcgtcgtaaatcacccgggcgcccttgcggtaaagctggttgatcacgcgggatacgaatttttcgttgcccgggatcggcgtagccgagataatgaccgtatcgccgggatggatatccagctgccggtgctcgctcatggccatacggaccagcgcgctcatcgcctcgccctggctgccggtggtaatgatcaccagctgatcgtccctgtagcgttttacatcgtccagttcgatcagcatgccatcgggaatatgcatctccccaagggaggtggccatgttcgctacattgatcatgctacggccggaaaggcagattttgcggcgatggttcttggccgcatcgataatctgctggatgcggtggatattcgaggcaaaagtcgccacgatgatgcggcccttcgccgagcggaaaaaggtctcaaaggtctcgccgatcttgcgctcgctgatcgtagagccagggcgttccacattggtgctctcccccagcaaacagagcacgccctgtttacccagcaaagcaaactttgcaaggtcggtgggcacgccgtcgatgggcgtataatcgatcttaaaatcgccggtatgtactaccgtccccacaggcgtatggatagccagcgctaccgccccggcgatactgtggcacaccttaatgaattcgatggtaaagcagccgatactgatcttatcgccggctgcgatggtattgagcttggcgttgttgacgcggtgctctttcagcttattttcaatcagccctagggaaagctgggtgccgtataccggcacgggcagctcacgcagcacatagggcatggcgccgatatggtcctcgtgcccgtgcgtgatcaaaatagcgcgcagtttgtcccgatttttgaccaggaaagttatatccggaatgaccaggtcgatccccagcatctcttcctggggaaacatggagccgcagtccaccaggatcatatcgtctccatatacgaatgcggtcatattctttccgatctcatccaccccgcccagcgggatgatctgtaatttgggcctttgttgttttttgttcgccaaatagcgtcccctccttttatagattgcgttaaagttcgccacaaacgcagattttgccctcgctcaaatcggcaaagcgcgtttatggcattttattttagtgcaacctgcaagcacacagcacaggctgccattaaaatcacatgtattatggacccttttaggcccttcaacgcttttatgcggcccggttgaccgcccgaaagcgcagactacccctctatctagttttaccaaggtatcgcgatttagacacagatatcccccgccatagccctaaacaataaaaaggcctggctgaacctttgcaagacgcccgggggaacacactttgcccctcatccgttctatttagttaatattgccgtacggccataaaaacacatagacagaccactgccggcggcgaaataacgcaaaaccgccgccggctggcccgcttcaattacaaaatatactttttcaagtcctgttcacggctggtaagccccaagtgttcgcgcacgtaggccgcatccaccgtgatctggcgcacgccctgctgctcgcccgcctcaaaggacagatcctccagcaggttctctaaaatggtatgcaaacgccgcgcgccgatattctccttggtttcgttgacatcaaaggcgtggtcggcgatggccaaaatagcgctttcgtcaaagctgacctcgacattatccaccgccagcagcgctgcatactgcttgatcagcgcattatccggctgggtcaggatcttttgcatatcctcacgcgtaaggttttgcagctccacgtggatagggaagcgcccctgcagctcggggatcaaatcccctaccttgctgacgtggaaagcgccggcggcgataaagagcatataatcggtcttgactggaccgtacttggtcatcaccgtgctgccctcgacgatgggcagaatatcccgctgcacgccctcgcgcgatacatccggcccgccggacatgtttttacccgcgaccttatcgatctcatccaggaaaataatgccgtcctgttccgcgcgctctacagcctcggccgttacctcatccatatcgatcagcttttgcgcctcttcctgctccaggatcttgcgggcctcggccaaagtcaccttgcgccgtttgcgctgcttgggcaggataccgcccaggatgtcctgcatattgatctcggcattcataccgggtaccagttccaggccgcggggctggtcgtctacttcgatctccatcacgcggttatccagctctcccctgcgcagctgatcgagcaccgcctggcggcgggtacgctccgcctcgtccatgggctcggcgatcgccggcgtttcctcatgctgcgggttggcgccggtaaaaaagtcaaagggattggaagtggtcttctttttcttggaggggatcaaaagatccaacaggcgctgttcggcgttggcctgagcgcgcacttgcaccgcatccaggcgctgctgcttgaccatgcggatagaggcctccaccaggtcgcggatcatggattccacatcccgtccgacgtagccgacctctgtaaacttagtcgcctccaccttgacaaagggggcctgcaccagtttggccagacgccgcgcgatctcggtcttccccacgcccgtggggccgatcatcaggatatttttgggcgtgatctcctcgcggatctcctctggcagctggctgcggcggtagcggttgcgcaaagcgatggcgaccatccgcttggcgttatcctggccgatgatatatcggtttaattcttcaacaatctgtcttggcgttaagttggacatggtaagctcctgacctcctgcggtttttccgtgctgatctcctcaacggtaatatggtcattggtaaatacacagatcgagctggcgatcaaaatcgccttttgcgcaatatcccgtgccggaagcgcggtattctccaccagcgccttggccgcggcataggcataagagccgcccgagccgatagcaaccacaccatcgtccgggtcgatcacctctccgctgcccgagagcaccaaaagatcctgcgcatctgctgcgatcagcatcgcctctaactgacggccggcccgctcgccatgccaatcctgcgccagctcaacggcggcgcgcggcaggttgccgccatactgttccaacttcgcctcaaagcgctcgctcaaagtaaaggcatcggccacagaccctgcaaagcctacgatcaccctgccattatagatccggcgtaccttgacagcgccgcgcttcatgacgactttttcgcccatggtgacctgtccatcgccagcaatggcacaggtgccgtcccgtttgacggctacaatcgtcgttccttccaacattttaatacttccttatcttaaaatctcgttatcgttctggtctacagctatcaataccccatcctaccacatccggcggcactttggcaaaccgctaagcttgcgctatgccggttacacttaaatggaaccatcctgccaaaccgcgcaaagggatcgctccattttacgttaaaccaggttcttgatatgctccagcgcgcgtttggctatcgccagatttttttcttttttgttgcggatgcgcttttccagcggacgcataatgccgaaattggcgttcatcggctgaaaatcgctgccagcatagctggaaacatagtgtcccagcgcgccgatggccgtgatgtcgccaaattcggggaccggctcatccaaaaggtaggcggccattccccgcccggccacaaggccgctggcggcggattccacatagccctccacgccggtgatctgcccggcgaaaaacacgtccggcctggctaacatttggtagtgggcgctcagcactccaggcgaatggatgtacgtattgcggtgcataacaccatagcgcacaaattccgcattttcaaggccgggtatcatagaaaagacccgtttttgctcgccaaatttcagatgggtctggaagcctaccaggttgtaaagccgcccttcccggtcgtcctggcgcagctgcaccacggcataggggcgctcacccgtacgcggatcgcgcaagccgatgggcttgagcggaccataggccagcgtctgcgggccgcgcttggccattacctctaccggcatacagccttcaaacaccttttggtcctcaaaaccgtgtaccggcgcctcctgcgcgtggatcagcgcctcataaaaggcaaaatactgttcctccgtcatggggcaattcaaataatcctccccccgtccatagcgggacgcgggaaagataatatccatattcagcgattctttaaggacgatgggcgcagccgcatcgaaaaagtgcatgcgctcaagcttcagatcccgagcgatcacctcgctcagcgcatctgaggccagcggccccgccgcgatgatgacgggcccctcgggcagcccggtacattcgccataagcgacttctaccatagggtgctcactaaggcgcgcggtaataaagcccgagaaatcctcccggtctaccgccaaagcgccccctgccgggacgcgggcatgatccgccgcctgcatgatcagcgaatcaagcaggcgcatctcttcttttaacagaccaactgcgttttccagccgatcgctgcgcaggctgttgctgcacacgagttcggcaaagttgccggtcttatgcgccggggtcatctgctccgggcgcatttcgcaaaggcgtaccggaatattatgccgggccagctgccaagccgcctcacagccggcaaggcccgcgcctataatcgtaacacgtttatcttctagcataatccttccttaagacggctggggcgcatccgcattgtggctatagccgcactcttcattcgcgcattggtggatattcacgccattgcgcttgcgcagcaccatgtaaccgccgcactccgggcacttctctttcaccggcatattccagctgacaaaatcgcactcgggatatttttcacatccataaaacgtacggccgcgcttgctgcgccgtaccaccagcttgctgccgcacttggggcagggcacctccaactcctgaacgatgggccgggtgtttttacactggggatagttggggcaagccaaaaacttgccgaaccgcccgatcttataaaccattttggcaccgcatttttcgcaggtaacatccgaaacctcgtctttgacctcgatcttttccatagcctcctgcgcgtgggccaagctcttgctgaagggctgatagaactcatccaccacgctctgccaggacatatcgccctcttccacgtggtccaggttgtcctccatctgggcggtaaaggcgatgtccaccaccgaggagaaataccgcatcataatatcgttgatgatattgccaagctccgtcggggccagcatcttattctcccggcgcacatatccccgctccagaatcgtggaaatgatgggcgcgtaggtgctgggccggccgatccccttttcctccagcgcgcgcaccagcgaagcctcgctatagcgggccggcggctcggtaaagtgctgggccgcatccagctcttccaactgcagcttttcgccctggtgcaggttgaaaagcttgctctcatcctgggcatccgcctcgtccgcttctacggcataaacggcagaaaagccggggaaactcatcttcgccccgctgaaacggaaaccatagtcccccgcgccgatggtagccgtcatggtctcaaatcgcgtcggggtcatctggctggctaaaaagcgggtatagatcaatttataaagcttatactgctcgctggtcaaagattccttgaccaggtcgggatggttgctcatcaccgtgggacggatggcctcgtgggcatcctgcgcgccgcggcggcctttaaactggttaaaagtctccggcacatactccgcgccgtatttatccatcagatattccttggccgcctcctgcgcttccgtagagatacgggtggaatcggtacggatataggtcacaaggccaatagtaccctgcccttttacgtccacgccctcataaagctgctgggcgaccatcatcgtccgcttggtagtaaaggaaagcttgcgcgccgcctcctgctgcaaagtactggtggtaaaaggcgcgggtgggttcttgcgcttttcccccttgcgcacgccatccacactgaactccgcctgctgcaggcgttctttggcctcagccgcgatctcggctgtgatctcatcaatgcgcttgcccttataagttaccaggcgcgcatggaaaaaggccttttttccctcctgatgcagtttggcgatcaccgtccaatactctttgggctgaaaggcgttgatctcggcctcccggtcgcagatcatacgggtggctacggactgtacgcgcccggcgctcaggcgcttgcgcaccttttcccacaaaagcgggctgatggaataacccaccaggcggtccaccacgcggcgggcctgctgggcatcgaccaggttgatattgatctgcctgggatttttaatggcggatttgaccgcctgcttggtgatctcatgaaattcaatacggcaaggggccttgtcatccatcttgagaagatgcgccagatgccaggaaatcgcctctccttcgcggtcagggtccgtcgccaggtagatcgccttggcggacttggcctttttcttaagcttttccacgatctccccgtggccgcggatggtgatgtatttaggctcgtaattatgttcaatgtccacgccggtctggcttttgggcaggtcccgcacgtgtccattcgatgcttctactgtatatccatgccccaaaaacttgctgatggttttggcttttgcgggcgattcgacaattaccagcttatctgccattcaagaacctccaaaatcatgataaaagacatcgagctataggtgataaataccgcccgatgactgtttaattattccccttaattccaacattgtcaaggtcgtatttaatttttgcgcagagcaatccacctgcgcagccagctcctcgcggttaaattcgccgctctccagcagggcgagcacctgcttttcctcaggatttgtggcgggatggggttgatcgccgctgcttttggtagtctcgggcgctttaggggtatagctccagcccagttcgtccagcacatcggtgaactccagcagcatgtgcgccccgtcccggatcatccggttggtgccggcgctgtttggcgaattgatattgcccggaagcgcaaacacctcgcggccctgctctaaggcgaaattcagagtgtgcagcgcgccgctgcgctcccccgcctccaccaagatcacggcggtagaaagaccggagatgatgcggttgcgcgccgggaagtggttgccaagcggctccgcgcctggcaggtattccgaaatcagcaacccttttttagcgatctcgtcgtacagctcctgattttcaggcggatagaccacatcgaccccacagcccagcacggcaatggtcttcccctcggcagccagggcgccgcggtgcgagcaggaatcgatccctctggccatgccggaaacgatcacagccccggtggcggccaagtcctgcgccagctcaaaagccatttccttgccatagcgcgtggcgcgccgcgaacccaccatggcgatagtgggcctgcccagcagcgaggtatcgccaatggcgtagagcagacagggcggatcgtcgatgctcttcaaaatctccggatagtgggggtgcgaaaaagtcagcgcctgcaggccgcgctgctccaaccgctgtgccagcgcatccacgcgctgtggagagcgcgctttgatcagcgccgcctccgtcttttcgcccagcggataactgccggcgcggtattcgttaaatacagcctgcgccgaaccaaaatgctcgaccagttcaaaataatgcatggcgccaatgccgggtatggtcgccagccagatttcgtatttttgcatctcgctgtacatattctggtccccctcccttaaacctgccagtacttccggtccaggctacggtattgaatggcctcggcaatatccgtcgccgcgatttgcgcgcgcccgtccaggtccgcaatggtccttgctacctttaaaatgcggctgtgcgcccgcgcagataagcgcagctggtggaatgcctggcgcagcagcgcgctgccctgcgcatccagagcacaaacctcgttcatcaaacggttactcagttgcgagttaaagtaaatgcccttttgtttgtaccggccacgctgaatcactctggcacgctccacccgtttgcggatatccgccgaactctcctcaggctgctgcttttgcgtcaactgtgtataggtgataggctgtacttccacctggatatcgatcctgtccagcagcgggccgctgatgcggtttaaataacgctggatctgcagtggcgtgcaccggcattcctgcgtggcagaaccaaaattgccgcaagggcagggattcatcgaccccaccagcataaattgcgccggatatgtgtaattggcgttgacccgcgccaccgtaatatccccatcttccagaggctggcgcagggcctctaaaatttcccggggaaactccggcatctcatccagaaacaacacgcccaggtgcgctaggctgatctcacctggccgggcattgcgcccaccgccggtgatagaaggcacggaagccgagtgatgcggcgcgcgaaagggccgctcggtcaccaatccgccgtggagcagcgtctgtcccgcaacgctgtgaatcttggtgatctccagggcctcttcaaaggtgagttccggcaaaatgctgggcagattatgggccagcatggtcttgcccgaaccgggcgggccgaccatgattacattgtgtccgccggcagcggcgatctccaacgcccgtttggcggcagcctgccccttaacctctgaaaagtcgccctgataaacgctttcccgtcttagcgtctcaaaagattgcagcggcacgggagcaagcgcctcctccccgcgtaaaaagcccaccagctggctcagggtttgggcggcataaaccgctataccctcaacaaaggaagcctccgcggcattttcagcgggcaataccactttttgaaatcccatctcccgcgcagcgatcaccatgggcaagacgccggtcaccgggcgaataccgccatccagggagagctctccgcagatcagataatcctgcgctgcctcgcgaggcacctgtgcggtggcgcaaagcaggcctatagcgatgggcaaatcgtaaagagggccctctttacgcatattggccggggccagattgacggtgattcgctgggcgggatactcaaagcccgcattcctaagcgccgcgcgcactcgttcccgcgattctttgacggcggcatccggcaagcccacggtctcataggccggcaggccgtttgatacgtcaacctctacggataccgcatagcccgccaggccgtttaggccaaagctgtggatcttagaaagcatggtctctccccttcttcgccaccctggcgatctagataaacaaaacccacgtcggcagccatttgagcagccgggcatagccttcgggtatcggaattcccgttacagcgggcaagaaaaagcagaaaagcacaagtaccgcaattaagaaaatcctgaccgcccagcggccctttttgcccgtcgcatcgattttttgcaggcagaaaaccaggcagagcatcataaacggtaccgaggcaaagtaatgatacaggaaagtggaacgcggtaccagtacccagggcaggaattgtgaagccagcccgatcaggataaaggtcaactggggatttttgcgccagcgctcggcaatccactgaatagagccccatacggccgcgccgatcccatacaaggcggcccttccatcgctgagcgtgcggcgcgaagccgtcatcgcctgccaagtcattctataggtggcggcgtggctgcgccgctggatgagcaccaccgccaatacatagccgatggcggccagccccgtccaccagatgagcggattacccatacaggagatgccggccgtccagccctcgggcagcagctgatcggaatagaagaaagtcggtcggatcatcagcgcccattcccaccagggcgaggcataaggatgctgatcgaccagctggctgtgataagagaacatgtactgctggttttgccataccgtttccaatagcggcttttggaagccgtccgcctcggggatgtagcttaaaatatagatgcccaccgggatgacgatgaaaaagagcagacaaaccagtaacgtgatcaccgtcgctttggggaaggtcttttttacgcccgcataaatctttttctccgcaggggtataattttcctgcttgagcgcccgctttgccaagcggtattccttataccgcagccccagagtgtaaaagaacaggatcgctagtcccgcacctgcataaaggcagatccatttggtcgccgcccccagcccgaaggaaacgccgcatagcatcagcggccacagcgtctggcgcagcgactggcggtggaagctgcgctcatagtaaagatacatgaatccgtacatcatcatgatgaagaacacggagtaactgtcgatggtagcgatgcgcgtctgcacaaagtgcatcaggtcaaaagccattaagaacgcgcctacaaaggcccacttgggctttttaaagatcgcccgcgtcatcaggtacatcagcggcaccatggcaatgccaaacaccgtgcccataaagcgccagccgaagggatccatgccgaacatctcgatccccgccatcatgatgaccttgccaagcggcggatgcgtcgtttcatagggatgccagcccataatatgctcataggctgtgcggccgtggtacagctcgtcaaaatacattccgtagagcggatcgggccagtttttcaccatttcctgctcgtcaaaggcctttgcaaagccgtgctcgctcccatcgtcgccggtgacggattgcacgggcaccgcctgttggtccgtatccaaaaagccgatctccagcacccgcagccctgtggtctggggccttaaacggatatagcgggcctccatcgggcaggagagcggataccagcggtacatctccccatgcgtgtattcgatgcgcggcccttcggtccaattcaccccgtccagagaataggagatagcgatattcccttcgttaatgcccatatagtacatgacataggaaaggtcgtgtacctcgcccagatccaccgtagttgcctcgtaatcgttggtggtctcccaccaagtttttggcgtttcagttgagcccagatggaaaaaagcaaaacaggcgtaaaccagcgtcaaggccagtaaaagcagtacctccttcttgctccagagcacctttgcccgctcacgtccataaaagaggctttcgtaggccggctttacctgcatggccttagccgtattcttctctaccgcaatatcctcgggcaccgggtcctcgctcagggtaagcactttgcgcctttcaaatatgcgtactgccgtatagagcaggtaggcccacaggccgatctgcactgcgcacagaagcatataaaagatattgtaattgggcacgtgaatccagatcatcgtcagcgcggtattgataaaattggtcgccgcaaagccgccgatgatatagagcaaccgccggtccctaatttggatataggccagcgtcagcagcaaaaagacaggcattagatagcgctcatgcatcttgggccctaggatatagagcgtggttagcagcagggccgccaacatgaaataggcgccctttttatccctccagcggacccagcccacaatcgtgcctacgatagcaaggccggtaaagatatagccccaggtcccacaggtcagccccaacagctgagaattaatatccacaaagttaaagctcagcagcgcatagaggttcagtgcatttaaagaggcataagggtagcttgccagcgtcgtcaaatacttttcgaagataaacgtccaatcctgtttatagagaaagggcaccgccagcaggataaacgcccccgccgccagcaaaagccctacaccgatgcgttttaaagccgttttgcgctcagccgctttaaccagcccgccaatataccccagccccacgaccggcgcaaacaccagcgcctggggtttgaccagcaccgccaccatgtagcaaaggatggaccaatgatattgcttgcgcacgataaacagcagcgtagaggcgataagcaccgccaggaacgcgtccatctgcccgtatacgctggagttgatccagatcgccggattgaacagatacaccgccgtaagggtaagcgccgcacggtcgtttaaatgccggcgcgccaggcgcatgatcatataccccgccgccagatccatcaggatcgcagggagtttgaggaggatcagcgaaaggccgctgtacatctcgatcccgaaggtcttgtgcaaaaagccgatcagccacagcgggtaaaaatagcccggaggataatcgcaaaaataggtaggcgagtaaaaatcgccaaaactcacttcgttgagccgtgacgcccacccataaaagcagccgatatcatagggatagccatcgatattggccgccagaaccactcggaagatcagccccgccaacatcaatacggcaaaggcacccacatacatctttttatcgggccgcagcagctctttcgagcccatgtagcgccacaccgcccataaaaacagggccaggaacagcacgcccagcaaaaagcacaggctggtcaccaggttggggtcgtcaaaaagcttggccatatcccgcgccatatagatacggttatcatacaacggaatgacggtggcgccctccggcgccgccgcttcttcaaccagaatatcgtcaaaatacgcctcgccctggcaataggcctccttgccgcccaaaccaaccgcaaccgtcatctcccgctgagtcaggccggtgcgcacatagtattcgatatattgccaggaaccatcattcgtcgtcacctgagggaagagataatcccggtctgtcacactgatgcttgcgccatagctggtattatccggtgcctgcgtcagcgatgtcagccagacaaaaccggaaacgcggtagaccgcattgccccgtacctgcaacgtctggcgcatagaggcgttgttctgcgtcagctgggtcacgcgcaggcactgccctaccccgcccgccgcatcgccaatgggctccagggcaaactctacggcgcgctcctgcttttccaccgattctgtccagccgatcaggccgtcctcaaaatcgccgttatacagcaggccgctctccccatcggccagcgcctgcaggggaaacagcccaaagcataacaatattgtcatcagtaaggtgaaaaagcgtttcatgtggacgtccctcttttaataaactatttcttcggggcattggaaagcattgcggatatgctcctgctgcggccccattcccgggcgggattggatgataaaagcgtcaaaccgtaccgggcgctccaatcctccgttttcctgcaggtattgcagggcagctttggcaatacggcgctgcttggcgggattgatcgcctcataacccgtaccataggtttggctgcgccttaatttcacttctataaagaccagggcgtttccttcctgtgcgatgatatcgacctcgccccaacgggtatgatagttcctagctaggattgtccacccaagggcttggaaatacgccgctgccaaattttctcctagcttgcccttttcgcctttattcccctgcatcgtccgcctcctgcaggatgcgcgtaataaacgagcggcggtggatcgggcaggggccataacggcgcagggcctccatatgctcggccgtaccgtaacccttgttgcgcgcaaaaccgtattggggatattgccggtcatacttctgcatcaatccatcccggtagactttggccacgatagatgccgctgcgatgctgtagctcagcgcatcgccctttacaagccctcgtgcaggacagggcggccgaagcccgggcaccgtatcaaacagcaaaaaatcaggtgcctcctgccaggtgcaagctgccagcagcgctttttttgtagcgtttaggatgttcatctcgtcgatctgctgcggctctacctgcccgatccccacaaacagcgcccgggcatggatctgggcagccagtgcttcccgccgcgccggtgatagttttttggaatcgttaatcccaaggatcaggtcatccggcggtaaaatgacgcatgccccaactacggggccagccagcgggccgcggcccacctcatccatccccgctacgcgcaggcgccccgcatcccaaaattcccgctcaagccgcgtcatttcctctaggcggcgctcctgctgttctttgcgcgtcatatctgcgcccccgcatcgccgctattttgcggccgctcgatggtgatacgcccgatctttccatcgcggaattcatccatcaccatggcgacgccccggtcaatatccagccgtccacccgagaggataaagcctctcttctggcagatacgctccaaaagcgcgtcgttctccagtatcaaatcatcctcgcccaatttatagcgcgcagtcagcagcgccggcgcggcctcctttaaaaagcccagcagctccaggcaaagcacgtatacgtcggtgatctcatcccgtatcgagccgataaaggccagattgcgcccggccagcggatcctcaaacttgggccagagcagcccaggcgtatctagcaattccagatagggggtgacccgtatccactgtttcccccgcgtcacgcccggccggttggctgttttagccttgccgccgcccgataggttgttgatcagcgtcgatttccctacgtttgggatgcccaccaccatgacgcgaatggtcttggatactcccttctcgcgcagcttgtctacgcgcgtcttggcggcctgctggatcttatccagcaccaccttggcgctgccccgccgggttgccacatactcgatagccgggatgccctggcgggcaaagtgggcaacccattgtttgttcgccttgggatcccccaggtccgctttgttaagcagcacgatccgcgcgcggcgggatacgatgggttcgatatccgggttaaaagagctcagcgggacgcgagcatcccgcacctccaaaaccacatcgatctggggaatggtctcctccagcatgcgtttggccttggtcatatggccagggtaccactgtatctgcaaaaaatctcctccaagaatccaattttattccccttggggtgccaagccatgattgaaaatcttacggttatccagcgcccatattctgtcggtaaacgcgccggaagaaatatcccttaaatgatcgctaaaaataaacatacgcgcatccagcatgtccagctcgttgagcgcgtccgcctccggaaacatgggccgcaccgggctacccgtatccggttcgccgtggtgagaaagaaccatgtgctcgaccatcagggcaatatacgggtctatcgccaactcccgcgcagccgtttcaatatgcgccacgcccatagcgatgtgccccagcagattccccgctaccgtatagcccctgcaaaggcccagctcatccgcctccagctcgtgcagcttagccatatcgtgcaggatcaccccgcaataaagcagctctgggttcagctgcggatagacccggcaggccgcctgcgccatgcgcaggatggtataagtgtggtaaagcagcccgccgcgcatggcgtgatgcagcttaaaggcgcccggatgcaccagtagcgccgcacggttctggtccagaaaataaagcgtaagcttttttaaatcctgattctgaaacttttctaccagagcgtgcatgtcagcataggtctgctccacgtcgatgggggcgcagggcaccaacgccattaaatcatagtcatcgcccggcgccgccagacggatcatggtgatcttgagctgatctctgccctgccactctgaaaccgtgccgcgcactttgatgatctgccccggctgatattcgccatgggcggttttatcgtagctccacaactttgcggctacctcgccgcccgcatcgcccaccaccatatccagataagtggaaccgttggcgctggtacgtacgtttaaggatttgatgatgcaaaacccctgcacataatcctgcccttttgtttccaatagatgcattggcatatgcatcccccctttttctaccatttataagacattataatacaggttggcgcaaatgggaaatgccggatctttaaaaattaccggcattctcaatccatgcagtaaaaaactccctatcttttggaatagggagttttggtattattgctattttttgcggtaatggggctgcagccggcgcatggtataattgggcgcggggatgggatgataatgatacaaccgagcttcctccctgcccggttcaaagcagccgatgccgccgcagacgatggcaaacatcaaaccggtttgcaaccagaagatggtcacatccagcacgccgtgaatcattaccgccgcggcaaagcaaagaatcagcgagaaaaagcgccggtcccgcccaaagcactgggtgattagctttttgccgaaccgggaaaaataagtcaccagcagccccaagcccactaggccgtaattgagcaggatatctaacaaaaggttgtgcgcatgggccgtagcaaggccccctacctgggggaaaacctgcatataggtcatgccgccctggcccagcaaaggatgctggctgatgccatgcagcgctgttttccagatcgaagcccgcacataaaaatcgtcccccacctgcgtcagacgcggcagcatctgcggcaccaggtaaagcacgcccagcgcacagccacccaccaccatttggatggccagggctttatagcgcttattgacaaagagcatcatcaaaacagcggcgaagatcaccgtccatgccgtacggcattcgcaaaggtatagccctacaaggttggcggcgatggtgccggagtaaaagagcttacgccggcggctattctgtcccaacagcttataggcgcaaaggatcaccacaaactcgatgatcgtcgcgtaataattcgcgttggtaaataccgcatccgggcgatagagcacatccgccccaaagagcagctgctggccgagcgccagacccgcacagacgatgctggctgcacaggccaggtcaatcatcttttcaaagcgcggcttggtgacggtattgcggatatacaatgccgccagcacgatcatcgccacggcgatgccgacaaaaaagccacgaatattgtcacaaaaaacggggaccaccatccccaatacacaaaaagctattaaaataatcgatccactgcgccggtccaatatcagtgaagccatcttttggctataaatcaggtaaagcgtcagggctaccaaagcaactatcgtaactacggggccgcaaaaaatagcggcagtcaacccgagaaggatcttttcatctaacggcacattatttttaaggccgtttaagaaaaccttaatatggatcaccaccttaacatccatacagtataggtattggcaatggcgctgtcaatatcatgccatgatcgttcatattctatgcgcaatccgcctctttgggcaggctgtgccacattgcgctgactttactatatcagcaagctgtaaattttttcttaataactaatgaagaaatggttaattttatcatacaattacacttcaatttctcaaaatcttctagttatgcttttcccccgccgtgcccaaactaccaataaggtggtgagataaaatgaatcaagcacaggatcaatcgatcacgagtgccagcaaccccggctttgccgcgctgccggtctttttacaggaaaccatcaaacagatcggcctgcaggtagaatcagagcagcagttgcaggcgtgcgctcaacactttttagagaagtaacgcaaaaagcgggacaggatattgcttcctgccccgcttttgcatttttttacggtaagatattccccgccgccagatagatctcgtaccattcctggcgcgtcagtttgatgtccgcccccttgcagatctgcccgatgcgttccgggttcatcgaccccaggatgacctgcatgtttgccgggtggcgcaaaatccatgccgcagcgatcgcagaattactcacgccatagcgcgacgcgatctcattgatcttcgcattgacctctgggaacttatcgttatccaggaatacgccgtcaaagtagccatactggaagggcgaccaggcctgaatggtgatgttgttcaaccggcaataatccagaacgctgccgtcccggtcaatagcgccgtcgatcttcatattcacatccatgccggaatcgatcatccccgtgtgcataacgctaaattgcagctggttaaagaagatctcgtccttgagatactttttcagcagctcgatctgcatgggcttttcattgctgacgccgaaatagcgcacctttcccgattccctgaggctggtaaaggcctcggccacctcttcaggctccatcagcgcatccggacggtgcaacagcagcacatccaaataatccgttttgagccgctttaagctgccctcaaccgcctccagaatatgctctttggaaaaatcgtaaaacccgtctcccaatttctggataccgcatttgctctgcaaaatcaggctttgccgcttagagggcgtccaatcgatcgcctcggcaaacacttcttccgatgcgccgccgccataaatatcggcatgatcgataaagttgatccccgcatcaaaggcagccgccaaaacttccttagccttggcgggctccagcgcactcatccgcatgcagcccagcgctatggcagaggccttcagggcgccgccagccaccataatctgtttcatcggtttcccttcccttcgtctttggtttaccccatccgcctatttcagagggtttataaacagggttacctctattatgcggcttttaatcttccccgtcaaggtagcagctttgacgttttggggcgaaatcaacgccgcttaagctctgaaagcatcacttcgcatcccggctgcaggctggggtcaaggtaatcctgcgcatttccgctggcgatgcgcaccagtaccgccctgccctcctgcccgggcgccacctgcaccaactgtcccttaaaatccgcccaaaaataatcggaaaaggtgtcgtctgcctgcgggggaaaaacctgctcagccggcagcgccgtataaagcaccatcaagcatcactcccactcataagctcgtttagcttctcaatggcatctgttaccccacccactgcatccattaggcccttatccacggcttcttttcccaccagcacggtgccgatatcgctggtcagctcgccccggttcagcatcagttctttaaaatcctcctcactgatgtggctatgctcggtaataaagcgcacgacgcgctgctgcatcttctcaaagtattcataggtctccggcgcgctgatgatcagcccattggtgcggatgggatggatcatcatcgtcgcgctggaggcgatgatcgaataatccgccgataccgccatcggcacgccgatgctgtggccgccgcccagcaccaaggcgaccgagggctttttcatcgtggcgatcatctcggcaatcgccaaacccgcttctacatcaccgccaacggtattcatgatcaaaagcagtcccttgatcttgctgctctgctcaatggccaccaactgagggatcacgtgttcgtatttcgtggttttattctgcggcggcagcagcatatgtccttcgatctgaccgatgaccgtcaggcaatagatattgctggcctcatcctcgggcaccttgagggcgccaaaatccttgatcgtttcatttactgttgcggtattttgcgtttcgttttgtgtatcgtttcccatttaatcccttcctccatcctgatccatattcttctagggttaggattgccgggcaaaggggtttgcataccgtggaagtagaaaaaacgcgcagcccctgcggactgcgcgttttgaccggatgcgatctttacataaagttctcctccagcgcccaaaggcccagagcggggttagagatgtaatagatctcctctccatcgggcagggtattaaaaccatccttgagctttttggggtcgtaccgcttggcgtattcgtcataatcgccgtaggtaaagccaatactttcgacctgatctttagtcaggtggcgtacggcataggtcacgttaaagcggccatcgggcgaaccgtggacgatatgtgccgcaacagataggttggaagcaatatcctctccgcggttgacggcggccaggatattatcccgccccgtatagccgtatttgccgatcagccggtccacgccctcgctctcgccaaactggcgcacgcccggtgccaaaacgatcagttcgcccccatcggcgatggccatgcgggtgcggtagatcgacttattgcccacccaggtggtgcggaactcttccggctccataaagaccactacttttttaagcggctctttaacaaagttgaggttgagcttctggctgacctttacggcttcctcaaagggctcccgtccgctgccgatgaacagggcattcagcgcatcctccccctcgtactggccgatcacggtcagcataaaggtcagcggcacatggcttaaaaaatgctcctgcgcgtaatcaaatacctttcgtaccggcgtgcggtcccggcccatcatgcgctccatgccatataccgcgcccaggaaatgggtgccgctgatcatgctctccccgccgcagcctacgaagatatttttagaatagttggccatgcctaccacctcgtgcggcacgacctggcccacggagatgatcttgtcataccccccgtcgatcaaacggtggttgacctgcacctcgatctcaaaatccagcaggccttcggacacttcgcgcacaaattcccccggcaccttgcccagggtcacacaatccttctgccagttgtgcacgataaagcgatctagcggaatgttctggccgaacatggtgcgcagctcttcatcctccatggccatatgcgtgcccagcgcgggcatcaggtccacctggcaggtgggcgaaaggtgacggtacaaaatgtcgcaaatcggcccggccatagaatggctgcgggtgatatccggcggcagaagcaatacttttttccaatcctgctgctgttcttccagccagccgaccaccaactgctccagccgctgcagatcaatcccttttccgtattcaatgacgcgcatattctctcccacttccttacattgatttgtcatagcattccagatagaggcggtagcgctcctgtagcgctgcatggcgggtcatgtcgggctcaatcaccgtaccggcgggtgcctcaaattcctccaagcgcgcgatagagccggccgccttcagcgccagcgccacggcgcccatggtggaggcatgctcctgggtagaggtctccatggctttaccgaaaagatccgcggccaactgcaaccatacgggcgaatgtacaatgccgccggtaatagagatgcgctcagcgcggctacccagcccgtttaaaatcttatagcattggtagacgttcatcagcacgccttccagcaacgcgtaatacatctgccctacaccgtggctgccctctacctgcacaaaaccgcccttgcgggaatcctccccaccgggacagcgctccccgtataaaaagggcagaaaaatcggtgcattttgtgtatcgctttgtgctatcgcctgctccagctcgctaaaggataaacgcccacccagcaggtcttttacaaaccagttgacgcagttgcccgctccggaggtcgccgcgccggcaatgcgcttgccatcggcgatataatagcaccacgtggccggattctccggcaaaacgggcgcatccaccgccaggcgtatcgccccgctggtccccaccgaaaaggtcatcacgccgggtttcatcgcgcctgaaccaacctggttgagcgcgccatccgccccgcccacgcagaccggtatgccaaaaggcaggcccatctgcgcagccgcctcttgggacaagggcatagtatcgcacgcttctttgagcggcggcagctgctctttagtcaggccggcgaattttaaaatatcttcatcccaatcaagcgtatggatattcataaaactgctgccggatgccacgcatttggagtaggcgatatccccggtcagccgttcataaatatagctagcctggcaggagatataccgcgccttttgagcaagttcaggctgcgtctggcataagtacagccattgccatagcggatacatgctatggaccaggcaacccgttttggcatagctccattttgcggtgtgtccgtcggttcggtaacgggctaccagcgggcccgcggccgtattggcccaggtgctgatacggccaagtggcttgcgcctttcgtccagcagcagcaggctgtgccagataaagctcaagccgatgcaggcgatcttcttatccggattgcgcccagcaagctcgcgcgtgcaggcgcacagcgtatcgtagatcgcctcggcatcctgggtgatcacatcgctggcctccggcgcaaagggcaggctgaccacatcttgcacgcccagcttatcgtcgtataggatcgctttggcagactgcgtgctgcactccaaagccagtacgttcaaattatcccactccttacgttagatcgcaaagttgccaaaaccgccatcaatgcacagtaccgtgccggtaacaaacgaggcggcatcgctggccaggaaaacgatggcccctaccagctcttccggcgtaccatagcggcccataggggtctggccgatgatatgcttggcccggggcgtcatctcgcccgtctccttatccttaagcaggaagcggttctgctcggtcagcaaaaagcccggggcaatggcgtttacgcggatgttgggcgaatagttgagggcgaagtgcccggccagccatgcggtaaagttggacaccgccgccttggccgcggaatagcccagtacattggtcagcgggcgcagcgcgctcatggaggaaatattgatgatattgccctcttttttatcagtaagcactttaccaaacacctggctggagaggatggcccccaccaaattcaggtcaaacacaaagcgcagcgcctcgggcggcatgtcaaaaaaggagaggtccgggctggtggaggcatccgggcggttgccgcccgcgccgttgatcagcacatcgatggtgccgaacttttccagcaccgcgtcccgcgctgcggtcaggctatccttatctaacacgttcgccttcagacccagggcgtcaccgcccttatcgcagatctcctttgccacttccttggcgcgctcttcgttcaaatcgagcacggccacccgcgcgcccaactcgcccagctcccgcgccatctcactgcacaggatgccggcggcgccggtgatcacaaacactttgcctttaacgtcaaaattcggtaccataagttattccccctcagatttttatattcgcttagatatttagccactcggtatggaaactgccgggcttgtccgtacgctcataggtatgcgcgccaaagtaatcccgctgggcctgtaggaggttggccggcaggctttcgcggcggtacccgtcaaaatagctcagcgcagaggcaaacgacggggccgggatgcccatcagggccgcttgagccactacgcgccgccaacctgcctgggccttaaagaggatgtcctcaaaataaggatccatcatcaggttttccagattcgggttgcggtcatacgcctctttaatacgctccaaaaagcgcgcgcggataatgcagccgccccgccacatcagcgcgatctcacccatgttcagcgaccagccgtatgccttagaggcttccttaagcaggtcgaagccctgggcataagagcagatcttgctggcgtaaagcgccaggcggatatcctcaacaaagctggccttatccccctcaaactgcaaagcgttgccgcgtatcgccttggaggcggccacgcgcgcatccttctgggcagagaggcagcgggcaaatacagcttctgcgatggtgggcgcagctacgcccagatccagcgcctcctgactggtccacttgccggtacccttctggccggcgcggtccaaaatgatctccgccatgggcttgccggtctcgctgtcggtcttggaaaggatatcagccgtgatctcgatcaagtaggagtcaagatcccccttattccattcggcaaaggtcttttgcatttcgggataactcatgcccagcagttctttgagcaggaagtacgcctcgcagatcagctgcatatcgccatactcaatgccgttatgggtgaccttgacgtaatgccccgagccgttttcgccgatataaccgcagcagggcgtgccgcccgcaaccttggcagagatgtccaccagaatcttcccagccagcgcccaggcctctttcgagccgcccggcataatgctggggcccttgagcgcgccctcctcgccgccggaaacgccggcgcccaggaagtggatgcccttctcctccaagtactggctgcggcgaatggtgtctttaaagaaggagttgcccccgtcgatcaccacatcgcccggctccaagaaggtgagcagctgctcgatcaccgcatcaaccgccttgccggcctgcaccatgatcatcaccttgcgcggtttatccagcgccgcgatgaagctctccagttcatgggcggggatgatgtttttccccttggctgtggtagccataaagtgatccgtccgctcgggcgagcggttatacactgccaccgtatagccatggctttccatattgagcacgaggttttggcccataacagccaggccgatcaaaccgatatccgcttttttcatactctcaccctttatcagattattttatattcaagaaaaaaaggcgcgccccaaaagggggtaagcgcctttttccatcatcgcttacttgaagtagcggttcagcaatccttcaaaagcacagccgtggcgcgcttcgtccttgcacatctcatgcacggtatcgtggatcgcatcatagcccagctcttttgcgcgggtggcgatatcctttttgccctgggtagcgccaaactcagcttcaacgcgcagctccaggttctttttggtatcggcaaacaccacttcgcccagcagctccgcaaatttggccgcatgctctgcctcttcaaaggcaatgcgcttataggcctcagccacctcggggaaaccttcgcggtcagcctggcggctcatcgccagatacatgccaacctcggtgcactcaccggtgaagttgttgcgcagcccctccaaaacctcggggtccacatctttggcaacgccaatgcggtgctcatccgcccaagcccgcgcgccctcggcagcggtctggaacttctccttcggcgccttgcactgggggcactgctccggcggctcaatgccttcgtaaacgtaaccacatacactgcatacccatttcttcatatttcgaacctccaacgaaatattttatttcattgcagcttgaggctgcaaaaaataatcaccacataatgtcttatcttaacgcatgcgctcgcgcaccaaatcgggataattcgtaatgatattgtccacgcccgcaaagagcatatcgtcaatcaccttgcaggtgttgaccgtccatacgttgacggccacgcctgcctcctgcgccctttgcaccatcccggcattgaccgaaccgtattgcgggtgcagcgcatccgccccacagcttttggcgtattgttgagcctcatataaatcgcagctgtacagcagtccaaccgggatcttcggatcgatctccttggcccggtgcatggagcgatggttaaaagaagaaaggatgcaacgcttctcaagcccataatcatatagcgcggcaatcaccttttcctccatccccgcataggcgaacacgttgtttttcagctcgatattgacgcccatatcgttccccgctgcgatgcgcagcagatcctccagcagcggcaggcgctgccccgggtgcccctttaaaaagcccgcatccagcttagaaagctcgctgtaggtcatctcgcagaccagcccgtcaaagccagtggtgcgcagcacgctttcgtcgtggcagatcaccagcttcccatcttttgacaggtgcacgtccgtttcaatggcatccgcccccatttcggccgctttttcaaaagctaaaatggtattttcaggatataatccgctggcgccgcgatgggccatgatcttggtcatcttttcttccccccaatatcggctttctctagccccattatatgccttttcaaagcgcgcaatcaacaccaaatttcaatcgttcacatttcgttcatatattcgcccggcctattcccggatatccactaaactgcccgcatcgatattgccttggctaaacgttcccatatcccgcatgacggccatcgccgcgtcgatcacggcaaaggccagcgggcaaccgctgccctcgcccaggcgcatatccaggtggatcataggccgcaggcccagcgcttccacagcaagggcataccctggttcaaacgaacggtgggaagcgataagatagtctctcagtttcggcaataagcggcaggccgcaagggcggctacgatagagatatatccatccacaaccgccggtaccccatttacgccacaggcgatataagcccccgccatggcggcaatatctaacccgcctaccttggcaagcaccccaatagggtcctgcggatcgggcttgttgacctcaagggcacgtgcaacgcacgctcttttcttctggaaagccgcctcgtcaacaccggcccctttacctacggcctggagcacctgcgcacccgtcagcgcgcagagtaccgccgcggaagttgcggtattacagattcccatctcgccgatgcccagcaggcgcacgccgccccggatcagttcctgtgcctgttcaaacccggtctgcatcgcttctaacgcctgctggcgggtcattgccgggccttgtgcaatactggcggtgcccttgcagactttgcgcgcaatcaaaaacgggtgcgcaatgggcgctttgatgcccacatccaccacgcgcagccccgcattggcccagcggcacagtacgctgacgcctgccagcccatttaagatattcaacgtctgcgccgcggtgacctcttggggcaccggggatatgccttcgtcccaaatgccgttatcggccgcaaacaccagtaccgcccgctggctataatctcccttcaccacgccagtgatcccggccaggcggaccgccagttcctccatcccgcccagcgcgccgatgggcttgaccagatcgtccaggtgctcccgcgccgcatccatcgcctgcatgcaaagcggcttgattttcattttctcaatatcgaacacaagatcctcttccttgcctaaatctccgccgcatcccgcaccgccatccacgcctccagcttcacctcgcggcgctgggtattggccgggctggtagagggcagcacagcatagtctatatcctccctgcggccgatcttatcgtatagccgctgggccgtctttccgttaaaaaacacgtattttatcttgggatatgccgcaaacagcccttcaaaatcattgatttgcacatcccgtatggcgctgtccaggctgccctggcgcaggcaactgccggcaacatcccacaaggccacatggtgccgcagtgccaacgccagcctttgcggataatcctcagggcatatttcgccaaacacctgagagagcagcggccaaaactggttgtgcggattgccataatactgtgctttagccagggaagccgcgctgggcatcgtccctaaaatcaataccctgcaatccgcatcgatcaccggttcaaacgaataaagcctattcatcttttttcaccgctatcccttctacgatccaggcttcgacggccagctccgcccatttttccggaaccagcagataatccgtatcgtacgtggagagcgcaaacaccggaatatgctgccgagccaaaatccccgtgagcttggatagaatccccaccagcccgaaatccagcactccgtcgatcttgaaaagcgtaaaatcatgctccacagtctgcggcgccggggtaagctgccgcaaaaaatcctgccggcaaaccacagaggtctccgcctctgtatgcgtaatggaaacaaagcccggcagcgcctgcaaaccctccagggcagtacccggcgcgaaacgggcgacagcgtattccccctgctgctgcgtcagctctaagggcatccgcttgctcccagatgtcatgcgatggatcaggtacggaatacctaaaaacacgcccgtacccatggccacgtactgaataaaggcgctaagcggcgcgtccggcaaaacggctttaagcccggctttgatcacgaacgcagcggccagcccacaggtgacagctaccagccggcgcaaacccgcgccctggcagttataatcgatccatttcatttcgataggcatgcagtatgccagcgcaaacagcaggccgcccagctgtatggccgtgtgtccgccgccaaacagggccaaagccccgccgggcagcatcagccacagcccgcgccacccctggtccaggttcgctttatcaaacaaccaggggcaaattagcgcgcacaggatgcccagtgcggccccgcacagcacatcctgcagggtatgtagccccaggtacatccgcgagatggccaccagcacgatcaatcccgccgcgacgccccaggcccaacgctttgcgatgcgccttgctaaaaaggtataggccaccgccgcgctttgggtatgcccgctgggaaaggaataaccccctgccgattctgtgtagatcgaccggacgccgggcgcgccgatgggccggggcacccggaatatattcttcaccgcggtgtttaaccccgcgctgaccagcagcgtaaagaccagcttatagcccgtgcgcttctcatatccccacaagaaaaatgcagccagtaaaatgactagcatttcctctcccaactttgatacgccgatgaaaatcacatccagcgctgggttaataaactgctgtagccataaaactgcctgcatgtaaatacctcgatcaaattattgcagcgcctctattttcaggaggccaaatgctgcccccccttgcggcgaaccctgcgcaccagcagcaccgcctgcaccacaatattcatcataagcgtcatgatggctaaaatcaagaaggtatcgcgcaaaccgatggtattgctgacgctgccgcctagccaggaccccagcgcatacgccaggccattgccgatcatggccagggccgtctgcccggtggaaagaaattcccgcggtacggtattgttcatgatcgccaccgcgctgtagctcataccgataaagctgatgccctgaagcatctgggcgaagataaacatgcccacgctgtgagcgaaaaacatcatcagcatgcggatccccgtcataaacccgcaaaacagcaacagcttatactcgccaaagcgggcgaccagtttgttaaagaataggaataccggtatttcgctgacggctgccagcgcaccgatcatggcgatcatatcattgctgatcaggttctccttcatgtaaaccgagttaaaggagatgaaaaacccgctgccgatatgggtaatcaggcaatatcccagcagtaacaggatctgtttgtttttgagcagttgcataacgccgccggactttttgatgctctcaggctcctgcaccggctctgaaggcgtaatcgccggctgtacgcgcttcatcttgggcagcagaaaggtgatcgccacccccaaacctacggcgatggcataggtttggaaataccgctccagcccggcgccgactacgtaggcgctaaaggttccgaccagcgcgaaccccagcgtgcccatcaggcggatcaccgggaaattggcccgtgtggcgttgctgtactccaggcaaacgccatccagcatggattgggaggtgttgttgaacgcggcaaaggcaatggtcagcggcagcacgtacatatatgccgtgctgacgggatacagcagcgttaagagcgcagtagctaataataccaatcggaatatcttgacccggccgaatttatcgctgatgtaaccgaacatgggggcgaagatcaacgtggcgatgggaccgatagcctggaggatgccgatctgctccaccgaatagccgatctgcccgtagtagatgccaatatagggataataaaaagcccggccgccgtaatacacggcttgaaggataaaatagtaaaacaggtatctcttattttgtaaatcaaccgtcgtccgatccactcgtgaaattcccctctcttaagctcaccttcatcaataatgggcccattataaataaaaaaatttgccgctcccccgcagtgcaaaacaggatatgacagaatccaccccatctattttagcctgttgctgcgcacttgtaaatcgttaaacacaattctttattaacactgctaaatttcataattccatcaaattctaccagtctcgcgctcggcccctcgcttgcagagtttgggcatttatgctatcctttcttttattagttctattctcgggaggaatattatgccggtcaaaatcgcggataatctacccgctgtacaaacgctgacacaggaaaatatcttcgtcattacggaaagccgcgcttcccaccaggatatacggcctttgcgcatcgggatcatgaacctgatgccggataagatcagtacggaaacgcagctgctgcgcgtgatcggcaatacgccgttgcaggtcgaggtagttttgttgcagccggccagccatacttcgcgccatacaccagcggagcatctctccgctttttaccgcacctttgaagaggtcaaagacgaaaagtttgacggactggtcatcaccggcgcgccggtcgaagagatgaattttgagcagaccgattactggacggagctgcagacggtgatggactgggcggatcaccatgtcttttctatcctttacatctgctgggccgcgcaagccgggctttatcaccactttggcatacccaagtattcgctgccggaaaagatgttcggggtatttccccatacggtttccaagcccaacgtacccctgctgcgcgggtttgacgatatcttctgggccccccactcccggcataccgaggtgcgccgcgaggacatcgaaaaggtggaggatctcacgatcctggccgaaagccaggaagccggggtctacatcgtcgcctctaacaatgggcggcatatctttgtgaccgggcatgcggaatacgaccccgatacgctaaaaaacgagtacctccgggatctagacaaggggctttgcatgcatccgcctaaaaactactttatcgataacgacccggaaaagccgccgctggtcacctggcgcagccacgctaacctgctctataacaactggctgaactattatgtctatcaggagacgccttttgacctgacgcagatcgactaaaaactttaatatagtaaataaaaggagaggttttccctctccttttttgttgccctattttgtgggatggaagcccgcctcgtccacccagccgtaacacagcggcggcacttgcgccgggctttcacgcagcgttacggcggataataacgccgcctgcgcgggcgccaaaagcgcttcatccgatgcaaacagcgtggccagcgtttcccctggggcgagcttttgccccaggcgcgcgcgcatcaaaagcccggccaggggatcgatggcgtcctccttttttcttctgcccgcgcccagcagcagggccgcgtgtccgatgtgttgggtatcgatggcgctgacatacccgccggatgcgctttttacatccaaccgacaggccccctgccccaagcgctcgggatgctggacaacccgcgcgtcgccgccctgggctgcgatcatctctcccagcttttccagcgcccgcccagaggccagcgcctcatcgagcgcgcgtttacagctttgcgcatcgggataaacccccgcggccagcaacatgttctccgccagcagcaggctgactttgcgcaggtcgctctttgcgtgcttaccttgtaaaacctcaatgccctccaccacctcgatggcgttgcccaccgcgcggccaaggggctgatccatactggtcagcagcgcccgggtattgcgcccgtgaccctgtccaatcttgaccatggcctgcgccagcgcgatggcatcgtccagctttttcataaacgcgccgctgcccaccttaacatccagcacgatagccttggcccctgaagccagctttttagacatgatactggacgcaatcaggcccaggctgtcggtggtggccgtcacatcccgcagcgcgtacaatatcttatcggcaggggccagctgcgcgctctgcccagccaccgccagaccgatccggctgacctgggcgatgaattgatcgatggtaagggcggtgcgcatgccgggaatggcctccagcttatcgatagttccgccggtatgccccaagccccgcccggacattttgacaacgcgccccccgcaagctgccaccagcggccctgtgatcagcgtcgtcgtatccccgaccccgccggtggagtgcttatctaccggtatgccgggtatcatggatagatcgacctgatcgcccgacgcggccatctcccccgtcagatccgtgatctcctccatatccagccctcggaaatagatcgccatcagcagcgcactggtttgataatcggggatggaacccgccattacgccgctgatccaaaaggacaattcttctttagaaagtttgccgccgttccgctttttttcgatgatctctacgatattcatatatgccccccattgacattgcttctttaactttagtataacaaaaacgggccgctaatagcggcccgcctgcaaaaatagctatttctttctgccaatgtccgtgcggtagtgcatattttcaaaatgcaccccttccaccgcctcataagctttggcgatggcttcatccatggtatcgcccaggcaagtgatgcccaatacacggccgcccgccgttaccagctggcccgcctcgttgcgcgcggtacccgcgtggaaggcgatggcgctgtttttcaggttctcaaggccggtaatcactttgccggaggcgtacttaaccggatagccgccggaggccagcaccacgcagaccaccgcctggtcgctccagcccagtgtaacttcatccagcctttcctctaagatagcttctattacttccagtaggtctccttgcatccgcggcaaaaccacctgcgtctcagggtcaccaaaacgcgcgttgtattccagcgttttggggccgttctccgttagcatcagcccgaagaacagcacgcccttaaaggggcacccttccgcagccatagcgtccacggtaggttgaaagatctctttcaggcagtaatccgccacttctttggtatattggggcgtaggcgaaaaagtgcccataccgccggtattgaggccctggtcatgatccagcgcccgtttatgatcctgcgcgctggccatgggtacgacggtcttaccatcggtaaaggccagcaccgatacctccggcccggtcataaactcttcgatgaccacgcggctgccggcctcgccaaactttttatccagcatcatttcccgcaccgccgcacaggcttcttcataatcctgtgcgatgatgacgcctttgcccagcgccagcccatccgccttcaccacgatggggaaactctgccccttaaggtaggcaatggccgcttcggcgtcttcaaatacagcataccccgcagttgggatatggtatttacgcatcagctctttggcaaatactttgctgccctcgatgcgcgccgccgctttgttagggccaaaggcgcgcaggcccgccgcctcaaaggcgtctaccatgccgagcgccaggggatcatccggcgcaacaaaggtcaggtcgatctgctcctccttggcaaagcgcaccatgccctcgatatccgtagccttgatgggcacgcacgtggcaatctgggcgatgcccgcattacccggggcgcaatacagttccgttacgcggggcgattggcgcagcttccagcaaatcgcatgctcccggccgccgccgcctaccactaataccttcatcttttgcctccaggtttaatgtttaaaatggcgcatgccggtaaagaccatggcgatgcccgcctcgtcacaggccttgatggaatcctcatcccgaatagacccgcccggctggatgatcgcagtgatgccagcggccgccgcggccttaacgcaatcgtcaaaggggaagaaagcatccgaggccagcgccgcgcccttaacggcttcgccgctgcgctcaatggactgctctaccgcccaaatacggttgacctgaccggggccgatgcccagggaatgtccatccttggcgatggcgatgccgttggacttggtgtgcttgaccagcttccaggcaaaaatcatatcctgcatttccttttcggtgggctggcgcttggtgaccaccttcagctcatcccccagcagtttcagatccatctcctggaccagcaggccgccggcaacctttttcatatcccatgcgggctgcgccagcggctggttgatagaggccagctccagcaggcggatattctttttcttggtcagcacggccaacgcctccggcgtaaaggagggcgccacgatgatctccaggaagatcttggccatctcttttgccgtagcctcatccacctgcgcattggtcaccacgatgccgccgaagattgaaaccggatcagcctcataagccgccttataagcctcatacacggtatccgcgctagctacgccgcaggggttggcgtgtttgaccgcaaccaccgtcgtatcgctgaactcgcgcagcagatccagcgcgccgttggtgtcgttgatattgttgtaggaaagctccttgccgtgcagctgtttggcgtccgccaaggtgcccgggcgcttgccgatctctttataaaataccgcgttctggtgcgggttctcaccataacgcatatcctgggccttttcaaaggtcagcgacagcgtctcggggaaagtaatgcccacctgctcgcgcagataggtggaaatcagtgtatcatagctggcggtatgctcaaacaccttatagcaaaggcgcagcttggtctcaaggcacacctcgccattttgccggatctcatcgagcacgccggcatagtccgccgggtccaccataacggccacatcctgccagtttttcgcagcagcgcggatcatcgtggggccgccaatatcgatattctcgatggcctcctcccgggtcacacccggtttctggatggtctgcttaaagggatacagattgatggcgaccagatcgatgggctcgatgcccagctcctcgatctggcgcatatgctcaggattgccgcgcatggcaagcagccccgcatggatgctggggtgcagagtcttgacccgcccgtctaggcactcggggaagcccgttacatccgaaacattggtcaccgggattccggcctcggcaatcgtcttggccgtgccgccggtggagaggatctcgatccccaaatcgtgcagcgctttcgccagctccacgatccccgtcttatccgaaacgctgattaacgcacgcttgaccatttttaaatttagcctccttattcctcgatccacaccctgcgcccttggacgcggagcttatcctctaaaaacagcttagccgccagcggaaagatgcggtgctctacctgcagcacgcgcgccgccagcgtatcggcatcatctccctgcaaaaccggtacggtatcctgtaagatgatcggcccggtatccacgccctcctccacaaagtgcaccgtagcgccggaaaccttggcgccataggccaacaccgcctcgtgcacatggtggccatacatccccttgccgcaaaacgaggggatgagcgccggatgaatgttgatgatccgtccccgatatttttccaccgtctgcctggggacaatacccaggtagcccgccagcaggatcagatcgggctttgcctcgtcgatggcgcgatgacgcgcctcatcacaggcggcgtcgctatcaaaataccgcttgggcagggcgatggcctcaatgccgtttgcccgcgcgcgctccagcgcataggccttggctgccgaagagatgacccggacgatctgtcccgggatctccccagtggctatcccatccatcaccgcctgcatattgctgcccccgccggataccatcaccacgattcgctttagcggcacagctctacaccttcctgtccgggcgctacaacgccgatgcggtaggcctctatgcccagctcgtctttggcgatggtcaaaatctcatcagcgtgagaggaaggcaccgccagcaccataccgatgcccatattaaaggtattgtagatggaacgctccggaatatcccccagcttttgcaaaaggttaaagaccggcaataccggccaggaacccaaggtgatttccgcatgggtggacggaggcaggatgcgcggaatattctcgataaatccgccgccggtgatatgcgcaatgccgtggatatccgccttttcgatcagcgcaaggatctccttgacgtagatcttggtgggacgcagcacctcttcaccccaggtgcagcccagctcctcattatactcgtcgagcttggccctatcctctcccaccagcttgcgcaccagcgagtagccgttggaatggatgccggaagacggcaggccgatcagcacatcgcccacctgtacccgcgcgccgctgatcgccttttccttatccacgatgcctacggcaaagccggcaatatcatactcatcgccattataaaagccgggcatttccgccgtttcaccgccgatgatcgccgcgccggactgcttacagccctcagcaatgcccttgacaatgtccgctaccttctgcggctgggtcttgctgctggccatgtagtccaaaaagaacaggggccgcgcgccctggcaaacaatatcgttcacgcacatcgccactgcatcaatgccgatggtatcgtgcttgtccataataaaggcatatttgagcttggtgcccacgccgtccgtccccgcgaccagcacgggctccttcatcgtctctttggccagagagtaaaagccgccaaaagaacccaggccgcccagcacgttctcgttgagcgtcccggccacatgctgcttcatcaggcgtacggcctcgtaaccagcctctacgctgacgcccgcatcttcatacgttattgccatgaaagggcctcctattttttacttttgcaaacacactcgcaggtttctttcacatccatgggatattcgccggtaaagcagcccatgcaaaaaccgcagttgccgtattctaccgtgcgctgcaacccgtcgatatccaggtaggccagcgaatccacgccgatcatcttggcgatctcctccaccgagtggttggcgccgatgagctgatccttatccggcgtatcgataccgaaatagcaggggctgaccaccggaggcgagctgatgcgcatatgcacctgccgcgcgccggccatgcgcagcatctcaacgatctgcaagctggtggtgccgcgcacgatggaatcatccaccagcacgatgcgcttgccatgtacgttgcgccgcaaggccgccagcttcatacgcacgccctgctcgcgcatggactgctccggctggataaaggtacggccgatgtagcggtttttcaccagtccatcgccatagggaatgccggaagccttggcgtagcccatagccgcgggcagcgcggaatccggcacgcccaccaccaggtccgcctcgaccggggcgatctgggccagcaggcgtcctgcctcatagcgcgcattgtatacgccgataccgtccatggtagaatcggtccgcgcaaaatagacgaactcgaatacgcaaagggcgctcttatccgccgccttggtctggatcgaatggatcccatcgtcatcgatcatgatgatctcacccgggcggatatcccggatgtattcgccgcccaacacctcgatggcacagctctcagaggccaggatgtaggaattacccttgcggcccagacagagcggacggatgccaaacggatcgcgcacgcccaccaactgcttttcattcatggctaccagcgcataagagccgcgcacccgggccatcatctcagggatggcctcggccagcgcccctttagtggagcgggcgatcagattggccattacctcggaatccaccgccgtctggaagatggtaccatcctcttccagctcccggcgcagggtcacggcattgatcaggttgccgttatgggccagcgccagctgccccttgcgggagcgtaccaccagaggctgggcgttgatcgccagattctccgcctgggtggaatagcgcacgtgcccaatggccacgcggccattaccgatattctccaacgcttcatcggtcatcacatcggtgaccaggcccatatccttatggtagcggatgccgccctgctccccggcgatggccatgccacaactctcctcgccgcggtgctgcaccgagtgcagcgcgtaatacatgctgcccgggatcggcaggtcgcccgcgttataaatgccgaccacgccgcactcttccggcatccggtcggtatagggtttcaataagcgaaaatcgtttgtcatttatttctctccacccattaaacgatgtaaaatctcctgataagcctcttctacattgcccaggtccctgcggaagcggtccttatccagcttttcgcccgtgcgggtatcccagaagcggcaggtatccggagagatttcgtccgccagaatgatatcgcccttaaagcggccaaactccagcttaaagtcgatcagttcgatattcttggtcttgaggtactcacccaggtactggttgaccttaaaggacatatccgcgatcttgcccagctcctcgggggtggccagctccatcgcataggcatgatactcgttgatcatcgggtcgcccagctcgtcatccttatagcaatattccagcacggtgtgggccaggtgcgtcccctccgggatgcccaggcgtttggacaggctgcccgccgcgatgttgcgcacgatcacctcgatcggaacgatctttacgcttttaacgatggtctcccgctcgctgatctcctcgacaaaatgagtggggatacccttgccctccagcatcttaaaaaggtggttggaaacgcggttgttcaccacgcccttgcccacgatagtgccctttttcaagccgttaaaggccgtggcgtcgtctttataatcgacgatgacgtaatcctcgttgtccgtggcaaagacctttttggcctttccctcatagagttgctcgccttttttcaaattcataataactctacctccttttgtaccgtcatttcaccctgatccacagctttagacatctttgcccgatagttgcgcagcatcggcaccagttcatcatagcggagcgagaggatctgcgccgcaagaatcgcagcgttttcgctgccgttaacgcccaccgtcgccacggggatgccgttgggcatctgaacgatggacagcagcgagtccagcccgtccataaagctggatttgatgggcacgccgatcaccggtaaattggtgtacgcagcgataacgcccggcagatgcgcggccttgcccgccgcagcgatgatgacctcgatcccgctggtgcgcgcggacagcgcatactcctgcacccgggcaggcgtgcggtgcgcgctcatcacatgcacatccacatcgatcttaaactcgtgcagcagccggatcatattctccagcgccgtaaaatcgttgctgcttcccataataacgccaactttgggcatcgtttgctcctcctttttaattccaaatccgcaggaatgataccaacatcttaacacacggccttgagtgccgcaatcaatttactaacaatgttcgcctttttttgcaaaacgttcgtcttttattcgccccgttccaatgccgtccgcgcttccagcgaggcctgtaggattacggcctgcaagggaacgccgttttggcgcgccgcctgggcgcagtcctcaaattcaggtttgaatttgaccgcctgcccttcgcccgccaccttgaccccgatgggcccgaaggaggtttgtgccttgagcatccgccggttcaaaatctgacgctccaaatcctgtcgccgtacccccagggtggtggtctcgcgcagcatcagcgccgataatgcttttgcccgctcgtccttgcagatgaccgagagcatggttgccggccggctctttttcatatagatcggcgtatagtatacatccagcgcccccgcctgcagcagttgctccatcacataccccatcgcctcgccagtcatatcgtccaggttacattctaaaaggcagatacggtccaacccttcgccgctttgcgcctcgcccaaaacggcgcgcagcacgcgcagtgcgccgcctttttcttctggatagagcccatagcccacggcttccatcttcatttccggcatcggcccataatcgtcacaggcctgtgcggccagcgcggccgcaagcggggtgacgccctcaccattcatagcgccagcgcacacggggatcccctttaacagcgccagcgtcagcggccgtggaaccggcagggtgcatccctcatcactgtaaacccccgtccccagcggcaagggcgataagaggatccgctctaccccgctctggcgcaaacagcaaagctgcagggcgcaaaccgccagcaggtaaacctgctttgggctggcgacctttatctccttttcttctacgctttccagcctggcgcgcacctgcaccaagcgcccaagggtatccagcgccaagcgcttggccgccggggtaagcttgcaggtatcaagcagccttttcgccgcttccagatcgcacgcctgctcatcctccacccccggtgcgtacaacgcctgaacgtaccggccagctacgcccgcgcagcgccgggtttctatttgcagcgcggcgccggggaagccgatatcaagtggttcggcattttccagatcggccagcgcgccgcaaagcatttccaggtttagccccgccccagcatccaggtaaagtacccgcatcttttatatcctcctaatgctgcatgggcatgcggttgatcatcgaagccagatagcccgcgccaaacccattgtcgatattgaccacagaaatgccgctggcgcagctgttaatcatggtcaacagtgcggaaagccctccgaaattggccccataacctacgctggtaggtacggcgatcacgggcttatccaccagcccgcccagtacgctgggcagcgccccttccattcccgccacggcgatcaccacattggcggacatgatcctatccgtatagctcagcagccggtgaataccggccacccccacgtcatagatccgctccaccttgttgccgaaggtctccgccgtaatggcggcctcctccgctaccggcatatccgatgtgcccgcggtggccactaatatatgcgtttccggcatctccaccgtctcccgcttgaccaccagtacgcgggagagcgggtcatactgcagcgggcacccctcaagctccggggcgatcttctcaaaagcttcctgagataaacgcgtacccaaaatgttgcgcgtgccccgcgccagcatgttgcgcaggatccctacgatctgcccgggcgttttgcccgcacaatagatcacttccggatagcccgtgcgcaccgccctgtggtgatccaccttggcatagcccaggtcctcaaagggcagccggcgcaactgctccatggcgctttctaaacttacgctgccggcctgtacgctttccagcagcgtccttaactcctgtgtttccatcctgttattcccccttaggtttaaggccctcgttcatacttcctgttctaaagccctgcaaatccagcgccacatagcggaagcctacctctttaaaatagtctgtgactgcctcgcgcagctcctcgtccaaaaagcggccgatctccgcttgcggcacctcgatgcgggccacctctccatgatggcgcacgcgcatctgcacaaagcccctgtccattaaaaaattctccgcccgttctacctgcaaaagcgcctccgcggtgatgggcatgccgtagggaatgcgggaagccaggcaggcataggagggtttttcagcagtagatagtccgtattgcctggacaactcccggatgtccgccttagtcagccccgcctccagcaacgggcttacaacgcccagttccttgaccgcgcgcatccccgggcggtaatcgcccaggtcgtcggcgttggccccgtccgccagcagcctaaatccctgcgccgcggcggtttcgacgatttttccaaacagggcgcgcttgcagtgatagcagcgcttctgggtgttttctcgaaagccctcgataaccagcggatcgatgaggatctccacctggcgcacatccatctttgcggccagcgcacgcgcctgctcccgctcccactgcgggcacatgatacccgccgcggtgatcgccagcacccgctcttttcccagtgcctcccgggccgcgcgcagcaaaagcgtagaatccacgccgcccgaaaaaccgaccgccaggttggggtatcccctcaatatcgccatcagcttgtcccttttataggccaattcctgcatcatgttaactcccttctccaacttatttcagcatatcacacctggcgcaaatttggaatattcacgtcgaaggcgcccgcttatcagcacagaaaatatcacccattttacacgggatgggcgatgtgcggcggcgccgttattcgttcctgttttctaacgacggaaaggccttcgagagagcataaaaatatcgttacccacaaaagatgagtaacgatattgggtgcaacattgcgctgccggaaacattgaccaaaaagataccatgagccaaggcgctgaccgaaaaagttagtaacaaagcgaatcgccgcaggcgcgccttcaagcggacagtgcgggcgcagcgtgattttttataaaaaatcggaacgagcataactcgttccgattttagaataatgttcaagtttgatagatatagaagttgggagcgatcacgatttacgtactactcacccgtttatgttatagttttctgccagcagattcatagcttttgccaacttgtgaagatagacgaaggggccaatgataatcagagaaccaagaacattccacaaccaaaaggttccagcgttaaaggtgtaaacaatacttctacgtcccaattcgttaccaattctgtttgcgattttatgattccatacaatataagcaatacctagtgtaattggtccaatcaagaaagccaacaagcagtaatgcatagttttcttaccatcataacgtgtcgcaataatattaatgtcactagatattccggaataaaataccaacggatatataccaaaagttatgattgtaagaagaataaccttctaatagacctcgattgggctttagatatccaactggacgagattgaacattgctttccataagtaacacctctctaatatagtggaaaataaaattctttttgatttaaagcaaagtaaatacttcccagtcaattatatgacattacgtcatattagtcaatacacaatatgacatactgtcattaggtgatgttatgcagaatagactgagggaattgcgcaaaaatcgaggctatgctcaagtatctttgcaaatgcaaacaggaattgatcaagcgttgctttccaaatttgaaaacggagaacgtattcctcctacagaaacacttttttgcctagcggaattttataatgtaagcatcgattacattttatgtagaaccaataaaccggaaataaacaaataaatcaggatggcttttttgtcaaggtcatcctgatttattttctaaacggattctactaatagttggacgcaccattagctgaatgctcacaatattttacaatctcaacgaaatataagtaagaaaaatcccggcctaactttatctaagttgaaccgggattttggtgccggaggccggactcgaaccggcacggtgtcgccaccggtggattttgagtccactacgtctgccaattccatcactccggcatggtaagccttatctggcaacgaaaattatcttatcataaccgccggtatttttcaagcatttttccctttgcccttgcaggttttctccacttttgcggcaaaaaccctgaaaagcgcaaaagcatgttttaactgcaacccatttttggtaaactattttcagcaacgctaaacgtgcgtgaatttttagaggggggattgttttgcagcagcgggaaaggtttggctcgcgcctgggctttatcctgatatccgccgggtgcgccattgggttgggaaacgtgtggcgctttccctacatcgtagggcaaaacggcggcgccgcctttgtactgatctatctgttctttctggtggttttgggcctgccgatcatggtgatggagttctccgtcgggcgggctagtcaaaagagcgttgccagctcttttcgtgccctggagccaaagggcagcaagtggcactggtttgggtattttgccatggcgggtaattacctgctgatgatgttttatactaccatcgccggttggatgctcgcttacctttttaaaatggcccggggcgagtttaacggtctaagcgccggccaggttcaagccgcctttcagggcctgcaggccgatcccgccgcacagatcctctggatgctgttggtggtcctgctgggctttggcgtttgttcgctgggcctgcgcaacggcgttgaaaaaatcaccaaggtgatgatgacctgtctgctggccattttgggcgtattggccgtccactccatcctgctgcccggcgcgggcgaagggctgcgcttttacctcatgccggattttggaaaaatggcgcaaagcggcgcgggcaacgtggtatttgccgccatgggacaagcctttttcacgcttagtatcggtatcggctctatggcgatcttcggtacctatatcgagaaagatcgcagcttgatgggcgaatccctgaatatcatgatactggatacctgcgtggcctttgtggcgggtctgatcatcttccccgcctgctcggcctttaatgtgcagccggacagcggccccaacctgatctttatcaccctgcccaacgtatttaacgccatggagggcggcgcgctttggggcagcctgttctttatttttatgtcctttgccgcgctttccaccgtcgtggccgtctttgaaaacatcctttcttttgcgatggatttatggagctggtcccgccgtaaggccgcgctaatcaatatcctactggtcgcggtgctctcggttccctgtgccttggggcccaatctgctaagtggtttcgcccccttcgggccgggcagcagcgtgctggacctggaggacttcatcgtcagcaacaatctgctgcctctgggcgctttggtttatctgttcttctgcgtgacccgctacggctggggctgggatcagttcatcgccgaggcggatgcgggccgcggattgaaattccctcgctggactcgcaaatacgtgacctacgtgctccccattatcgtgctgtatatcctgatccaagggtacctggataagttcctttttcattagacttttcaggataagatacgcttttaccctcactttttttgtggtatgatggggaaaaagaaaatctggcagaaaggacatttgccatgaagatcagcgaacttttaaaagaggataaggtcacgctttcctgtgagatctttccgcccaaaactggggcggctttggagaagatcgacgcggttgtacgggatatcgccgcgctgcgccccgccttcatttccgttacctacggcgcgggcggttccacctccaagcggacggcggagatctccactaaaatacaaaatcagtacggcatccccgctttggcgcatttgacctgcgtctcctctacccgcgaggagatcgccggaatgctcgcgcgctttcgcgcggaagggatcgaaaatattctggctctgcgcggcgatatcccgcaagagagcgacttcccctctcctgagcattaccactatgccagcgaattggtggaggatatccgtaggcagggagatttctgcatcggcggcgcctgctatccggaggggcatatcgagtgtgcgcacaaagaggacgatatcgactttctcaagcgcaaggtagactgcggatgcgattttctcaccacgcagatgtttttcgacaataacgtattttataattttctctaccgcgcgctggctaaggatatccgcgtgcccatcgtccctggggtcatgccggtgatcaacgccaaacagatccgccgctcctgcgagctgtccggtacggtgcttccgccccgcttcaaggccatcaccgataaatttgcggataatccgcgggcgatgaagcaggccggcatcgcctatgccaccgagcagatcatcgacctgatcgccaacggcgtcaagcatattcacttatacaccatgaaccggcccgagatcgcgtccaagatcatggacaacctctccgacatcctaggctagagaggcacgatatgattgaggtctgtacccgcgaggtattgcactatctgggctataaaaaacgggacgccgcaacgccagaggtattagcagatgtggattcctgcctgcaggagttgcgccaggccgccgcgccccgggatatttaccgtatcttcccctgccaggtggatacgcaggccggcagcgtcatgctgccctgcgctacctttaagagccgtaatctcgcccggcacattgcaggctgccaggaggcggtgctttttgcggcaacgctgggcagtggcgtggatatcctcatccaccgctacagtcagcttcagatcagccgtgcggtgatcctgcaagcctgcgccgccgccatggtcgaggccttttgcgatgcgcgccaggctgagatactaagcgccctgccgcagcggcgctacgcccggccgcgctttagcccgggttacggcgattttaccctggaaaaccaaaagacatttacagctattttagaaacgtccaagcgcatcggcctgacgttgaccgaaggggatctgatggcacccaccaaatcggtcaccgccatcatcggtctggatgaaaacccgacgcgcgccggcggcaatccctgtgccgaatgctcgctggcacactgtgcgtatcgcagactggaggaacgatagatgaaacccatcttaactgaactgggccgccggatgctgtttttcgacggcgccatgggcacattattacaggccagcggccttagggcagggcagctacccgagctgtggaatctggaacggccggagttgatctgtgatatccaccggcaatacctggcggtcggctgtgatatcctttcggccaatacctttggcgccaatgctctaaagttagcagataccggccatacagtggacgaagtggtaacggctgccgtgtctttggcgcgtcaggctatccatacctccggcaaggacggatatgtggcgctggacatcggccctaccggtaagcttctggcgcctctgggggacctgcgctttgaacaggcctacgatctttttaaagagatgatgctgcccggcgcccaggcgggcgccgatctcgtcttgatcgaaaccatgggcgacacctatgagatcaaggccgccgttttggccgccaaggaaaatacggatcttccggtatttgtcaccatgatctttgacgaaaagggacatttgttgaccggtggcgatatcgccagcgccgtcgccatgctggaggggctgggtgtagacgcgatcgggctcaactgcggtctggggccggtacagatgctgcccctgtttgagcagctccattccctgacctccctgcccatcatcgtcaaccccaacgccgggctgccccaagtggtggatggaaagaccacctacgacattatgccagacgaatttgcgcgcgccgtacataccatcgccgccaagggcgcgtggctggtgggcggctgctgcggcaccacgcccgggcacctggccgccgtggtagcgcagtgtaaggagctggcaccactgcccatcgtccctaaggggcgcacggtcatctcctcttatacgcacgcggtcagttttggcgcagaccccgtcctcattggcgagcgcatcaaccccaccgggaagcccaagctcaaaaaagcgctgcgcgagggcgatatggaatatctgctgcgcgagggcattgcccagcagcgcagcggcgcgcacgtgctggacgtcaacgtcggcctgccggatatcgacgaagtggccctgatgccccaggctgtgcgggcgctgcaaggtgtgctggacctgcctttgcagatcgataccaccaaccttgcggccatggagagcgccctgcgcatctataacggcaaggcgctgatcaactcggtcaacggtaaagaagagagcatgcaggctatctttccgctggtcaaaaagtacggcggctgcgttatcgcacttacgctggacgagagcggcatcccggaaacggctcagggccgattggccattgcccgaaagattctagccgtcgcgcaaagctacggcattggtaaagaagatattatctttgatgcgctggcgctgaccatcagcgcggatcagcaggccgcgcaggtcacgctgcagacccttgctgcgatccgccgggagctgggcgcttatacctcgcttggggtctccaatatttcctttggtctgccccagcgcgaaaatatcaacgcggcattctttaccatggcgctgcaaagcgggctgaacgccgccatcatcaaccccaacaacgcggcgatgatgaaggcgtatgacgcctaccgcgccctggcggggctggacgaccaatgcatggactatattgcccactactcggctgaaagcccggcgcccagcacagcccccgctatgcaggccctttccctgcgcgaggcggtgctgcgcggcttgcaggagagcgccgcccaggccgctggcgaaatgctggcctctaccccgccgcttgagatcatccacgacagcctgatcccggcgctggatcaggtgggccaggcctttgagaagggcacgctctttcttcctcagcttctcatgagcgcggaggcagccaaggccgcttttgaggtgattcgcgtccagctggaggcccagggcagcagcgcgcaagccaaaaaggagaagatcattctggccacggtcaagggtgatatccatgacattgggaagaacatcgttaaagttctgctggaaaactacggttacgatgtaatcgatctgggcaaggatgtagaccccgagtgcatcgtggcggcagcgcgggatcaggacgtgcgcctggtggggctaagtgctttaatgactaccaccgtcgtcaacatggaggaagcgatcagccgtctgcacgctgcgctgccaaagtgcaaggtgatggtgggcggcgcggtgctcacccagcgctatgcggatatgatccacgcggatttctattccggcgacgccatgggcgccgtacggtatgctgaaacgttgtttgggaaagaataatactaattataggtaaataataaaaggcagacgacacgttgtctgccttttattaaccgcactataccgattatacatgcaattctcaatcatgtaggtaaatacctattttgatatttaaccagttccctttgaattccttttccgtaatcttaccaaataataccttccccgcgtccatcaatcttgcgaagataatattgtctctacggggcgcatagccaattttggccccatcgctgcttttaattactattgcctgttcatcatatggattatcaggttcgcgtagaaaagataatctgtccccaatttttaatagtggctctaatttttccatgtccttaacatgagatgttcccgcaacataggtgtcaaagagaaaaatatctctttcaaaaggttggggtattgccaaacctgtttttccatgtaaaatagccgcaattgtgccactattggccttcatcaaatcagccattttattcctccatcaaagaactgatcctttccgtgtacaatcgtatagtatcattatagtgcttgaacaatgtctgcaattctaagcgatactcctccacttgttcagaattttgtaaaaagtccttcattgtgtagggaaactcacactttatccttcgaatatcccgccttactttttcaagcgcagacaataggcgctctttttctcttttcagctgtgctggtctgttgtcttgttcttccagtaacgcttcgccctctaacatttcttcaatcaaccgaatcgttgctaaatcaccattttcgtaagctgtcaccgccgtttgaaatagctgaagttgctcgggcgcagcgccgggattcaaatccggatgaagcgctttaacgattctatggtatcttttttttagctcgttctcctccgcctttgacagaaacggaccgttgctccgttccactgccgcattaattttgctgatccattcatttaaccgtttttgatagttttgaaattcatgctctagctgagcgtcaatttccgatagcgacacgatttcctggcggttgagactggcctgaatcagatcgattttacgtttcaagcgcaaagcatcacactgtgctttatataccttatattcaaggcttccaaaagccaatacgtatgccatttctaaattagggcagatagtataaaggagctcatccctttccaaaaccgccaaagtcaattggctgcggaggttttcaatttcaacttttgttttttcattgtcaggaaatataatgatattgtcatttaaaggtcttctttcaagcatgacgcatcactcatcctttgcaacctgaagatacaccattaatattattataccataaatcagaataccgctgctatctgtatacatcaatagcgcgaaaaaacaaagcgcggaaaaggaattgcttcctttccgcgcttttggttttaacagctaaaacacgatgggataagcctgttccaccaggtcgtccagtaccaccatagccagcgggcgtcccttggagaatcggttttcgatcaagatcatctcagtgggtacgttggtcatcaatccgcttttttgcaccaacaccagttcctccggctcctgtacgtaatggacgaataccagcgcctggccattgaccccgttctttttaaagtcgatggttttgacgcccttaccccctctgccctgcggctcgtaatccaccgccaggctgcgttttccatatcccttatcggagatcaccacgatctcgccctcctcgccaacctggcgcgcgaagatcacttgatccccatggctcagggcgatggcctttacgccgctggccgtacgccccatcgccgaaacttgatcctgtccaaagcagatgctcatgccatttttcgtaatcagcaggcagcgggcatccggccgggcgaactccaccgctaccacctggtcgttatttttaagcccgcaggcctgaaaagcctttttccgaatattatattgctcatacagcgattttttgaccattccgtctcgggtgaaaaagagcagttcctgactaaaatccaccgcgggcaacagcgccacgaccgtttcattcttcttgagctccggtatgaagttggcgatgggcacgcccctgtcccgccacttgccatcgggcagatcctcaacattgataaacccggcgtttccaaggttggtaaaggctaacatgcgttcgttggtcttcatgggcaagacctgcaccacatggtcgccctgcacggcgccgctctcctgcgcgcggttggccttttggtacagccgatctgccacgcgcttgatcgcgccgttggccgtgcgcaccacgacggtatcctcgacgatcacctcatcgccctgggccggctccacctcgtcctcggtattgaggaactgggtcagccgcggggtggcgtatttgtccctaatctcctttagctcttttttgatcacgcccatcagccgccgctcggaggacaaaatggcttccagttctgcgatcaaagccaaaattttattgtattccttttccagattctcgatctccagcgctgtcagccgctgcaagcgcatatccaaaatagcctgggcctgtacttcgcttaaggcgaaccgctcgatcagccgcgccttcgcctccttaggattctgactggagcggatgatgcggatcacctcgtcgatgttgcgcacggcgatcatcaggcccgctaaaatatgctcccgcgccttggcctgctcaaggtcgtgccttgtgcggcgggtcaccacatccttttggtgggcaatataaatgcggttgatctccagcaaccccagctgctgcgggcggccatcggcaatggcgaccatattgatgccaaaggtcacctgcagttgagagtatttatacaggtaggccagcaccttttcctcgtccgtatcccgacgcagttcgatcaccgcgcgcataccctcccggtcggattcatcgcggatatccgtaatggcggagagcacgccctttttatcctcccgcagcttgaggatcttttccagcaaagccgccttattgacctggtagggcagttcggtgatgacgatgttctttttgccgtttttcagttgctctacaaacagccgcgcgcgtagcttaatgcgcccccgcccggtggcataggcttgttccagctcgccgccctccaagatgtatcctcccgtagggaaatccggccccttgacaatgtccatcatctcttgcagggtgatcttgggcttgtcgatctgggcaatcaccccatcgatggcctcgcccatattgtggggcgggatgttggtggccagtcccaccgcgataccggaggcgccgttgaccagcagattggggaaccgaccgggcagcatgtccggctcttttaaagtatcgtcaaagttcaggctccaccgcaccgtatctttatcgatatcacgcagcaattccaacgccggcggcgccatgcgcgcctcggtataccgcatggccgcagccgagtcgccatctaccgagccaaaattaccatgtccgtccaccagcggcgcgcgcatattaaagccctgggccatacgcaccagcgcgtcgtacaccgaagtatcgccatgggggtggtatttacccaaacaatcgcccacgatgcgggcgcatttgcggtaaggcttatccggcgtcatgcccaactcgtacatggtatagaggatgcgccgctgtacgggctttaagccatcctccactctgggcagcgcccggtccagtatgacgtattccgcatagggaatcatggaggaatgcatcacttcctccatggactggtaaaagatattttcatccttctgctgaggaataggctctacctttctcttttttgccatattctatcgcgcctcccgctgggcaaacgtatcgaccttattaaagtccgcgtgctcgctgatatagatcttgcgtttttccaccttttcacccatcaaggtggtgaccaaccaatcggcctcggccgcatcgtcaatggtcacccgcaccatggtgcgctgctcggggttcagggtggtgtcccacagctgctcggggttcatctcccccaggcctttataccgctgcagggtgtagcccttgcccaccttgcggatggcatcgttcagctccttatcgctataggcatagatcgtagtctttccccgcgccaccttgtacagcggcggcatgccgatatacacatgtccttgagagatcaactcgcgcatatagcggaaaaagaaggtcagtaggattgcgcggatgtgcgcgccgtcctgatccgcatctgaaaggatgatgaccttgtcatacttcagcgcgttaatgtcaaaatcttcatcaatgccggtacccagcgccgtaatgatcgtgcggcattcgtcgttagccagcacctcgtccagccgctttttctcggcattaagcggtttgccccgcagcggcaaaatggcttggaagcgccggtccctgccctgtttggctgagccgccggccgaatccccctctacgatgaacagctcgttgaccgtcggatccttgccaatgcagctggccagcttgcctaccagcggcgcgccctccaagctattctttttgcgggcgatatccttggccttgcgggccgcctcccttacccgagccgcttgcaccgctttttccagcaccgcactcgccgcggcctggttgcggatatcctctaaatacagggtcagttgctcggcgatcacaccctccaccgccggacgtgcctcggtattgcccagcttggtcttggtctgcccctcgaactggatattctgcattttgactgagagcaccgccgtcatgccctcgcggaagtcgtcccctgtcaggttattgtccttctcctttaaaataccgttcttgcgggcaaactcgttgaacacccgggtaatggccgctttaaagccggtctcatgggtgccgccctcggtggtggggatgttattgacgtaggagaacaggttgtccgaataggcgtccgtatattgaatggccgcctctacatatatattatcccgcttgccggtcagaaagatgggcggctggtaaagcggcgtgcgatcctggttgagataggtcacaaagtccgacaggccgcctttaaagtgatactctcgccgcttataagctccatcctcccgctcgcgctcatcggtcaagcggatacacaggttgttattgagaaaagccaggtcgcgcaggcgacggctgatagtctcaaaactgtaatgggtcgattcaaaaacccgtggatcgggcttataggtgatggacgagccgcgtttgcgggtattgcctactttctgcagcggccccttaggcacgccagaggagaccttgccggtcttttcgttataaatgctagcaaattcctggcgatagatatagccatccttatagacctcgcaggtcagccattcgctaagggcgttgaccaccgaggcgcccacgccgtgcagaccgccggaataattataattatgcgcatcaaatttaccgcccgcatgcagctgggtaaagaccacctgcacaccggataccccgagctttggatggatatccaccgggataccccggccgttatccgtcaccgttacgctgccgtctttatgcagggtcacagtgaccagatcgccaaagccattggccacctcgtcgatgccgttgtccacgatctcccagagcaggtggtgcagcccccgggaacccgtggagccaatatacatgcccgggcgcatccgtaccgcgtccaggccctccaacacttggatatcgctggaaccatactcgctagccatcaatccgtctccttttaagccaaaatgcccgcaacaccagatgctgtgggccttccctttttattccacaagatattattataagctaccccgccacatttcgcaacttctaacgttcaaatccaaaatagcataaaaaaaggaacggtgaaattcaccgctccttttgtatcaacccttttactgcttagatgtatttcttacgcgcagcatagtgcgtgtgcagcagctgatgggccagatgactgttgggctcgcccaggaactcctcatacagcttcttgatggaggggttctcgtggctcttgcggatggtcatcgcctcgtcctcgtcgtagattgccgcggcgcgaacctttttgggatccacatccatcttcacgcgagccgaaacgatgggctggccgccaccggtcacgcagccgccggggcagcccatgacctcgatgaactggtaatcagcctcgccggcgcgaaccttttccagcagctttttggcgttgcccgtaccatgcgccacggccacgcgcaccttggtgccgtccagatccacttcggcttccttcacgcccgcgataccgcgaacatccttgaagtccacatcctccagctctttaccggtcacgacctcgtaaacggtacgcagagccgcttccattacaccgccggtagcgccaaagatagccgcagcgccggtggaatcgcccagcacctcgtcaaactgctcatccggcaggttcacaaaatcgataccggcttctttgatcatccgcgcaagctcgcgggtggtgatgacggcatccacatcttcgtggccctccacctccatctcgggacgctggcgctcaaactttttagccgtgcagggcataaccgaaacggtgaagatcttcgccggatcaatgttgttctgcttggcatagtagctcttgatgatagcgcccagcatctgatgggggctcttgcagctagacaggttatccaggaagtccgggaagaagtgctcgcagtacttgatccagcccgggctgcaggaggtaatcatcggcagcttgccaccgtttttcaagcggttgatcagctcggtgccctcttccataatggtcaggtccgcgccgaagttggtgtcaaacaccttatcaaagcccaggcggcgcagcgcagcggccatcttgccggtcacacgggtgcccatgggcatgccgaactcctcgcccagcgcaacgcgcacggcaggggccggctgcacgaccacgtgcttatccgggtcggcaatcgcttcccacacgcggtcggtatcgtctttctcacgcagcgcacccactgggcaggccgcaatacactgcccgcaattgatgcagggcacttcgccgatgttcttgttgaatgccggctcgatgatcgtgccaaagccgcggttggtagcgccgatcacgccgatcttctgcacattgtggcagacagcagcgcagcggcggcacagaatacacttattggcatcccgcacgatggacggagacgagaaatcgtcgatgggatactcgttgcgtttcccctcaaagcggatctcctttacgcccatctcctcggccaagcgctgcagctcgcagttctggttgcgtacgcaggtcaagcagttgcggtcgtgattggagagcaaaagctccaggttcatcttgcgcgcctcgcgcaccttgggcgtattggtcttcaccaccatgccctcggctaccggcatcacacaggcggcggacagcgcacgcgcgccggtatccaccatgcagatacggcaggcgccaatggcgttgacctcttttaaatagcacagcgtaggtatattgatattggcctgacgggcggcattgagcaccgtggtgccggcgggcacctggacttttacgccgtcaatagtcaaattgatcatatccattattgtctttccctcccaaaacagtttgattatttacggctgatcgccttgaaggggcatttttcgatacaggcgccgcacttaatgcacttggcagtatcaatggtgaacggctccttcaccttaccggtgatggcgcccgccgggcaggacttggcgcacaggctgcaaccgcggcacttctcaggatcgatcgagtagttcagcagtttgcggcaatggccggccgggcagcgcttctcgcggatatgcgcctcatactcatcgcggaagtggcggatggtggagagcaccgggttaggcgccgtctgacccaagccgcaaagcgcggtagccttgatgttctcggccagctgctccaggcgctcgatgtcgccttcctcgcctttaccctcgacgatgcgctccaggatctccagcatacgccgggtaccgatacggcagggcgtgcacttaccgcaggactcgtccaccgtgaagtccaggaagaagcgcgcgatgtcgaccatgcagttatcctcgtccataacgatcaaaccgccggaacccatcatcgaacccgcttcgatcagggaatcatagtcgatcttgatatccagcatgctggcagggatgcagccgccggaggggccgcccgtctgggccgctttgaatttcttgccgttggggataccgccgccgatgtcgtagatgacctcgcgcagcgacgtgcccatggggatctccaccaggccggtgttgttaatcttgccgcccagcgcgaataccttggtgcccttggagcgctccgtccccatggcggcaaaccaatcggcgccgttgaggatgatctgcgctacgttggcataggtctcaacgttattgagcagtgtgggcttgccaaacagacccttcacagccgggaacggcggacgggtacgcggctcgccgcggaagccctcgatagaagccatcagtgccgtctcctcgccgcagacgaacgcgccggcgcccaaacgaacttcaatgtcgaagttgaagccggtatcaaagatgttctcgcccagcaggcccatggcccgcgcctggctgatggcgatctccagacgttttacagctataggatactccgcacggcaataaatatacccctgatccgcaccgacggcatagccggcaatcgccatagcctccagcaccgcgtgggggtcgccctccaataccgaacgatccataaatgcgcccgggtcgccctcgtcggcgttacaggctacatacttcttatcgcccaccgcatcgtgggtaaactgccacttgcgcccggtggggaagcccgcgccgccgcggccgcgcaagccggatttcaaaatctcgtcgatgacttcctgctgggtcatctccgtcaaagccttagccagcgcgcggtaaccgtcaaaggcgatgtactcttcgatcttttcaggatcgatcacgccgcagttgcgcagcgctacgcgcttttgctttttatagaattcgatctcgttcagggacacttcgacctcttcgccggcgctttcgtgatgcagcaggtgctgcacaatgcggcccttgaccaggtgctcctgcacgatctcttcaacattctcttcttttacgcgggcataaaaagccccttcaggataaacgataaccaccgggcccatttcgcacaggccaaaacaaccggtacgtacaaccttgatctctttatccaagccggccttggcgatctgctcttcaaacagttcaatcaggcgcggggacccggaagaagtacaccccgtacctccacaaaccagaacatgcgcgcgatacaactccatgtctgataacctcctcaaaaattcctaaccccaagcgggcgttgtttatttatttgcctcggcatagccgatggtgtactcttccacaacctggccgttgacgatatgatcgttgaccaccttcgccactttgtccggcgtcatgtgcacataggtaactttctcgttgttgggcgcatagacctcaacgatgggctccaagcggcatacgccgatgcagccggtctgggagaccgtcacatcctgcagatggcgcttattgacctcctccataaactggagcagcacagggcgcgcaccagcggcaataccgcaggtggccatgcccacaacgatacgcgtgccttcgcgatccttacggatgttgacctgttccaacgtgcgcttgcggatctcttctaattccttaatggacttcattccaatacacctccgtttagtgaatcaataccttcttgcaaatattcctgcatccaggatacgacctgcggcgtttccagcggcacatcgtcgcccagctgctggcgaatctccctcgtgtcaaacacgaaggcatcgccatctaccccataggcaaatacaaagtcgatcagcggattacacatcacaagcgaaacaaccgttccggccaggtcccccatcggcggccggtcgatattgctcagctgataagtcgcctggacgaccgtccccacgccgacctgcgagcggatggaaaagcttccgccgctgcgctcggccccagctttaaaaagtgggatacccaggccgaccttgcgggtcgtccgcgtcgtggtaaatgggctggtcacccgcgccaccatctcttcactcatgcctttgccgtcgtcctcaacctcaatggtcaacaggtcttcagcgtggctaacggtaaagcggatctgcaccagcttggcattggccaccaccgagttttgcgcaatatccaaaatgtgcagggataaatctttcatctcaatctaacgaccttatttcgtgcggtacttggcgatgatgccggggatatcgtcctcggtcaaccggccgtacacgtcgtcattgatcatcatgacgggggccaggccgcaggcacccaagcagcgcgtagcttccaaagtgaacttgccatcgggcgtggtcttgcccacgggcacatccagttccttgcaaagggcatccagcaccttttgcgagcccttaacgtagcacgcggtacccatgcaaacgccgatggcgtactcgcccttgggttccaggctgaactgggcatagaaagtggcgacgccgtaaacgtcagacaacggaacctccagcccctcggcgatgaagttctgaacttcgatcggcaggtagccaaagagatcctgtgccttctgcatgaccggcatcaggggcccttctttccccttatactggtcaatgacggcttggagctgttcatacagttccttgttctcacagcttgacatctcgtttaaccctccttattcatatacacccgcttgtccccgaagggacctcacgaaaaattgataaaaaattatcaataatcgacgcattatattctatcataaccatcgacaagatgcatcttttttttcttttttccgcgaaaaaatccggcaaattaaccaatattaccgcttttttccttcaaccggcggatgacggccgcaaccgagcgctcctgcacgcgcaaaaagttatcccgctccaatatcgcgcccaaatcatgcgcatctgaggagtagatcgtgcggtaccccccgatcccctcgggcgagggagcaaggcgggaaacctccagcgtggtcaccggcagtccgggcgggataaagcccaggttgtaaagcaaactattggcctgacggttgacatgcgccggaaccatggcaccccccatcgccaataccttctggcagacctcgtcgatcgacaacgtggtggactggagcagcagcctcggctcatcccccacgcggcagtcctcctcgtccatgagccactgctcgccaaacagctggggcatggcgggcatatccggcaaaaaccggtaatgccaatcgtcaaactcctccagcaggtcaaagtccggaaaatagcagagcagatgcacatcctcccgggattgggcctccatacccggaaggaccagaacgccgtactcttcggcagcgcgggccacggcgcgggcattttgggcccggttatggtcggtcacggcgatcatatccagctgctttaacatcgccatacccgcgatgttgttgggcgtcatatcccgctcggcacagggtgacaggcaggaatggatgtgtagatctactgccaggctttccatacggattaatcctgtccggcgttttcgcgcaacccagcctcgtagagcaggccgcaaagttcaaaggcggtcttggaactggaaagcacgcacacgccctcgtctttggctttttctaaagatacttcctccaccgcgatcccctcgggtacgatcacgcaccccagatccagcagcgtagccaccgcgatcacgttcagatgggtctgcactgtaacccaagcgccgccagccttagcgtgcgccatcacaaaactgagcaggtcgcacacgtggcccgaggtgatctcccgctccatgtcctccccggccaccagcacctggctatccgtcaattccactacatcgcacaacttcataacatttccacccttcgtttatacaaattgcaataatactcgcttttatgcccggatcagtttggcaaacaggtcctcaaacaccttatcccgccgcacgtaaagcgcctggcggatcaggtgccggcgcgggtcgtaaccataggtatgctccgccgttatgatggggctatggatcagcgccgtatcgatccagtcttcttctcccaccagataggcaatggtcacgatatcccaaatctctttgctccagaccttgcccataccctcgaataccgcctggccgcaggtgatctcgtaaagataatcccccaaggggctctttcccttgaggtagtgccgcaactccggctccgtggtcagcagatgactggtcacaccccaggccggaagctgtaccagaggcacgccgcaatcgaataccacactgaccgagagggtatcctgcatacagttaaactccaggttatccggccagcccggcgcattcccgcccagccagaccactaccatctttttaataatctcaggcgccatcaagatggccgaggccacattggtcagcgcgccgatggccacgacatagagcacctcgccctccggcagggcccttatccgggcgatcagatccttggcggcgtccgaggggacggggtggcgcaggtcttttaaataggcgcgcgagccgcggtaaacccgggcctttaaatcttcacggcccaaaagctccagcacatgcagaatctccgcatagctcttttccatcccgatatcgggcgtggccgccttcaggttagaaaagggggctgcatacaccgcctgcaggtcgatccgctccggcgaaagcaccgcgtaggagagggcgtactggtcgtccacctcgttaaaggtatcggtatccagcacagccttaatcctgccgctgggccgttccagccgcgccaggcgcgtagccgcatcgatcctagggtaagttatcgcttcttgcatcgctgcacgctcctttacaggttttgcatattggacaggtcgatcatctgctgcgccagcgactggaccttttcgcgcatcttaaagatgcaatccatctccaccgcctggccgcggacgatatcctcagccagcgcctggcagctgggtgcgccgcaggagccgcaatccagccctggcagctctttggtcagcttttccatcatttccatctttttcagcgccacagccaggttatcatccagctgcatcaccgccttgggcttgatgggcttttcgctgcggatatcgtactcccgcaggtattcctccatcaggtcggcgtccatctcccgtcgttctaagccttccgccagcttgcggatgcggtttttggccacgtatccattttcaaagaccagcgggccgcccacgcagccgccgttgcaggccagcgcctcaaaaaagtccaggtcgttcaaattcccgttctcgatctcttccaacacccgaatcacgttatccacgccgtcaaccgccagcgtagcctcgcacccggaagcgatggattcgccccccgcgttggcccagctcacccccaggaaggaggccttttgctggggcacctcgtcatccgcctccgggcggctgagttggctggagagcagtccatacatctccagaatcgaaatcgccccatctaccgcgctcttttccacgctcagcggcgcgcggatactggtcatcttcgccgcgcagggggtgatgaagaatacgcccacatctttggggtcggccccggtctgctcgcagtattgatccttggcgatgcgcgcggccacctccatgggcgactgaatgtcgataatatgctccaacagctcgggaaagcgcacctggatcagccgcacaacagccgggcaggccgaagagatcaacggctttttaagctgcttcccctccgccatcagctttttggtataataagagaccacatcggcccccagggccacttcaaacaccgcgtcaaagccgatgttttttaaaccccagaggatgcggtcgatactctgtaactttttaaactgcccgtacagtgtgggcgcgggcagcgcgatcctgtgtttaaaacggttaatcgtggccaacggatcggtgcgggcaaccttggcatggtaaggacaaacgcggatgcactccccacaatcgatgcaacgctgttcgataatcgtagctttgccttctcgcacgcggatggcttcggtagggcaacgcttgatgcagttggtgcatcctttgcacttgtcccgatccagcgtgacagaatggctgtagtgttcggaagccggcattgacacccttccccctttatctatctgtattgttaaatacttttgcaactagaatagaaagctcatgctgatctccgtccccgcagggctggagctgatgctgaaatggtcggcgcagcgcttcatattcggcaggcccatgccggcgccaaagcccaactggcgcacgctctccggagctgttgaaaagccctcgctcatggccaggtccacattttcaatgcccggacccacgtctttactggtcaggtgggcgccgtgctcatccaccgcaaagaccagctcgccccccagcgaatggatcaccaggttcagttccgcctcataggcggcgatggagaccttgcgtacgatctctgaattgattcccaactgcttaagggtacgtttgatgcggctggaggcttctcccgccgtcacaaaattacgggcctctaccggaaaggcttccataaaggtggccgcttcatgctcgtgctgcacgtatctcaccccttcatccgttcgctgcccggcaggccgctttgatagagcaggccgcaggcgacatatagtgtatccggcgtggtcagcaccacgatatcccgttccatggccatatccaaaatctcctgcgtgggcagcttgccccgcacaaagacgatgaccaacacgtccagcatctcggcagtgcgcaccacgtggggattgatcaaccccgttaaaagcacgcttttctccttgacgtaggccagcacgtcgctcatcaaatctgcgccgcaggccgaaagcactgtctgatctaccagatgttctccacaaagcaccctggcatccaacaaatcgactacgtcctgaatcgtcaaatccgcccacccctttttctcgcgtagaatcgctacattgcgccaatatcctgtaaatactgccgccagctgtatgcgcttttgatataattataatgtattgtctgggaaactgccataccctgcgcggcattttgggtagttatttcttccagcccatcggtaaactgggtaaagaccgagagcagcagggaaaagactttttgagaggcctcctcgcccagcccgttttgcagcttttcctgcatttgcaaaaatgcctcccgcagcgccggagcctgctccatgctgctttcgggctgagcgacccaggcgcccatcttttccatgccgtcctgccagaggatatacgcctccccgatcaagtccagctgtgtttcctgggccgtaatgttcagtttgagcttgggcagcgccagcgtatagaccaccgcgtcgacgccctgctcccggctttgcgccatcacctgctctgcggcctctttggtagcataagcgccgataaatacccggtgattctgctcgtcgggagagacaaagcccgctccgccctggttgcgcagctgatcggccaacagcgtggcgtttccctcgtctgcaaatgtgccggcctgcaaaaggtacagcgtcatagccggcacctctaccgggctggtcttgcgcccatcctccccctccgggctgggcgtggctgcggcttgggtcggttgcgcgggggtaagctgggcctgatccgtcgcatccgcttctgctccgctaaaataggccacgatcggggctacaacgctttgcgccagccaattgccgatggacccggcgctgacgatgtacaccacgattaggatcactgcgataatcagcgggatcaggcgtttggccgcgcctgtaccgccgcctgcgtccctggcccggtaggctgctgcggcacgcccgcggtatggctgccgcctgcggtttcggctgggttgatagcggctcattatttcctcatcctctccatcacgatcttaggtattatatggccgcgttataacccatatgttcggcgcccgtaaaatgctttgcatattggctgcccgcccgttataatagggcttattaaggggggatgtatatatgaaatatcatatcgataccatcccggtttgggatgcctataaggccgactgcgagtgccccatgtgcctgattcgccgcaaatgcgagctggactttatcgattcctttctagggggctcggtcatggagccggatacccgcatcgaagtcaacgccaagggcttttgccaggaacacctgcaccagctctacttacagaaaaatcggttggggctggcgctcatgacccataccaatatgttggaggccaacgaagtcgcccaggaaggctttgcaaagatcgaggcggcgctaaacggggcgccgtccggcaaaaaactcttccgcccctccaagaccgatgagaagaccgcccagactattgcccaggtggcccaaaccatccgcgcgcgcacccagagctgcatcatctgccagcggctggacagcctgatggatcgctatttttatacgctgatgtatatgtatgaacacgaggcggaatttcgcaaggcttttgcccaatccaagggaatgtgccgtcctcatctggccgacgcgctggaatacgcggtcaagcacctcaagcccgatctggccaaggcgtttatcaccgagcttttggccgctcagcgggagaacgacaagcggatcgccgatgagctgtatgcctttaccaccatgttcgactaccgcaatcagggcaaaacctttggcaatgcgcgggacgccctgccgcgcgccatcaaccgcgtgcgcgggctgaccttccccgaggataaaaaagagtagcggtcgaatcgccttatagcaaaacccccttcccgacgaaagccgggaagggggtttcattcctttacaacatttattctaccggtttttccaggcggtagcgggcgatgacctgatggacgaaggagtaattggccccgcacaggcgcgcgatctctcccaccgtatagccctgctcgtacagatgctggaacatcaggctcttggtcttaaaggcaaccgtttcgcccgtggaggaaaggatcagcgatttaccgccggcaaagccgtattccggccgcccttcttcatcgatgttgacgccgtactgctccaccaggataccggcctcccgcaggatctccgccgaaaaaggatcgggatagggattttggtagacgatgcgccggatgccggcgttaatgatcagcttagcgcagatggtgcagggctgatgtgtacagtagagcgtggccccatccaccgcgatacccagcttagacgcctggatcagcgcgttctgctcggcgtgtatggcatagcaaagctcgtgccgggtgcccgaggcgatccccatcttccggcgcaggcactccccccgctccacacaggacttgatgcccgcaggcgcgccgttataaccggtggtaatgatgcgccggtcccgcacgatgatcgcgcccatcttccgattttcttgatagcagctcgaccattccgaaatcggccctaaaagcttgataaagcgatgatcccacttatccaatctccgtcccccctagtcgcaaattatttgatttgtagcgccatttgtatatagctttatccattataaagctattttacagcatgcggttgcgcctgtaaaggttttccctgaaaaacttgatttatctgaatttcaaagcaaaacggagagattgatggatttattcaatataaccgccgattttgcccgaaaatcgaatttgattggtaaatttaacaaatgtttccggttgcctcttttcaacgttttggcgataataagagttgtgattagcactcaaccaagatgagtgctaacaggaggaaaacaataaacggattacattataaggaggaaagaacatgactatcaaaccgttgtttgacaaagttgttctcaaggctgtggaaacggaagagaccacgcagagcggcatcgtattgccgggcaccgctaaggaaaagccccagatggccgaggtagtggccgtgggccccggcggcgttgtggacggcaaggacgtcgttatgcaggtgaaagaaggccagaaagtgatctactccaagtacgccggcaacgatgtgaagctagacgatacggagtacgtcatcatccgtcagagcgatatcctggctgtggttgaataaatcaagaaggcttaccgataaaaggaggaactatcaatggcgaaacagatcatttacggcgaagacgcgcgccgtgcccttgaaaaaggcgtcaatcagctgagcgatacggtaaagatcaccctgggccccaagggccgcaacgtggtgctggataaaaagttcggcgctcccctcatcaccaatgacggcgtgaccatcgccaaggagatcgagctggaagatccctttgagaatatgggcgcccagctggttaaagaggtatccaccaagaccaacgacatcgctggcgacggtaccaccaccgccaccgtgttggcccaggccatcattcatgagggcatcaaaaacatcgccgcgggcgccaatcccatggtgctgcaaaagggcatcagcaaggccacccaggccgctgttgaggccatcaaggccgtgagcaaacccatcgagggcaagcaggccattgcccaggttgccaccgtctcctctgccgatgagatgatcggcgagctgatcagcgacgcgatggaaaaagtgggcaacgacggcgttatcaccgttgaagagtccaagaccatgaagaccgagctgaacatcgtagaaggtatgcagtttgaccgcggctatacctccgcttacatggtaacggataccgacaagatggaagcgaatctggataatccgctgatcctgatcaccgagaagaagatcagcaatattcaggagattctccccgtgcttgagcaggtggtgcagcagagccgcaaactgctgatcatcgccgaggatatcgagggcgaagcgctggcgaccctggtcatgaacaagctgcgcggcactttcacctgcgttgcggtcaaggcccccggctttggcgatcgccgtaaggctatgctgcaggatatcgcgatcctcaccggcggtcaggtcatttccgacgagctgggcatggatctgaaagagaccaccatcgacatgctgggccaggcccgtcaggtcaaggtggataaggacaacaccaccatcgtagagggcgctggcgatccttccgagatcaaggcccgtgtctcctccatccgcgcgcagattgaggaaaccacctcggattatgatcgcgagaagctccaggagcgtctggcgaagctggccggcggcgtagcggtgatccaggtcggcgctgccaccgagatcgagatgaaagagcgcaagctgcgcatcgaggacgcgctgaacgcgacccgcgccgctgtagaagagggcatcgtcccgggcggcggcaccgtgctgatcaatgccatccccgctgtggctgccctgatcaaggatgcctccggcgatgagaagaccggtatgcagatcatcctgcgcgcgttggaagagcctgtacgccagatcgcggccaacgccggcctggaaggctccgtcatcgtcgagaacatcaagagcaacggcacggtgggctatggctacgatgccgcccgcgatgagtatggcgatatggtggccaagggcattttggatcccacgaaggtcacccgttctgccctgcagaacgcggccagcgttgcagcgatggtgctgaccaccgagtccctggtggcggacatccccgctcccgaaccggccgccccggctggtgctggcgccggcatgcccccgatgtattaagccgagcataaagcaatcaatcaaaaaggctttgcccatttaagggcaaagcctttttcttatcttcgcatcgccaattgacgcttttccggttcttcctaagcgatgaatccctgtagcggttcaaaaaggcgctctacttccacaccgtatccttgacgccaatatcctctcccctgaaagtaagaggacgtcccagccgcctttgctgttcataatgatccagcgcctttagcgccaccttgcccagcaggaagatcacgataatattgacgatcgccataaagcccatggtaatatcggccaggttccataccagggcaaaatccgcctgggcgcctaaaaatatcgccagcacgcaggtcaacctaaaggcaaataacagttttttgttgttcttgataaacaggatattggactctgcataataataattccccaccagactgctgaaagcaaaggcaaaaatggaaaaggtgataaaatggatgccccattcccctacattggcgctgatagcagcctgcacgtatgggataccatccagcacaccgcttaccccctccacacccgaaaccagcaacatcatcgcggtgctggagcagatcagcagcgtatcgataaatacggagattacctgaaccaggccctgcttgaccggatggctgacatccgccgatgcagaagcgttaggcgcgctgcccatgcctgcctcattggagaacaagccgcgtttgatgccgatgaccaccgcactgcccgccaaaccgcccgcgatggcgttaaaatcaaaagcgttttggaggatgacctctaataccgccggcaattcggtaatgtgcagcgccatggtgatcaatccgatcagaatgtacgctgtggccatgaccggcaccaataccgaggtaataaagccgatccggtgcacgccgccccaaatcaccaaaccagttgcgacggccaggagcagccccactaccagcgggaaaatcgtctgcgagtagtcagggatgtaataggccagcgccgaggatatgttataggactgcaacccgttaaacccgtaagcaaagcacaggatcagcaggatggaaaacaaaatgcccaaccaccgcttgcccagtgcccgctccatataatacgaagggccgcccctgaactggccgttttcctttactttgtagatctgtgccagcgtgctctcgataaaagccgacgcgccgccgataacggccatcagccacatccagaatactgcccccgggccgccggcggcgatcgccgtggcgatgcccgcgatattccccgtgcccacgcgcgaggctgtagaaatcatcagcgcctggaaggaggacaccttcttttcgcccttttccggaccgccgtccttctccatcaaggatttgatcccgtcttttaaaagccggacctgcgcaccccgcgtgcggaccgtaaaatagacgcctacccctaccagcaggatgatcagcacataggtgtacataaaatcgttgatctgcgttaaaacttcgttcataccccgtctcccgcgcaatattttgccccgcacggtctctcctccgcccggggcttaaaatatattataatcgctggacaggcatccgtaaaggacagaaaggaggctttagaggctgattccgcgctaaaacaaaagaaaaatcggagcaaagcgaactttgctccgactctggtctgggtgagaggattcgaacctccggcctcttgaaccccattcaagcacgctaccaaactgcgccacacccagaaatactctcgcccgcaaagcgagtgctttattatgataacaccgggcccataatttgtcaacgggataatggaaaaaagaccaccgctcatgcaccttttttgccgcaggaccgtagatatagagggaaaaggagggcgatgccatgcaagaactagcctatcgccgccaagatgcggtggcctatgccagaacgtgggcatttaagcgcaacccggcctatcttgattttgaaaacctggggggagactgcaccaactatgcctcccaatgcctgtacgcgggcagcggcgtcatgaatcctaccaaaacatttggctggtattattatagcgcggggcagcgcacggcctcttggacgggcgtgcagtacttgtataattttctcattggcaatcaggggatcgggccctatgcgcagctcgcccagcgggacgaggtgcagatcggagatatcgtgcagctgggggatgagagcggacacttttatcattcgccgattatcgtcgggcttgcggatggcgaagtttatgtggccgcacactcctatgatgcctatatgcggccgctgagcagctatagctttgcacaggcgcgctttttacatatcctggccgtgcgccactaaaagataaagagtcgttgtatgatgcttaaagaccaggaacaaaaaagaggccggatgaaccatccggcctcttttttgcttattaccgatcctatacgctgtctttgtttatccctacaacgcgcgccgtttatctgctatgctcttccaggtaacaatcgatctgagcgatcttttcctccaagcgatcgatgctgttttgccttgtcgcgcttttcatccgaagggatttggtctttgtagatagatactcccaaaagcacatggccatgttttgctcctgtatctcatagatggtaagcggcatctcccgcttcatgatcaaagcgtgcacgtttttttccacaaatacggacatgttctgcatgcctacatcctgcgccatcaccaccaggtagttggagtagcgcttgagtaacgacacaatacgccttaagtgcgtccgataggcctgtggcgtatagggcagcgcttcaccgtcgcccatataggaaaagggcattaaaacccttcccgctacgatgtcttccaatgctgcgagattgatgatatcgacaaaccggtactgttttgccaggcgattttcaaagtagctactttgcagcgcgatgattcgttccgtcgttgacctgcgctgatcccctgccggaataaattccaacagttccaacggcaccgtgacgaaagacagatcagaattgacctgcatgcaatcgctcaggtcagtattatcgtcccacggggcctttaatctctgttcgcaccaggattcaatcgtataggcctttgaaaggggatggcaaagccgccagaccctttcaaaatcctgctccataaagctaattagctcctgatcggtcatcaaaaaggtgatgccagcctcttcctgctggccgatcgaccccgagaaaaccgccgcctgcccaggcaccaggatcagcgtgcgtttatggaggttgtcgcgcaggcggggatagtaatacgtctctaacatgccatacatataggccgaaaccataaaactcatagcggctatggcgctgtgcatctcgccttgcgcgatggatacatgccggatatcatagccgtggtcggccagggtgcgggccatctccatgcactcgtccaaaaagccgggttcctcataaaaccacttcagattttcgtcagaaaagacgcagactgtccctccattttgctgcattgccacctgccacaaatgccggatggcctggcgtttgcctgcgttgaaaaagtatgtatcgaccatcttgccttttgcctgaaccccgggtagattttgcggaataggccataggtctgcctcctcgctatcggtttgtgtgccagcacgctgcgcacgctcgccctgggagctcccttgagcggtcagccatttgaagataacttcttccaggtcttcgtcctccagcaccgtctgggatatacccatggtctccgataaggccgcgcgctgatactcgccataacacttttttgcgaaataacgcgccaccgaacgcatattctctatattcttgggggctccccgcacgccatggcgcaatttgcttaccatagacgggtcaattttgatcccatgtgccagttgaacattggtcgtgcttgtaatattaagtaaaaaagtaagtttgtcagcaaaaaccataatatccccctgcctgtcgtactgccacgaaagatggcagaataatgtccatgacataatcgtcaacgggattgccacacgtctataaaaacattatcatatatatagcacaaatcggaaaagatgacgacaacacaattctacaattgaaaagggggacgcacatgaatactgttcacgaagaaacactggttgcacaaattctaaaattccatcatcggaacgaacgcgctcaggaaaatttcagcattgagatcgatatctctgcctcctccctcaaccgttttgaagaggaatgcaacgccgcctcgctcgtaacgccggaagggcaaaaagatggcttcagcttcaatctcttcaacacagatgcaccattagctgacgaatccgctcttccgcacaacctggcaactcatttattcacctgcaacctccagcagctgctcgcactgccggcgccataccgctcgctggtcgtgcgcctgttcgaatacatgctggtcgccttatcccgagaggaaggctttacctactctaccaagccctttttcccgcgctaagacacagatcttttatcatttatctttaccgtatggctaaaattgtggcgggatccatgatcccgccccgtttggtctcctttccagtttcttttcacacattaatatttcgtatcataaggccacgggcttccgccgctcaagcagccgccgtcaatccggtactcggatccggtgatgtacccggaggcatcgctggctagcagcacgcataacccaacgatctcctccggattgcccgggcggcgcatggcgatgcgctcgcgcaggtaagcagcacgctcaggatgctcccacgtcacggtagtcaaaggcgtgaggatatgaccagggctgatgcagttggcccggatattatacttggcccattctacggacatgctgcgcgtcaaggcgacgatgccgctcttggttgccgcgtagaccgagcagccgcccagcacgctgccggtattgtgcgaacctatattgataatgctgccgctcttttgcgccatcatatagggcgcaacggcgcgggaaacgcggaatacgcccttaagattgatctccatgatgcggtcataagtctcttcctccacatccaaaagcccttcccgcttattgatgcccgcacagttgaccagcacgtcgatatggccatactgttcgccgatctgatccacacaggcagaaatactgtccttgtccgaaacatccatgatgtgggatgaggcgctgccgccctcgctttggatctcctcctccaaggctaccaggccgtccctgctgatatcgcacagggcgaccgccgctccggcccgcgccaggcccttgcaaagctcccggccaatgccgcccgccgccccggtaaacaggacaaccttgccctccagagaaaacatctgctgtaaattcttcgctacgtccattttaactcccccttaaatataaatcattatctatcgccctgtgcgtactcctgcgcaccttctactaccgcgcggatattcacatccggcgtatcctgctgcacggaacaatccgcgcataaaataagccgttccgctccggcagaggcgatcaattccttggtataggttttgacctgctctggcgttgcacactgcaaaattttgcccggccggttatcaaacccgcccatcagcgtggtaccgggtttgaaaaacgccctgccctgggccagttgcaggtctttttcgataaaggtgccccagttcacggtctcgtacggatagtcctgccacaggtcgataaagttgggcgtccccacccaggaacacatatggacgatattgtgctcatacaggctgttgacgtaatctaaaagccggatatcccaaggctttaacgcctccacatactcctgcggcgtaaagcggtccacctcgcagttttgcagcgaaacaaacaggccatcgatccccgtcttttctttgagcagccgggaaagcgtaaaattatcctcctcgatcacctgcatggccgtctgcaccgcgcctttatcctcgcgccacagatccatcacatgcgtttcgccgccgaaggtatgcttgatggtcgaaaagggcgtaaaaagcatataatagaccgctgcgccatcctgcatcgcctcggcgatcttccccgcccggtaaagatggcgttgcatataagcggattctggcccgtgtgggcgtatccccttccaatcctgcacggtgcgcagcgccgtatcgccgaaaaagcccatcaacccatcggtctcaacgcacagtacatccatatccgtacgtttgcaccagtccacctggccagcgacggccgcgtcatcctcggccgaaaagtgggtgtaaaatcccaccggcacccggtctaccggcaaccctgccatggcgcgcagggtccgctcctttttgttcatttttatccccccctaaattattttagctatttcctattataggcctttatctggccaagcacaatctaaacaattagatacacaaagtaaaaaggggacggcttaagccgtccccttttaagcgttactccgagaagtttacaccatgcgcttggacagcagctgattgaccagcgcgctatccgccttgcccttcacccggggcatcagatttttcatgatcagtcctttttgtttgccggtgggctgctcgatccccaactcctgcagcacggcgtcgatcacgctgtcgatctccgcctcgctcatcatctgtggggcaaattcccgcagcacggcgatgcgcgctctgcatttttcgatgatatcggtccggctatccggcgccgttgtcatggtctcctcggtctgcttaatctcctttaaaacgatggtatcctcttccatggcggtgagcggctcgcgcttatccttagccttggctttaagcgcgctgagcagcagggaaagcgtctccttgcgtgctgcgtccttatcctttagcgcctgcatcatcgccttttgtacggcttctgttttactcatgctaaacttcctccttctgatcttacttccattttatccacgttcagcgccgcgaataccgcgccaatggcgccacatatctccagctgcgcgcgcgagcggccaatcttctggcgattaatggccgctaggcacctgccggtaaaatagtcgatcagccccgccgcgggataaacgctgagcgaggtgccgcctacgatcaacaagtccgcgctggcaatggccgccacagcggcatctaacaccccttcatccagcgcttcctcatagagcaccacatccggcttgatgatgccgccgcagctacagcgcggcacgccttccgaggtcagtatcgcctccacaccgtaggcgtgaccgcaggccatgcaatggttacggtggaccgagccgtgcagctccagcacatttttgctgcctgcggcctggtgcagtccgtcgatattctgcgtgatcaccgccttcagcctacccattttctccagcttcgccagagcccggtgcgccgggttaggcttagcctcaagatagagcatcttatcccggtaaaagcggaaaaacccctccggctgggctataaagtaatggtggctgaggatctcctcgggcgagagcgcatacttttgatggtacaacccatcggtactgcgaaaatccggaatgccgctttccgtagatacgccggcgccgccaaaaaaaacgatcgaccggctggccatgatctgttcgcgtaattctttgatcgcctcgtccacgatccccgcctccgtcccttttacacgtccaaattctgcctgcgcctggatgacttttcaaagcaggcccgcagcgcctccccgtcgtcttggcgcacggcgtcctttataatatccagctgcgcctcaaaattctcgatagcgcccagcaaatgctctttatttcccaggaaaagttcgctccaaagatcgggattgatattggcgatgcgcgtcagatcccgatagctatcaccgataaagctgccggtatcccgcccctcgatatcgctgttgaccagcgccacgctgatggcgtgggtaagctgggaggtaaaggcgatgatctcatcgtgaaaggcgggcgtgatgcggcgcacgcgcttgcaccccatctcccgcgccagcgcctctaccaggcagaggctttcctcccggttgcggggcgtgggggtcaggatatagtttgcgccttgaaagacagcggcagtggcaaaatcgatccctcttttttcccgtccggccatggggtggccaaagacaaaatctaccccttcgggcagcgccgcctggatgcgatcgatataccggcccttgatgcccgccacatccgtaaccacagtgccaggcttaaagcagccgccgtggcgctgcataaatgcggcgatatcccgcgggtagatcgagaggatgacaagctctgaatctcctaatttttcgggtaaagagagctgctctttttctatgatccccatttcccgcgccttatccagcgtcgcctcatccacatccaccccgtagatgcggtgcttaccactttgggcaagcgccatggccatagaaccgcctaccacgcccaggcctacgatggttatcttcatggctacatctgctccttttccttaaggtacgcgcaaagcgcctccatcgccagcacatagccatacgcgccaaagccgcacaactggccgatacaggccggcgcggtgaccgagcgatgcctaaactcctcccgcgcgtggacgttggacaggtggatctccaccgccggcagctgggaggccttaatggcatcgtgaatcgcatagctatagtgggtataggccccaggattaatgacgatcccatcgtagtgctcaaaataagcccgatggatctggtcgatgatcgcgccttccgaattgctctggaaacaatcgacttcgcagccgcgaagcgccccctgctctttgatatacgcgcagacctgatcgtacccggcggtaccgtacacgttcttctctcggatccccagcatgttcatattgggcccgttgatcaccataatcttcatcatccagcctccctatttattcagtgtagcgcagatccggcgcaccgtctcctcgggtgtggtatcgttgaggatctcatcccccgccgcgcggtaaagcgcctcccgctcacgcttgagcacatacagccgctgcaccccctgtgccagcagcgggcgggtggtggtatcgatatcggcagcgatactttcgatgggccggttgaggaacaatacccggccggcctggcgcagcagcgccacgttctccgcccgcagcacgacgccgcctccgccggcgatcacggtatgggtaaacttggccagcctgcggcaggcctcggtctcccattggcgaaacagcggctctcccacggcgaacagctccggtatggtctgacccgagatctcctcgattaggtcgtccatatcgcaaaaatcatagcccagagcctttgccgccagtttgccgatggtggtcttcccgcttccgggcatccccaccaggacgatattttccccttctatcctattctcgctcatcgcgccaactcctctttcatttccccgtaaatctggcggatgaccgcctcttctaccgggcggccctgccagatctcctgggatctggcggcctgtgccaccagcatgtaaagcccgtcgcaggtggttttgcccatgccgcgtcccaaacgcaaaaattccgtttcagtggggttatagatcaggtccaccagcgcatcgaactgcgcgatcacctccggcgccaccggtgatatcccggtattggggtacatgcccacgggcgtagtgttgatcagcacatcccccttgagcgcgttaagctgcgaatagcccacgcgggtcacgcacaccccatcgggcagcgaaaccggccgggcggggtcgcgcgagaccagatagatcatcctggctcccgcgtcttttaaataggccaacacggccttggacgcgccccccgcgcccaacaccacgcaaaccttatcccggaccggaatatccgcgctggccagcatgcggccaaagccaaagtaatccgtattggcgccgtaaagcgatccgtcctcctgcagcagcagggtgttgaccgcgccgagcgcctccgcctccggcgagagcgcgtctacctgccttagcagctcctgcttatagggaatggtcacattcacgcccttgatccccaacaaacggatcgccgccgccgcgccgccgattttatccttgggtatttcaaagagcttgtagccgccctgtacgcccagcagctccagcaggcgctgctgtatctgaggtgaatagctgtgccccagcttttccccgatcaaaccataaaattccatctttccaccgtcctactggttctgctttttataagcgccgatcagcttggccgccacgccctggccccaaagcgcctgaacgatgggctgcgcctgagaaaggccatgggccacctcaaaatcggcataaaatacgtattcccacgtcttgcccggcgccgggcgggactccagcttcaacatattgatatcccctttggcaaactccttgagcacgccgtacagcgcgcccggctcattgggcagggtaaagaccatgctgatcttattggcgtccgcctggggctggagagccttggccacgatgataaagcgggtgtaattatgcttttcggtattgatggtgggccgcaggatctttagcccgtaaagctccgccgcgcgcccgctggcaatggcggccttgtgcacgtccccggcctggctcaccatctgggcgctgatggccgtgttatgataggggatctgcttccaatcaggatgctgagccagaaatgcccggctctgttcaaacccctgctcatgggaatagacctcccggatatcctccatcgaagcggccggcagtgccagcaagtgctgggccacgggcacgaatacctcctgggcgatataaaaatcatacttcatcaaaaggtcgtacaccgcgttgatcgaaccggtagaagagttctcgatgggcagcaccccgtagtcgatctccccacttttaagcgcaacaaagacctcttcgaagctggggtaattcctgcgcggctgatccggcgcgaaggccatgagcagcgcctcctccgaaaaggagcccgctaccccctgaaagcccaccaccgccggtttggtctcttccttggaaacgcccattcgctccatctcccgggcctgaatcccccggctgatcttcatcatctggcggtaaaattcctcgatatcctcgccatagtcctgatccttcaggttattccgcgccttttgcagcactacgtcctcccggccggcctgcaaaatttccattccattttgggccttatactgcaccacgcgcttgcacacgtccatgcgctgctcaaacagcgccgtcatctgccggtccagctcgtctattttagcgcggtattgttctaattccgtcatgctcttcttccccccatcatatccagaatcgcgatggccgccgccgcctccaccaccggcaccgcccgagggacgatgcaggggtcgtgccggccgtgcacgatgagctttgcaggctgctttttctccagcgaaaccgtatcctgctctttggcgatggaagccgtaggccggcaggctacctggaagcacagcggcatgccgttggtgatccccccgtttacgccgccgtttacgttggtgcgggtgcgcacccggccctgcccgtcgtaataaaaaggatcgttacactgggagccgcgttgcgacgccatggcaaacccgccgccaaacgccacgcccttgacgcctgggatggcgaacagtatgtggctgagcaccgactcgaccgaatcgaaaaacggatccccaatgccggcggccaggccgacggccgcgcactcgatcacgccgcccaccgaatcgccctgctttttggccgagaggatcgcctcccgcatagccgcgccagcctgtgcgtccagcaccggcagttcctgcccggcgaaccccgcaaggatctgttcggtacaggtttcaatctccagcgcccggtcctgcaccgcatggatcgaaaggatgtgcgcgccgatcacgacgcccttgcgctttaaaatctgcttgcataccgccccggcaaagaccaacggcgcggtgatgcggcctgaaaaatgcccgccgccccgataatcctgaaagccggcatagcgcaccgcgccggtataatccgcatggccgggccgcacggtatcctgcagctgcgcgtagtcccgcgagcgggtatcccggttgcggatcagcgccgtaagcggggtgccggtagtaaaaccattgaaataaccgctgaggatctcaggctcatccgcctcgctgcgggcggtggacagagggctgccgcccggcgcacggcgcgccatctcccgggagatggcctccatatccagcgcaataccgctgggaaggccgtgcagggtcaccccgatgcccccgccatgagattcgccaaagatagaaatcttgatattctcgccaaacacgccgctcatcgcccgcaaacgccccctaacttttgataatcctcataaaaattgccgtaggactttgaaacgcagcccggttcctgcagcagaaccggtttatcgcaccgcgtggccgcgatggccagcatcatcgcaatgcggtgatcctgatggctaaaggccctgccgccggatagcgatgcaacgccatcgattatcagactgtccggccgctctgtgatatgcgcccccagggcaccaagctcatgggcgatggcgtaaagccggtcgcactctttgatgcgcagccgcccggcgttcaccacctcggtgcgtccacgggccagcgcagccgctactgccagcggcgggatgatgtccggacactgggcggcgtcgatccggatcccccgcagcccctgcggcgcgcggcattgcagcatatcgcccgtccaattgaattgcgcgcccatccgctgcaaaatgtctatcaccagccgatccccctgatgggaatctgcccgcaggccctgaacggccacgtcgctacccagggcgcccgccaccaaaaagaaagccgcctgggaataatcgccctccaccgcatagctgcccgcgcaataatgctggccgcccggcacatggtagccgcccggcgtgggcaagactttaatgccgaaatcccacagcacgtccagcgtcaactccacatagccggccgattgcagcggcgtcgtcaattcaatgtcagaatcgccctgcagcagcggcagcgcaaacagcaggccggttaaaaactgcgaactgatatccccccgcagcgcaaattttccgctttgaagcggcccgcgcacctttaggcagagcggatcgccctcatgggaaaagggcaggccctgtgcccgcatgatctcaaaaaaaggatccagcggccgcttgcccagattcccccgtccaataaaggtggtctcctcctcccgcagcgccagcgccagcgggacgagaaagcgcagcgtagagccggattcgttgcagtcgatcaagcgatctctcggtgcatgctcgcctgcggacaatccctgcaccgccagccgcccctcttgccaggcagcctgtgcgcccagcgcctgcatgcccgccagcgtcgcgcgcacatcgtcgtttaaatccactccgcgcagcacgcttttcccctggcaaagggatgcggcgatcacggcccgatgggccaggcttttggaagaggggacccgtatcctgccgcaaagccgcgcgggggcaatttgcatcgtttccattattctatcccatccacatcgttcatttcaaaaaaggcggccgtttcatcggcgataaaacacgccccgatctgccgcagcaggatcagctttagccgcgcgcccaggttctttttatcgtgtgcgatggcctccagcagctgtgccataggcggaagcggatcatcatagggcaagccgtgcgccttcagggtatcggcaatgcattgagccgtgcccgcaggcgtcagcccgcgcgcctcactcaggcgcgtgatggctaccatccccagcgccaccgcctcgccatggctgtatttgccaaagtgatagtacttttcgatggcatgccccaaggtatggccaaagttgagcaccatgcgcccgcccatatcccgctcgtctgcctcgaccacctggcgcttgatatcgcagcagcggtagatcagctcatccatccacgccgagagctgcgcccgggtaggcgaagtggccagcttatcaaaaaaggccctgtcgcaaatgcagccgtatttgattacttctgccattccgtccttgaaataacgctccggaagcgtatccagcaccaccggatcgataaaaaccgctttaggttgataaaagctccccaccaggttcttgccctgtggcagatctaccgctactttgccgccgatcgaactatcgacctgggccagtaaagaggtgggaatctggataaagggaatgccacgcaggtaggtggaggcggcaaaaccgcccaggtcgcccaccacgccgccacccagggtgatcatcagatccgtacgggtcatcttgttttccagcagcgcgctgtagataggcaccagcgacggaaaggctttggtcgcctctccaggctccagcaccatttttgccgtttgatagcctgcgctgcgcagggcgctttcgaccttcgccccgtactgggcgtccacgttgcggtctgtcaggataaaagcccgctccgcaggatagaccgcccgcacttcttcgccgatcttatcgagcaggccctcttctatcacgagcggatagccccgctccttaagctgcacattcagtacgcgtcgcatcacttaacccctttcaaagcctcttgcttaaagcgccatttcccggcctaccgccgtggcgatgggcgcgatatcctgcatcagctcgccgaatacgcagggtttgatggactgctgtccgtcgcaaagcgcgttttgtggatcgttatgcacctcaacgatcagcccgtccgccccaacggctaccgctcctttggccagcggctcgaccatccaccatttgccggtagcgtggctggggtctacgatcaccggcagatggctgagttttttgatggccgggatagcgctcaaatccagcgtgttgcgggtataggtctcaaaggtacggatgccgcgctcgcacaaaatgacctgatcgttcccctcggccatgatgtattccgcgctcatcaaccactcctcaatggtagcagataagccgcgttttagcaaaatcggcttgcgggtccttcccagctcgctgagcagggtgaagttctgcatgttccgcgcgcctacctggatcacatccacatcccgctcaaacacctcgatatcctgaggggccatgatctcggtcacgatgggaaggccggtagcttcgcgggcctttttcagcagctccagtccatcgtatttcaagccctggaaggcataaggcgaggtgcggggcttgaaagcgccgccgcgcagcagcgtggctcccttggctttgacctcctgggcgatggcaatgatctgctcctcgctctccaccgaacagggaccggcgatgatggtgagtgccttgcctccgatcttgcggccgcgcacctccaccacggtatcctccgggtggaacatgcggttggcctttttgaagggctcggccacgtgcatcacccgttccacattgcggttggcttccacctgggtggggtcgatcttgctggtatcgcccaccaaacccaggatgctcagatccgtaccgataacgggattgacggaaacgcctttggcctccagctgtttcgtcagtttttgaatctcttcctgctgcgtaccgggctttaatacgatgatcatgattatctctcctttaaaatggtcgtttaggataaaaacaaaaaagagagctcttcaatgagctctcttttcctgtacatttggaacctgatcgatccgcccgcagctgcgcttaacggcgccgccctgacagggaccttggtttatgccggattaaagcaatcattgaaaaggactttttgacagcacaaaaagccgtagctaaatcgatagctgcggtacgtaaaggtaaaagaacggttttcgttcgccttcacgctgcctcatccttcctcaatgattttgttagttaatctaacttgtttataattatacagattcaaggatatttgtcaaccgcaaatcgtccgatttttcgaaaaaccataatttttacggttttgcgcaacgcgtttaatccctgcggcgcgccgaaacgatcagcatcataggtctgcgcatctcatccttcattccggggcgatctatcatcgatgcaggcggcttcggctctacaatccgcgtcagttcaaagccattgtccagcagcccgtccaaataggtggtcagggtcttatggtatttcgtaaccgtttcgcccagaaaattcgccctgcgcgccccctcgttaaaataattatctaccgggaaatgggcgatctgcccccggtcatcgtacacccagtcctgcgaaccctcggcggtaaagatgggatgttccacggaaaagataaagcagccgccttttgtcaggcaggtacgcacccgctttgccaccgcgtcaaaggagggaacatagtgcagcgccagggagcttagcacgatatcgaaactgttctgcgcaaattcgatagcctcaatcggcatgcgggcataggttacgttctcccaatgggtcttttcccgtgccacggccagcattttttcagaaatatcgattccgatcgcgctgaaggcgccctgctccatggcatagatacaatgcaagccatagccgcaacccaggtccagcagacgcttgcccttaaaatccggcagcagcgcttttagcgtttcccactcccctgcgccgtccaagccttggcgggaacggtccatctggctgtactttttgaaaaaaaccgggtcgtcatacttgttttcaggcatgatttcctcctcattggttttaaccagtctaccgcgtatgctccacgctgtcaaaccgtaaaaaaggggcgcttaaggccctgtaagggccctaagcgccatttaagaagggggttcatgaaattatgaggcagtactagtatgccacccccgaacttttctatacaaaaaaagcgggccgcttggcccgctttttttaatcaactatcgctgctcccacagaggattagtcatcctgcttcgggaagaaatccgccagggagaaggtggtctcctcctggggcgggatatacagggaatcctccatgctatcctcatggtcttcatagcgcggcgcctcctcctcgggcagcgtctcgcggatggacaggctgatgcgcttatccgccgtattcacatccagcaccttggcctgaatcttctggccgacttccagcacatcttccaccttgtcgatgcggtggcgggcgatctgcgagatgtgcaccagaccgtcaagacccggctccagctcgataaacgcgccgaaggaaacgatgcgtgccacggtaccctccacgatggagcctaccgggtacttctgctcggccacttcccaaggcttgggcagcaactgcttgcggcccagggatacgcgctccttctcaggatccagcgccaggatcaatacctcgatctcgtcgccgggcttcacaacatccgagggatggttgacgcggccccaggacatattggtcacgtgcaacaggccgtcaataccgcccacatccacaaacgcgccaaagtccgtaatgcgcttgaccgtacccaggatggtctcgccagcggtcagcttctcccaggcttccttctttttggcctcggcctgctcagccagaaccgcgcggcgagaggcgaccacgcgcttgcggccctcgtctacctcgatgatcttcagctgcagggtctgccccacgaactgctgcatgttttccacataattctgggaaagctgcgaagcgggaataaaggcacggatgcccaggatattggcaatgacgccgcccttgacgacctctttgcacacgccctcagcatactcgttatttttgaacatttccatcacggtgccccagtttttccgggaatccacgcgctttttggaaagcagtacattaccttcgccgtcattgaccttcagcacgcaaacatcgatctcgtcgccgacgttcaccaccgtgcgcagatccacgtccatgtcgtcagagaactcgttcttgggaatgaatccatcggacttatagccgatattcacacagacctcgttctcagtgatctgaacaatcttgcccgtgagcacctgtcctttccgcagaacgcgcaacgtctcctctacgctctgcataaaatccgcatcctgctgcgactcttcgctctcggcggcctccgcgggctggtcgacctgcgctaccgcttcctgctctgcggcagcagccccctcttgcataacctcgtcgacctgttcgttcatgtccaacacgctcatcctacaaactacctccttaattatccattccggcgtggatgcgccggcaatgatcccaacaacgtcgtccggcttaaactccgcaagcggaatttccccggccgactctattgcaaacacacgggaagtgtgctggcaagcaatctcaaagagcttacgcgtattgctgctatttttgccgcctaaaaccagaacggcatcgcatttttgcgcaatctcccgcgcctcagcctggcgcctggccgtcgcctgacagatggagtcaaatacctccagatccgccactttttctcgcagcacagccactgtctgctcaaagtttgagcgcagggccgtggtctgcgccacggcgagcccatattgagtttttggaatattttcagcctcttggctattgagtaaaaccgttgcgtcctctcccgcccagccggcgatgcccatgacctctgggtgcttctcctcgccgataatgtagacgtgacgcccgctctgacgtgcctgcacaaccttttcgtgaatgcgtttaacataagggcaggtagcatcaatgatgtgaagaccaagtgcctggcattgtgtaatcatttgcgggggtacgccgtgggaacggatcacgaccgtgccgcgtccggcgatctcgtcgatcgcgttaaccacctgtacaccctgtttagccaatgcctccactactgaggggttatggataatcggcccgagcgtataaaccccgcccgcctttgctgcatctaatgcagcctctaccgcgcgttttaccccaaagcaaaacccgccgtgcttagcaataatcagttccattcttacggcaataaacctctttttttacgtacctaaagcacattcgatgggtttatgcaaaattccttctttttaaaacaatttttttaatttttcataattcggcacggtctttcagcgtttgcacgctggtttccaacagcttattggccgcttcaatacgctgggcgccttttagcgtctccggcagcgccgcagccagttcgatgggttcgcccacatacaggcgtaccttaccgcctatatgataaggggcgatatagatcggcaaaaccggcgcgtccgtcttcaaggccagcgaagccggtccatcaaaaaagggtagcagctccccatctcggctgcgcgtaccctcgggaaagatcaaaagcggcgtatcctcacgcaggactttcagcgcctttttaatagccccaatatccgccttgccgcgctttacggggaacacgttaaattcgccgatagcccaggctacgatcctgttgcggaagagctcctccttagccatgatatagatcttgcgcttgatacaggccgccaccaccatcgggtcgttccaatggatatggttggcgatgataatcgcccggcctttaacgacttcgcgaagataattcgccccggctacgacgcgcgtgcgacagagcacaaacgccaggaagttgacgaccacccggaagatcctataccacatgaaaaagcggcacccctttgatttcttttaatgcctttgttcggtatccctgcgctacgcctgatggcggcgggtatcgatcgcctcgatgagaaaatccaccacctcgtcgatatccatctcagtggtatccaccacctccgcgtcgtccgcgcaggtcagcggcgagaactcgcgttcggcatccgccttatcgcgctgggccatggcagctttgaccgcttcaaagctctcgcttttctcacccttttgcaccagctctgcaaagcgccggtgcgcccgctcctccaacgaagcggtgatgaagaatttatatcgggtatcgggcagcacgcaggtcccgatatcgcgcccatccaacaccaaatcgttctccagggcgattttacgctgcagctccaccaagtattcccgcacgccgggatgggccgccacggcggaggcgtacatccccatctcttgggtacggatggccggctccacattctccccgtccagctctacgcgcatctgcccgttttgatagataacatccacccgggtatccggcagcagtgcctcgaccttagcgcggtccttggggtccaccccgcactttttggcttttagtcccagcgcccggtacatggcgccggtatccagataaagtatatctaatttttgggccaactgtttggcaatggtgctcttgcccgcgcccgccgggccatccaaagcgatattgatcttttgttgttccatgattttctccgcctgcctttactttgatatctatacggcgcggtggcccaagccgatggccacctcgtttaagtgcaacagtccgattccgaaaaaggtggaaacggctatgtggtcttcaaacctggcgatgccgatctttccacccacattcagcccgatggccttggtcatgatctgagagagcgcctcccgcgtggccccggccaccgccccctcctcgtggtgggacaggtcgatcacattttcgcgcttggccgccactacgctgcgctcgacgatcttcatgaccgaggcgataaattccccgccaaagtccgcagccgcgctgcggatgccctgctcaagcagctggctttgcagctgtttctcctgctcgcgcgtctgggtcaagctgatcaaaagcgccgcgcgtgcgacctctttgctgccggtttcaagatgctccatatgctcaacacctttctttggccttagttctccatctcctgcgcggccccgacgcccgccaaataccctgtggaaaaagcgatctgcaagttgaacccgcccgtatagccgtcaacatccagcatttcccctgcaaaaaacagattgggatagcgcttggcccgcatgcttttcgggtcgatctcccgcacgctgatccctccgcgggtgatgatcgcctcctcgatgggccgcaaggccttcgggtgaagcggcagatccttgatcagcgcggcaaacgccgcgcgctccgcccgtgtgagctggttagcagtcttctggggcgcaatgcccgatagacgcaccatcacttccaccatccgctgtgggaaaagatccttcactgcgtgaacaaactgtttgttgctgtacttttcaaaatcgcgaaccagccgggcatccaactgctgtaaagtgagagcgggctttaagtcgatgctcagttcgatctcatttagcgccaaccctgctatgtggctggatgcagagagcaccagcggcccgctcaccccgtaatgggtaaacagcatctccccctgctcttcatacaagacctttttgtttcgcctggccgtcagcgccacattgcgcagggaaagcccctgcaactgcgccggccaatcctcccgcgtttcgatggggatcagcgaagggtatgtcggctcggtctttaagcccaaacccttggcccatgccagcccgtcgcctgtagaaccggtactgggataactcaagccccccgtagcaatcaccacggcctcacaggggaagtgcttaccgttggcgagcacgccgcttacgcattcgtcatccatttccagcgcctccactcgttgagaaagcagtactgtaacgccgctttggcgcagataccgctccagggcgcggttaatatcgctggccttatcgctgaccgggaatacgcggttgccccgttccaccttcagcggcacgcccagcgcttcaaaaaaatccattacctgccggttattaaaccggttaaaggcgctgaacatgaacttaccgttgcgcggcaggttgtccatccattcctccggcgcacaggcgttggtcaggttacagcgccctttaccggtgatatagagcttcttgcccagcttctcattgcgttccagcaacgtaacggcgcagcccttttgcgcagcgatgcccgcggccatcatgcccgccggcccgccgccgaccacgaccagcctctttttatccatccattgcctccagatgggcagcatcccccatcgtgggcagggtccacttggccccgtcccagcgcagcacgctcaaggtggcgttgcgcaccagcatgtcccccagctgctcccaagggcgcgcgatggccaagctcatcagcacgcttgaaaaatagccatgggtggcaatgccaatattctcgccggaaaactccccggtgcagcggtccaacacccgctgcgcgcgggcgatcaccgtttccaagcgctcttttccctcggggttgcagttcatcggatccttccaaaggcaatcgtaaaactcaggaaaggtttcggccacctcagatacttttagcccttcccaactgccaaaatccacttccaacagatcgtcccagggttcgatttccagatgcttgacctgtgcgatggcctgcgccgtctgccgcgcccgggtcaaggggctggtaaacaggcgcttaaaatccagctcttttgcccgctgcgccaggcaggctacctgcctaagccccagctcgtccagcgggatatctgtttgtccctgaaagcgatgctctccattccataccgtgtgcccatgtctgaaaatatataattccattagtttgcattcctatccttgcccaaatagacgctgtattcatcccaaaccgcttcaagcttggtaaagtattgagaaatctcatccttcttgcgcgagccgatggccacaatcagcgcattgaccaggctgaatgccgccaccatggaatccgcaaaggaggccatatcactgcgggctaccaggcaaagatccgcctgagatgccagcggcgaaagcaggctatcggtgatcgatacgatcttgacgccgttctttttggcaaaattgatcccctccaccgtgcgggaggaatagcgcggaaagctcacgccgatcagcagatccccttctccggccctaaagatctgctcaaacacgtcgctgaccccggaggtcaccaccgtgatattctcaaaaataaaggagaggtaataggagaaaaactgtaccagcggcgccgcgctgcgcaggcccagaatatagatgtgtttagccgaaaaaatactctccacgacctggctgaacacctccgggtcgatctcctccagcgtagagcggatattggccatatccgttttaaaaacggactgcaatatcgacgcctcgtcctggtcccccgtcatctcgatgcgctgcaccgtcgtcagcttggtgcggatcatctcctgcagtgcccgctgcagtttagggtatccgtcataccccagtgcgtcagcaaagcgaactacggtagattcgctcacgccgatgcggctggccagcttggccgccgtcataaacgctgccttatcgtaatgggctaaaatatattcggcgatcaacttttgccccttgctcatggttttaaagccgctgttgatccgcatggtcaaatccatttgacgctccaaatgtatccaccgtccctttctcaggatagatattattttaccatagaccccgtttataaaaaagggcatatcggaagtttttgcaatctatttcatccatcctgcaaaacaagcaacggctgcacggctatcacatccatgcaggagttcttgcaccccctacacgctgcaatcaccgcgcagccgttttctttgaatctgttttacgcgccacctcctataaaacgcataggccagtggacgcataaaccctaacagaccggtagaaacaactaccccttacaggttaacctccccgcgcaggcccagataagccttatagtgatccaaaataggctgtatctcttccgccacaaattcctccacctgctgttcggcgcggccggtgaagcgcttggcatccaataattcatcaatttcctgcagcgttaagccaaaggccggatctgccgcaatgcggctgagcaggtcgttctccatcccctccatcttgactctgcggccggcttccatggaatggacgcggatacgctcgtgcagctcctggcggtctccaccgcggcggacagcctccatcaggatcgtttcggtggccataaagggcagttccgcgcgcacatgtttttccaccatcttgggatagaccaccagcccatccaccacgttgaggtagatgttgaggatcgcatccaccgccaggaaggcctggggaacggccaggcgcttattggccgaatcgtccaacgtgcgctccagccactgggtggcagccgtcatcgctgcattctcgctattggccatcacaaaccgggaaagcgagcagatgcgctcgctgcgcatggggttgcgcttataggccatggcggaagagccgatctggctcttttcaaagggctcttcgatctccttcatattctggagcagccggatatcatcggcaaacttataagcgctttgagcgatgccggaaagctggctgagtacgatggcatccagcttgcgcggataggtctgcccggtcacggcaaagcaggctttcagccccatcttagcggcgacccgcttttccagctcctttaccttctcatggtccccgtcaaacagcgttaaaaagctggcctgggtgccggtcgttccctttacgccgcgcatctttaaaatgctgatcacgtgctctagctcttccagatccatcagcagatcctgcagccacaggcaggcgcgcttgcctaccgtggtcagctgggcgggctgaaaatgggtaaagcccagcgtgggcatatccttatactgcagggcgaacttagccagctccgccatgcagttgaccagcttggccaaaacgatgctcagcgcatcccgcatgatgaggatatccgcattatcccccacatagcagctggtcgcgcccaaatggatgatggccctcgccgaagggcactgcacgccataggcgtacacatggctcatcacgtcatggcgcacctcgcgctcccgggcggcggccacgttataattgatatcatcctgaaagcgtcgcaactcctccacctggtcaggggtgatcggcaggcccagctccatctccgcttccgccagggcgacccacagccggcgccaggtcttaaactttttctcatccgaaaagttttgcgccatggccttgctggcgtagcgcgagatcagggggttttcatacagctctctcatgtgtctcctccacatcgtaatttatggtaagttatcgtatagatagcgttttaagttaccgtaggcgatacgcccaatgcacgccgcttcaagccctgcttcgcccagcgcgtgcaggatacattggaaatgctgcggcccgtcaatccccttgggcagcacatccatcccgtcaaagtccgaacccaggcccacacagttttgtccgcctaattgcaaaatgtgcagaatatgcgcgaccacatcttcgatgccgctattttcatcatccgcccgcaaaaaagacggataaaagtttacaccaatgaaaccaccagcactgattatagctttaatttgggcatcggtcaagtttcgcggatgttcgcacagcgcccgcacgttgccatgggaaacaaagggcggatatggatcattttccagcacatcccaaaagctgcgcgcgttcaaatgggccaggtcgggtatcatgtgcagggtacgcatctcccggagaaccgcccgcccaaacgccgtcagcccgccatcttctttggcgccgcctgccagggaattgttccaattccaggtcagccccaacatgcgcacccccagacgaaagtaggcttctacctgttccagcttcccctctaaggcctccccgccctcgatagccagcagagtcaatatccgccccggcccttcgctttgcaggtcgtcacgactgagcacaggcgtcacgcgctgtgcctcccgcgtaagaaagcgccgataggccgtgatcttttgcagggtagctgcgccgcatgccgcctcctttttcgcatcgccgcaccaggccgccatcacctggagcgcgacgccccccgttagcagatgctccgggctgttttgcggcgcaaaagacgtatccttttccatttttaaaagtgcccagggataatcgcagtgcgcatcgtagacttttatcatcagccttccccctttttgcgggcgcaaggttttacgcgccatctaaaaagaggatatgccgctagggcatatcctctttccacttcgtcttgtgcaaattactttgcgtagtctaccgaccgcgtctcgcgaatgacattcactttgatctggccggggtaatccaactcgtgctcaattctcttaacgatttcctttgccaccaacagggtgccggcgtcatccacatcctcgggtttaacgatgatgcgcacctcgcggcccgcctgaatggcaaatgatttctcaactcccgcaaatgagttagaaatctcctccagcttttctaaacgcttaatgtaattttcaagtttctcgcgccgcgcgcccggccttgcggccgaaatagcgtctgcagcttgtaccagtacggcctccaccgtcatgggctccacatcgccatggtgcgccgcgatggcgttgacgatatcgggattctcccgatactttttggccacgtccgcgccgatcttggcgtgcgggccttccacctcatggtcgatggatttgccgatatcatgcagcaagcccgcgcgcttggccatcgtcacatccgcgccgatctccgcggccatcagccccgccaggtgcgctacctctacgctgtgcttgagcacgttctgaccgtagctggtgcgatagcgcatgcgccccagaagcttgaccagctcgtggtgcaggttatgcacgcccacttcgaacacggcggcctcgccggcctcgcggatggtcacgtctacttccttgcgcgccttttccaccatttcttcgatccgcgcaggatggattcgaccgtctaagatcagcttctccagcgccacgcgggcgatctccctgcggataggatcgaatcccgataaaataaccgcttccggtgtatcatcaataatcagatcaattccggtcgccgtttcaagggctcgaatgttgcgcccttcacggccgataatacgccccttcatctcatcgttaggcagcgcgacaaccgaaaccgtggcctcggccacatggtccgccgcacatttctgaatcgccaggctgacgatgttgcgcgcgcgcttgtcggcctcttccttggcgcgggcctcgatatcccgtaccataatcgccgcgtcataacgcgcgtcgctctcaaccgtttgcagcaacagctccttggcctcttcccgcgtcaggccggagatacgctcaagctcctccaactgctttttgtgcagttggtcaaactcctcttgcagccggtccagttccttttgtttacgcgaaagattttcctcccgggattccaaagaagactgcttgcggtcgagattttcctctctctgaagcacgcgcttctccatacgttgcagttcgtttctgcggtcgcggttctccttctcctgctcgctgcgcaggcgatgaacctcttcttttgcttccagaatggtttccttcttcgttgcctcggctttggcgcgcgcatcgtccaaaatctggcgcgctttttcctcgctcttcccgatcttcgcttcagcaatcgatttgcgataaaagtaaccacctagaacaccaatgattaagcttggaatgacagataagagaatcggcaataataaatcactgccgttcaatcctagggtgcacctcctccaataaattatgttgtttctcatctaacatttcgccgcctgcctcccccatgtgccccgcccaaatgcacggcggacggcatcactaaatatagaacagactgcgaatatcatacagcacaattttatcgcttttacagccccctgtcaaggacaggcgggcgtatataaagggagaggacgcaagatattgtgctatcctctccctatggactacaactactcgttttctgccgccggctgcggggctggttcgtccttcttttccttttcttccttctcctgcagcaccgccgcgcggatcttctcctcgatctcgcgggccacatccggattatcgatcagatactgccgggcgttttcgcgcccctggccgatgcgcatctccccatacgagaaccaggagccgctcttgttgacgatcttatgggccacgcccatatccaccagcgacccttcgtgggaaatgcccgtgccgtacagaatatcaaattcggccatccggaatggcggcgctaccttgtttttgacgaccttgacgcgagtacgattacccaccatctcctggccgtttttcagcgtttcgatccggcgcacatccaggcggatcgaggcatagaacttgagcgccttaccgccggtggtcacctcagggctgccgaacattacgcccaccttttcgcgcagctggttgataaagaccagtatgcaattggatttggagatgccgcctgccagcttgcgcagggcctggctcatcagccgggcctgcaggcccacgtgcgcatcccccatctcgccctcgatctccgccttgggcaccagggccgccaccgagtccaccacgatgatatccaccgcgcccgaacgcaccagtgcgtccgcaatatccagcgcctgctcgccggtatccggctgggagacgtaaagctcatcgatattgacgcccaggttgcgggcatacaccgggtccagcgcgtgctcggcatcaataaaagcagcggtaccgttcagcttctgcgcctcggcgaccatatgcagggccagcgtggtcttacccgaagactccggcccatatacctcgatgatgcggccgcgggggatgccccccacgcccagcgccagatcgagctccagacagcccgtggggataacttccaaattcagcctagcccctgcctcgcccaggcgcatgatcgaaccctttccaaattgccgctctatttgggataaagccatttcaagggctttttgcttttccaacatacgatttatttcctcccttttgtcttctatgtatccatttcatctaacgcccggcggatcatatccagggcgttgagtgtagacatattccgcacacgattacgatcgccgctcaggttaagtttcttgaccgtgaccccgctctcctgtgccagaccgatgtagaccagcccaacgggcttttcatccgtaccgccatccgggcccgcgatgccggtgaccgacagggcaaggtcgctccccacctgggcgcgcagccccagggccatctcccgcgccgtctcctcgctcaccgcgccgaactgctccagcgtctgctccttaacgcccagccggcgcactttggccgcgttgctgtagacgacctgcccttccaaaagcgcctcggaaatgccaggataacccaccagcttggccgcgatcatcccgccggtacagctctcggccagggccagcgtcctgcccttttccagcagcttgcgcgccactacgatatccaacgtatccttgccgtagccgtaaaagtattcgcccacctgggccatgatggccgcttccaccggcgcaatcaacccttcggcctcttcacgcgccctgcacttggccgtcaggcgcagcgtgacctcgcccgtgcccgcatacggagcgatggtggggttggtctgcgcagcgatcagctcccgcagctggtattccagcgcactctccccgatgccgaaaaagcgcaggatcttggagacgatcacgtcctccgaaagggaatgcaggtagggcagcacggcgttttcaaacatatcatgcagctccaccgggggaccgggcaacacgatgaccaccttgccgttttcctccaccacgcaacccggcgccgtgccgtttcggttgggcaggatgcggctgcccttggggaaatccgcctgtttggcattgttgggcgacatgaccgcgccgcgcttttcaaaatgatccttcagccaggcgtaggtcgcctcatcccgctccatgggcaggccgaaaaattccgccacggtctctttggtcaagtcgtccatggtgggccccagcccgccggtggtgatcaccatatccgcgcgctgcaggcactcagccagcgcggctttcagccgttccacattatcgcccaccgttacatgccggtaaacgttgatgcccatgggcgagagctgctgggagagatattgggcgtcgctattgacgatctgccccagcaaaagctccgtacccacagagagaatttccgcactttgtaccattgtaccacgacctccttacggctgcatcttcttttcagacaaatagctccagcttcccttaaaataatccaccgcggaccagagcgtaaacaccagcgcgatggccatgatgatctgtgcaaaggggatattccaataagaaaaggggaaattatccgcgatataaaaaccgatggccaccatttgggtgatggtcttggtcttccccagccaactggcagcgatgatctcatgcccgctgcccgccgccaccaggcgcaggccgctgacggcgaattcccgcatgatgatgatgagcaccaccagcgcgtgcaccttgccctgcgaggtgaggatgatcagcgcggaacagaccaggagcttgtccgctatcgggtccagcaggatgcctaccggagagacctccttttttttgcgcgccaggtacccatccagcatatccgtactggcggcgataataaagatggtcacggccgcaaatttcgcccagggaaacgccgccccgtccagcagcataaaggcgatcataaacgggaccagcgcgatccgcgccagcgtcactttgttggcagcgctcatgtcaaggccaccccttccagatcgtaatcaaatgcctgcgtgatcctgaccggcacaaaagcgcccacggcaagatccgtatctgcatgtacgaggatctgtccatcgatctccggggcctccgcgcgggaacggcccagataggccttggcccgcaggtcgtacccttcgatcagcacctcttccacctggccgatgcggcgcgccaaaagcgcttttgagatgcgctgctgcagctgcatcagttcatcgcaccgggtctttcgcaattcttcttctacctgatcgggcatatcggcggccagcgtcccctcctcttgagaataggggaatacgcccagcctgtcaaacgggcaactctcgatgaatccgcgcagcatatcaaaagccgcctcatcctcgcctgggaagccggtgatcagcgtggtgcgcagggtaaagccgcggcggcgcaagtccttggccagcgtccggatctgtgcgccggtgccgttgcggttcatgcgcgctaaaaccgcatcgtcaatgtgttggatgggcatatcgatatagcggcagatcttctcattgcgctccatggtttgaatcagcttatcggtgattcgctcaggataagtataaagcacccgtacccattggatgccctcaatggcgcataccgcctccagcagctcgctcaaacgaggttcgccatacaggtcttcgccgtaaagggtggtatcctgggccaccagtaccagttccttgacgccattgtgtgccagacgtttagcctcggcgatcagcacatccatctctcggctgtggtaggggccgcggatcatgggaatggcgcagtagctacagcagttgtcacacccgtcggcgatcttaaggtaagccatatagggcggcgtggtcagcacccgcgcggtctcctcggcgggcagcccgggcgcagccacctgcaaaacgcgcttgcgcgccagcacggcctcgatcaccttggcgatattcgcctcatctgtgatgccgatgaccgcatcgatctccgggatatcccggtacaggtcctcgggatagcgctgggccaggcacccgctgacgatcagggctttgagctcgccctcctgcttatattgggccatctccaatatcgtctcgatggcctcttctttggccgggccgatgaagccgcaggtgttgacgatgatgacctgcgcccgggatggatcattggtcaagtcgtagcccttttcctgcagaatacccagcatgacctccgcatccacgcggtttttattgcatcccagggcaatcattcccacttttatcttcaaaggcattccctccggtctattcttcttcaaaatccggctcctcgccgccgctaagcgccgcgtactcttctttggtgatcagcaattttcgcgccttgctgccatcaaagccgctgatgatcccgcgcgcctccatctcgtcgatcagatggcccgcgcgggagtagccgatgcgaagccggcgctgcagcatggaaatggaggcctggccgcaatccagcaccagctcgatggcctggggcagcagctcgtcccccgcatccttatcctcgcccttgaggccgggcgcggcgttttcaaactcctcgatgatctcgggattatactgcggttcctcctgcaggcccgctttgataaagtctacgatagcgccgatctccttatcgctgacaaaggcgccctgcacccggatgggcttggggatagaaccggggtaatacagcatgtcgccccggcccaacagcttttcggccccgcccatatccaggatggtacgcgaatcgatctgagaagatactgcaaaggcgatgcgtgaggggatgttggccttgatgacgccggtaatgatatccaccgacgggcgctgggtggcgatgaccaaatgcacgccggcggcgcggcccatctgcgccagacggcagatgctgtcctccacgtccttgggggcgaccatcatcaggtccgccagctcgtcgatgatcaccaccagtgtgggcagcttctcctccccgttctccagcaggtactggttatagcccttcaggtcgcgcacgccatgcttggcaaaggccttatagcgcgtcgtcatctcgcttagcgcccaatttagcgccccagccgcctttttaggatcggtcaccaccggggtgagcaggtgcgggatgccattgtaaacgctaagctccactaccttggggtccaccatgatcagctttacgtcctccggagcgctgtggtacaacagactgatgatcagcgtattaatgcacacgctcttacccgagccggtagcccctgcgatgagcagatgcggcatcttggcgatatctgctacaatggtcttaccggcgatatctttgcccaaagcaaaagccgcttttcccgggtaatgctgaaattcctcactttccagcaattcccgcaggcagacggtggaaatgtcgctcttaggcacttcgatgccgatagccgccttcccagggatgggcgcctcgatgcgcacgccggtagccgccatgttcagcgcgatatcatccgccaggttgacgatgcggctgaccttgatgcccggcgcgggcgccagctcataccgggtgatggccggcccgctgttgacgctgagcaccttggcggaaatgtcaaaactggccagggtatcctccaaaagcttggcgttttgatgttgtaactgctcctgggccatggcgttgccccggcgcgccggcagtgccaaaagctcaagcggcgggaagcgatagggcgcggggccctgctccccctcgccggcgtgcggcaaagccgtgtcagccggttgccccctgtcatctgcgcgtgtattttgcggcacgtccagcgtctgcgcagccgcctcgggctcgaccgcaggctcccaaagctcctctttccagggagcctcctgtacagcgcctggactttccgctgcccatgcgctatccgctcccggttcagcctcgtcctgcgcatactccggctgcacgtcgcgctccagcggcgggataacggcgttccaatccgtttccatggggggatatacctgatcgagcaccgcgtttttctcttcgctggtcaacgcgccgtcctcggtgacaaacggggtctcctgcagcgaatccatggccgtaaactgcaggtccgcttcctcatcccgcagcagatggctctgcggctgggtagacttctgctccctcttttttgcctttgcgggcttgtattcctccgcctctaggtcgataaagccccagcgttttttccgtgggggctcctgctggccgtcgaatacatccctatcgtagagctgcggctcctcccggtcgatgggcatgtccacagcctgttcccgctcttgcgcctcctgctggcggatctcatcgatataaagctgctgttgtttgcgcttttcccggtgctgatcaacgtgttgcttgatctgggtatggatttcctcccccgtatcccgcagggagatattaaagatcaccactacagcgatagcggccagcgtcaaaaaggcgatgtaactgcccgccacgccgatgaatttctgcagcggatacacaaacagcgtcccgaccacgcctgcgccgatatgctctgcaccacagacctgataggccgacataatattggcaaaataagaatccccgctgaaccgatcccaaaacaacagatgtacaaatcccatcaaggcaacaattaataccacctgcatcaccgtgcggccggtggcatggtggttatatttaccaaagatcagccagcagccaatagccataagccccagtggcagcacataggcgcccagacccagcccgccgaacagcacatccgtaaacagggttccgatctgtccggtccagcgcatggcgctgggcacaaacacgcaaagtaacaaaaaaaggcttatcgctatgacgataagaccgctgatctcccgcgatctgcgctcctgcttggtatagcgcgtctttctagactttctcttttttttcgtttgggtagccaatcgtagttcctctccaacgctttattcaaaaatcttctttacacactactacattataccgcccatggccgctaagttcaaacgaattcggcctttcccacaagaaaaaacagggcatgcaaaaagcagccctgtttcgctaaaatccaaccaatttagccgtttattcctctgccggcaggtcagcctcggtaatgccgcggcggatcaggttcacccggcccttatcgtcgatctcgataaccttgacgatcacctcatcgccgaccttgacctcgtcctccaccttttcgacccggtggtcggccagcttggagatgtgcaccataccgtctttacccggcagcagctctacaaacgcgccgaagttcatcagccgcaccaccgtgccgcggtagacctggcccacctcgatctccttggtgatggcctcgatcatcttgcgggcctgtttggccgcgtccgcatcgttggtagagatgaacacgctgccatcgtcctcgatgtcgatcttcacgccggtctcggcaatgatcttgttgatggtcttgccgcgggggcccaccacctcgccgatcttctcgggattgatggagaacatgacgattttgggcgcataggggctgagctccgccttgggggcgggcagcactttgagcatctcgcccagaatgtgcaggcggccttcgcgggcttgggccaacgcgccgcgcaggatctcctcgccgatgcccttgatcttcatatccatctggatggcggtaatgccctcggccgtaccggctaccttaaagtccatatcgcccataaagtcttccaggccctggatatccgtcaggatcacgatcttgccggtctccggctcctgcataagccccatggcaacgccggctaccggcgctttaatgggaacgcccgcatccatcagcgctagggtagagccgcacacgctggcctgcgaggtcgagccgttggagctgatgacctcggataccaggcgaatagcgtacgggaaatctgcctcatctggaatcaccggttccagcgcacgggccgcaagcgcaccgtggccgatctcgcgccggccggggccgcgcatgggcttggtctcgcctacgctataaggcggcatattgtagtggtgcatataacgccgggtctcttcctcgtccagcccgtccaacttctgcatatcgcccaccgcgccaagggtggccacggtcacgacctgggtgagaccgcgggtaaagatggccgagccatgggtgcggggcaaaaatccggtctcgcaccagatggggcgcacctgcgtaacgctgcgcccatccggacgcacgccgtctttaatgatcttgccgcgcatgaccgctttggtcatgccgtaaaggatatcggaaatctgcccggcggcctcggggtacttctcggcaaatgcctcctgtacctcctgctccacctggcgctcgcgggcgcgcagctcatcccggtcaaaggtatccaggctccagaccaccttatcctgggcgtaggcgcgcacttcagcttccatctccgggtcgggcttgggctctacaaactcgcgtttgggcttgccgcactcggcgataatcttctcttggaaggcgacgatctccttgatcgtctcatgcccaaagaggatgcccttgagcatctcctcctcgctgaccaccttggcgccggcctccaccatcatgatggcgtctttcgtgccggaaactaccaggtgcatgcggcttttttcgcgctgctcgctattggggttgatcacatattccccatccaccaagccgaccacaaccgagcccgtgggcccagcaaacgggatatccgacaaacaaagggcgatggacgaaccgatcatcgcataagtatccggtggaatttcggtatccacggacagcgtggtcgccacgatatgcacatcgttacggaaccctttggggaacagcgggcgaatcggccggtcgatcagccgagaggtcagaatcgccttttcggtgggcttgccttcccgtttgatgaacccgccggggatcttgcccaccgcgtaaagtttttcctcatagtccacgctgagcgggaagaaatcgatcccctcgcgcggcttttccgaacaggtagcgcaaaccagtaccaccgtatcgccacagcgtaccagtacggagccgcctgcctgcattgccagccggccggtctcaatgctgagcttgcggcccgccagttccatttcatagaccttttgattcatcgaaatagggactcctttcaccttgacaacaagatactttttcataagaatagagcggcataaacgcccgctctattgcttaaatcctttatttacgcaagcctaactgcgcgatcagcgtacgatagcgctcgatgtccttgcccttcaagtagttaagcatgctacggcgctggccgaccattttcagcaggccgcggcgcgagtgatggtccttcttgttcaccttgaggtgctcgttcaagtggttgatacgctcggtcaggatggctacctgtacctccggagaacccgtgtcaccctcgtggcgctcataagctttgataatctcggtcttctgattcttgtccatgttgaaataaacctcctaatttttctccaatccccttaaccaaagcaagccgtcggagtcgtcgaaccacttaggctaaggatcatatggatgtacaaaatttattctaacataatcgctacagcttgtaaaccgattatggcgattatattttcagcccttcccaggcacgggcgatgcgaacatccttttcgatctgcgccttgagctgcgccacgcccgagaatttgacctcgccgcgcagttttttgataaagcgcacccggatcaggcggccataaagatcacctttataatccagcagatggctttcaaccgaaagggcgccctgctgcgccaccgtggggttgctgccgatattcgtgaccgccgtatgccaaacaccatccgtccacacctgagcaatatatacgccccgcggcggcagctgccgcgagggcggcggcacgatattggccgtgggcaggttcatggtcctcccgatctccctgccgtgcaccacttcgccccgcagctcatagggccggcccaagagcgcacctgccttttgcatctctccgctgtcgatacagctacggatcagggtagaagacacggtctcgccccccaaagtgatgggcggcaccacatctgcggtaaagttataccgttttcccgcctctttcaacgtgtgataatctcccgcgccccggtgcccaaagcgataattgaagccgaccaccaaatggctggggttatagcactgcgctaaatgcttaataaagtcttctgcctccatcgccgccagcgccggggtaaattgcagctgaatgacaaagtcacaccccatgtcccgcaatgcggaaaggcgctccatattgcccatcaagcgctttttgccattttcaccggtcaacacggtggaagggtggttagcaaaggtgaacacgccccacgtaagcccacgctcccgggcgatccgctgggccttggccatcagcatacggtggccgatgtgcagcccgtcaaaggcgcccagggccaaaacgcagcccgcagctgcctcgtcccgcgtccagcgcgtcatcaaacgcatgcttctccacctccgctccacagcatggcgccaaagcgccaaagcttctctttgcccgtatccggtcgggccatgccgtaaaattcgccatcacagtacacccgtacggtagctgcattttctatgggccgttccagccacgccgggtcgatcttcgcgccgctttgcagcctgcgcttccacttaggcgccaccactgccgccgggaaatttgcgacgccgtaatccattggcaggagaatatcttccatgcttccattctttaccgcagcgtccacttcttccagcgtcaccgcgtcctcgatacaaaatcgtccgctgcgggtacgcagcaaaaaggaaagatacgccccgcagccggccgccgtacccagatcggccgccaaggtacggatataagtcccccgcgagcaagccacgcgcagcagataccgccggtcttcccagcagcgcagcagttcgatctgatcgatccgcaccctgcggctgggtatctccaccgccgcgcccttgcgcgccaggtcgtaggcgcgtttcccgccgatcttaatggcggaataggcgctgggccgttgctcgatctcgcccagaaaccggggcagcaacgccttaaactgcccgcagggcagcctgccgcctgtttgggccacgatctgccccgccgcatcctgcgtatcggtctgcgcgcccagggtcacctcgccgatatagaccttgtcgtgctccatcaagtaatcaaaaagccgcgtggccttgccgatacaaaccggcaatacccccgcggcatcgggatccagcgtgcctgtgtggccaatcttgcgtacgcccaatagcctgcgcagggccattaccgcgtcgctcgaggtcatccctgccggttttaaaaggttaatgacgccatccattccttacatctccagcgcctgacaaagcgcgtgtttcatctcttctttcgcttgatcaaggggcatcttaagcgtacagcccgcggcgcgtacatgcccgcccccgccgtaagatgccgcgattttctgcacgtccacccggcgtttggagcgcaggctgacgcgcaccacgccatccgggccttcctttaagatcgccgcgatctccaccccctggatatcccgggcatagtcgatcataccctctgtttcgccctcctgggcgccgcaggcctccagccagctgtacgcgcagctcagcagcgctaccttgctgtggtgcagcaattcaagcgtggaaagcacttgcgcaagcagccgggtatagcccaccgtcgtcctgcggtaaagccactcggtcaaccgcgcgctgtccgcgcccgcctccagcaattccgccgcggcccggtgcgtctgcgccgtggtattgctatacgaaaagtggcccgtatccgtagagatcgccatatagagattggcggcgatggaactggtaaagccaactcccatatgatggataagggcacacatcatctcgcccgcagacgaggccttaacatcccgccacccgctcatcacctcgccggactcttccggcacatgatgatccagatacgtcacttcttcgcacttatccagcacctgggcgctatcgcccactcggccgggatgggagcagtccaccaaaacccccaggtcataacccggatcgtgaggattatactgcaccacttcctgcgccccgcacagtatcatctgcttgtcggtcagcttatccgcgctaaaaaccacagcctgcttgccggccatgcgaattgcctcggccagcgccaggctagaacccagagtatcgcaatccggcgagacatggcacagcagggcgacccgcccggctgcatggatcttagcggccagcgcttctaacggttcattcttcatccgcgttctcttcctcagtttcaggtttgacatccaggtcacgcaatattttagcgatctttacgccatactcaatagaggtatccagctcgaagtgcagctgcggcgtgtgatgaatatgcagccgctttcccagctccctgcgcataaaccccgccgcgctctccagcgccttgatggagtccttctgagccgtttcgtcccccatgacgctgacgcgcaccgtggcatgggaaaaatcccgcgccaactctactgaaacgatgctggccatctcgctcaaccgcgggtcgcgcaggcgcaggcgcatcatttcgctcaactctttttttatatcctccgccacgcggtcagttcttacgtaggccactttatttctccttatccattacttatgcgggctccacctgctcctggataaaggcctcgatcacatcgttctctttaacatcgttaaagttttcaaggccgataccgcactcaaagccggtcgccacttctttggcgtcgtctttaaagcgcttgagcgagtcgatcttgccctcgtagatgacgatgttgtcccgcgtcagacgcacctccgcattgcggcggatgttcccgtccgttacatagcagccggcaacggtgcccacgccgctaaccttaaaggtagagcgtacctgagcgtgcccgatgaccacctctttaaacacgggggcgagcaggcccttcatggccttctccacatcctcgatagcattataaatcacgcggtagaagcgcaggtcaacattctcagcctcagcggcggcggccgcattggcatccgcgcgcacgttaaagccgatgataatggcgttagataccgaggctagcatgatatccgtctcggtgatcgccccagctgcgccgtggatcacgcgcacgcgcacctcgtcgttgctcagcttttcaagcgcctggcgcacagcctcaaccgagccctgcacgtccgccttgacgataatgttcagatccttgacctggccctcggcgatctggttgaacagatcgtccagagagaccttggccatagatttagcctgctgtgccttgatcttatcgcggcgctcctccgctacctggcgggaaagtttatcttcctccacggcgttgagcacatcgccagcctcaggcacttcgctaaagcccagcacctccacaggatcggagggataagccgcctctacccgctggcccttgtcattgatcatggcgcgcacgcggccataggccacgcccgccacgatggtatcgcccacgcgcagggtaccgttttgcaccagcacggtggccaccggaccgcggccgcgatccagcttcgcctcgatgatggcacccttggccttgcggtcggggttggccttgagctcttgcacctcggccaccagcaggatcatctccatcagcttttccaggccttcctgcgtcttggcagagaccggaaccatgatggtatcgccgccccagtcctccgagaccaggccctgttgggtcagttcttccatcacgcgctggggattggcgccgggtttatcgatcttattgatcgccacgatgatcggcacatccgctgctttggcatggttgatggcctcgatggtctgcggcatcaccccgtcgtccgccgctaccactaggatcgcaatatccgtcacctgggcgccgcgggcacgcatagaggtaaacgcctcatgccccggggtatccaggaaggtgattgtcgcgcctgccgccttgatggaataagcgccgatatgctgggtaatgccgcctgcctccgtcgcggtaacgttggccgaacggatagcgtccagcagagaggtcttaccgtggtcgacgtggcccatgatggtgaccaccgggggacggggctgcaattcttcctgatcgtcctcgcggtcatcgtcggccagtacctcttcataggtcttctccagcttctgctccaaggtaatgttatactcggatgcgaccagctgcgcggtatcaaaatcgatttcctgattgatggtcgccatgatcccgatcaggaacaattttttaatgatatccccggccggtttgccgatcttctccgccagggtcttgatcggcaccatctccgttgtgatcaccgcatgctcaatcttaatgggctcgatcacatgcgcaggcgcctgctttttcggtttgcgccgtccgcgcacgcgctcatcatcccgcatgaccgcgcccttctccacaatgcccttacgcggcttggccttgcggtcattatcgtaattgcggttatagttgctcttattcggatcgtaattacttacgcgctccttctccaccgcgggagtctcaatggctacgcgcggcgccgggcggttaaatccgccgggacgctgcgggcccgccccgccctgcctaaagggcggacggttaccctgctgcccctggccgccatagggacgacgctcgccctgaggcgcgccgccctgccggttgtatggcggacgattgccttgctggccttgactataaggccgccggtctccctgctgcccctgaccgccgtagggacgacggtcgccctgctggccttggccaccatagggacgacgctcgccctgaggcgcgccgccctgccggttgtacggcggacgattgccttgctgaccctgattataaggccgccggtctccctgctgtccctggccgccgtacggacgacgctcgccctgttgctgcgcagccgcgcggggcgcattttgcgccggggctgccgtctgcgcaggccgtacctgctgcggggccgccggagcctcctctttaggctcttgtgccttgggcgcttcctgcactttgggcgcctcggccttttccgccgtttcggttacaggcgctttttcctccacttccggggtggattccaacaccgcgcgccgcatatcggccacgcgctgctcgcgctgcaggcgttcctgctccacagcgtcgctgcgttcgcggtccgccagcgcctcctccattctacggatgacctgcacgtgcgcttgcacgcgcttttgagtatcgtgtacctgcgcctgtgctttctttgcactttccgccagtgcacgggtcatctccaggatgtttgttttgctcatataattcctccacccccaggttaattgaaaaacgccttacggcattaatttatccgcaatcatctttgcgaatgcggcgtccgttaccgccgaaacgatacgcccaggcttgccaatggcctgccccaggtcgaaatcttctaaaataaaacaggggattccgcgaaactgcgccgcctgcacatattgtttttgcgcattggctgccgccgttgcgtctaccaaaaggcagcaggcctttttccccttcaaagccgcctcaaccgctacctcgccgctggcgcactttcccgcgcgcgcagcaaggccaatggctcctgcggcctttttaccattacagttcacggcgcagcagctcccttgccagctggtcgtaaagcgcctcgtcgatcttcttatccagcgcccgctccagcatacgcgccttcacggccttttgcaggcacgcctccgatgcgcagatataagccccccgaccggactgtttccccgtccggtcaaagctgatatcgccttcggcggatttgaccacccggagcagctcctttttgggtttcatctcccggcaaccgacgcacatgcgcatgggtaccttcctggtcttcaaagtctattcctccgcgtccgtaaaatcaaaattctccagcggctcgtcctcccagacgacttcttccccggcgtcctccgccatcagcagggcctgcgcctggctctggctcttaatatcgatcttccagccggtcagcttagcggccagccttgcattttgcccctctttgccaatggccagcgaaagctggctgtccggcacgatcacccgggcggcgtgctcgtcttccagcacctgcaccataatcacccgcgccgggcttagggagttggcaatgtaatcgatcggatcggcattccacttgatgatgtcgatcttctcacctttcagctcttctacgatgcgctccacccgcgtgccacgctgccctacgcaggcgcccaccggatcgatagcctcatccgaggagtaaactgccatttttgtgcgggagcccgcctcgcgcgagatactcttgatctgcaccacgccgctgtggatctccggtacttccagttcaaacaagcgcttgaccagcccggggtgcgtgcgcgaaaccatgacctgcggccctttattggtctttttcacctcgaccacatagaccttgaggcggtcgttgatttggtattcctccccgggcatatgctcgctgggcagcagcacgccctcggccttgcccagctccacatacacgttctttttctcgattcgctggacgatagccgtcaaaacctcgttttccttctcgatatactcgtcaaagatcatgccccgctccgcctcgcggatgcgctgcattaccacctgcttggccgtctgcgccgcgatgcggccaaaggacttgggcgtgacctcaaactccacaagatcccccggctcatacgcccggttgatcttgcgcgcctcctctaggcccacctccagcgtatcgtcctctacctgctccaccacgtttttaatggcgaatacccgcacatctccgctttcccggtcgatattgacgctgacgttgtgcgaagagccaaaattgcgcttataggcggagaccagcgccgactcgatggtctcgatcaatacctcgcggctgatgccccgatcccgcgcgatgatctcgatcgcctctaaaaattcgttattcattgccttgcatttcctccccttgtctaaagcagtacctctcagcttcttaaatcatttcaaataccggtttgaccgcggcgacgatcttgcggtcaaaacggcgttcctttccatcaattaggatcaccacatcctcctgggtgcggcctacgagctcgccctcaaaggccttttgcccatccagcgctttataaaggcgcacctgcacagggctgccggccatgcgtacaaagtccgcatcccttttgagcggccggtcccccggcgaggagacctccagataatcgtagtcgatatcgtcaaacaaatcccggatgcgcatgtgaaactcctggcaatggtccaaatcaaccccgccgggcatatccacaaagatacgcataaaacgggcctgcccctctttgcgcagctccacatccaccaggtccatcttcatctcctgcgcgatgggcaacacccgcccttcgatctgggattcaattttactgggcatccgttcacgctcctacatcacaatgtcataaagacagtctaaagatttcaccgtaaatacaacagaaagagtggggactaggcccactctttagtctcatcattcatcttcaaaattacatgctatcacgcggctattatagcatactgcaagggccatttgcaagggctaaaacagcgtaacctggctggttttgggcaaatcgcccagacagcccatctcctccatcacttcgagcaccgaacggctgagcttggtgcggcgctgaatttcttcgatggagataaatttcccgttcttgcgctcctccactacagactgtgcggcgtttgcccccaggccggggatggcggtaaagggcagacggataccgccctcttcgatcaaaaattccgtagcgtccgaggcgtacaggtccaccggcaggaactggatcccccggcagtacatctcaagagaaatctccagcatcgttagtatggacttttcccggggagataatccattgcggccgtcaaattctttgatcttggctttgatgcccgggatgccgccggtcaccatacccgcctcaaactcgtcggcacgcacggtaaagtaggtggcataaaaggccttggggtagttgaccttgcagtaagcgatgcggaaacccatcgtaacataggccaccgcgtgtgccttggggaacatgtacttgatcttcttacacgagtcgatgaaccactcgggcacgccggcttcccgcatcttaggctccatatccaccgccccgtccttgcgctttaaaaccaagcccttgcccttacgcacgctctccataatggcaaaagcgtccgccgagtccatgtagttcatcagctggttcataatatcgtctcgggtacagatgcactggttcaggctgcacaccccgtcccggatcaggtcctgggcgttattggtccacacatccgtaccgtggctcaaaccggatatgcgtaccagctcagccatggtggtgggttttgtctccaccagcatctggcgcacaaagcgggtgccaaattccgggatgccgaaggtccccaccgggcagtcgatatcctcaggtgtgatccccagcggctcggtagaggaaaagatctgcatggtcttggggtcatccagcgggatctctcgggcattgatgccggtcagatcctccagcatgcggatgctggtgggatcatcgtggcccagaatatccagcttgaccagccggtcgtgcagggagttaaagtcaaaatgggtggtaatggtgccgctgttcacgtcgtccgccgggcgctgcactgcggtaaactcgtggatgtcacgatccttaggcaccacgatgatgccgcccgggtgctggccggtggtgcgcttgacccccgcgctacccttgaccagacggttaatctcggcattcagcgccacgcggcccttatcctccaggtacttgcgcacgtaaccataagccgtcttttcggcgatggtggcgatggtaccggcacggaacacgtggtcgctgccgaacagctcctccacatacttatgggccgtaggctgatacaccccggagaagttcaggtcgatatcaggcactttgtcgcccttaaagcccaaaaacacctcaaaggggatgccgtacccctgcttcttatagggcgttccgcactcggggcagaccgcgtccggcaagtccacgccggtaatatccgccatgccttcctgatgcacgaactcgcagtgcttgcagttggggcagatatagtggggcggcagcgggtttacctcggttatatcgcacatagtcgccacaaaggaggaacctaccgaacctcgggagcctaccaaatagtggtcgtccagcgactttttcaccagcttatgggcgatcaggtacagcacggcaaaaccgttgttgatgatggcgtccagctcctttttaagccgcttttccaccacctccggcagtacctcgccgtagatctcatgggccttttttgtggccatttcgcggatatcgtcatccgccccatcgatgcggggcgcgtgcagatcgtccggataaggcttgagcgaatcgcatttttccgcgatgacccgcggcgcgtgcaccaccacgcgcatggcctcctcctgccccaggtagctgaactcttccagcatttcatcggtggatttaaagtagagcggggattgctcgtccgcatcgtcaaaacccatgccatgggtcaggatcgcgcggtactccgcatcgtgcgggtgcaaaaagtgcacatcccccgtggcaaccacgggtttgctgtacttttctcccagggcgatgatccttttattgatgtcgtgcagcgcctcaaaatcaggcagcgtgccctcccgcaccaaaaaggcgttattggcatcgggttgaatttcgtaataatcgtaaaactcggccaattcggcgatgcggtcatcatcctcgccgtttaaaaaggccttgaacagctcacccgcctggcaggcagaacctacgatcaacccgccccgcaggcgatttagcagcgtgcgggggatgcgcgggcggcggtggtaatacttcaggtgcgaggcggaaaccagcttatagaggttttgcagcccctcctggttctccaccagcagcacgatatggtaagagggtaactttttggtatccacctgctcggaaaacgcgccgttgacctggctgagccgctccagccccatctcctgtagctgttctagctgcttgagcaggatcagcgccgtggcctcggcatcgtgcacggcccggtggtggttcttcagcgagacccccagatgatccgccacgatattgagcttgtggctgcgcagttccggatacaggttgcgcgccaaggtgagggtatcgatcaccgtaggctcaaaagtccacccgttctgtttggccgtatggcggatgaacgatatatcaaagggagcgttgtgggcgcacagcgccgcatccccgcaaaaatccagaaactggcgcactacggtggcattatccggcgctgcggccaccatctcatcggtaatgccggtgagcttgacgatattgagcgggatgggcctgccggggttggtaaagctggagaaccggtcgatgatctccccgtcccgtaccttgaccgcgccgatctccgtgatgccacacttggccacgctaaggccggtggtttcgatatcgaataccaccgtctccgtgtgcaattgcttatcccccggcctgcgcacgatgggcaccgcgtcatccaccagatacccttcgacgccgaagatcgccttcatcccattggccttggccgcggcgtacgcatccggaaaggcctgcaccacgccatgatcggtaatggctacggcctcatggccccaggcgtgggcctgcttgaacagatccttgaccggcgtaagcgcatccatggcgctcatctgggtatgcaggtgcagctccacccgcttaacctcggccgtatccacccgcaccggcgcctcagccgcgccgatgtcgttagccataattacggtctcccgctggaatttgtcaaataccaccgggcccttgacccgtacataaccgccgggcttcaagtgatcctgcacgccgctgttgggttccacaaacagcttgacagaaaaggagttggtgtaatcggtcatatcaaagttgatgatctgcttgccgttgcgcagatctttgacttctacgccgatgatctccccctcgatacagaccgtgccggaatcctccgccagctcgcgcatggggatgggtttggtcttgatggcgttgccataaatgacggaaggggtagcgctctttttcttctccggctttttacgtgcctctttcaacgtctggctgagtagctgggccgtggcctgcttttgcagctcctcgtgctgggcaatggcctcatcctgcttgcaatcgcaggtgaattctacccgcatctcacagccgaactggcttttgatgatctcctccaacgcctgggctccgccgcaattccgcaggaaatccctgcccgcggggttatggacctgcacgttgagtttattgccctcgcttttccagtcggctcccgccagccacatgcgcgccgagggcaatttctcgctcaatccctcggccaactgcgcggtatactggggcaggtcatcgcgcagggcatcccccatatcggggtagaccacggatacctctacccggctccaatccttaaattcctcctgcagggccttctttaagtcggccagctcctgggcggggatacagcttttccccgcaagggaaaagaccagttcctcccgcttgggattcacccgcaccccctgcagctgtaaaagggactgccaatgggccagtcctccccgctgtgtaatcttctgccatccctgctgtaacgcctttgccgacaacctttaagaccccttttcccaaaataacgcttaattttatctcttatcgttttgaccctgccctggtcatctccaggatctcctgcgccaaccggctggccagctgatccccgggcacggcgcatacctgctggccgcgcttaaagagcacgcctttatccttgccgccggcgatgcctacatccgcctgccgggcctcgcctgggccgttgaccgcacagcccatgatcgccaccttgatgggcgcctccacggtacccaccaggcgctctacctcatagacgatctgttccaagtcgatattgcaccgcccgcaggtgggacaggaaacgatctccatcccctggcggcgcagccccaagctgcgcaggatctcgatgccggtctccacttcgcgcaccacatcccccgtcagggagacccgcagcgtatcgccaatgccgtccagcagcagcgcgccgatgccgatggcgctcttgacgatcccagccctgggcgtccccgcctcggtcacccccaggtgcagcggatagtcccgcttttcggccatcaggcggtagctttctaccgtatcgcgcacgttagacgccttaagcgccaccacgatctggtcgaagttcagatcctccaaaatcgcgatatgctccatggcgctctctaccattccctgaggcgtggggccatggtacttgtccaatatctttttatccagcgaaccggcgtttacgccgatgcggatgggaatattccgctccttggccgcagaaaccactttgcgcacccgcccgggttccccgatattgccggggttaatgcgcagtttatcgatgccctgctcgatcgccttgagcgccaggtggtaatcaaagtggatatccgccaccagaggcatgccgctctggcgcttgatctcgccaatggccatggcgcaggcctcatcataaatggacatgcgcacgatatcgcagcccgcgtccttcatccgcatgatctgcgctaccgtggcgtcaatatcccgcgtatccgtattggtcatcgactgtaccgggatgggcgcgccaccgccaatagggatgccgcctaccgtcacttgccgcgtatttttcctttgcatattcagctcccgctcctttatgtccctgggaatatcagcgcccggatatcctggaaggtcagcaccacaaacagccccatcataaagaccagcccgcaaaagtgcaccatgccttctttctccggggggatgggcttgccgcggatggcctcaatggcgatgaacaccagccgcgccccgtccatgccggggatgggcaaaaggttgatcacgcccaggttgatgctgatcaaaacgccaaacatcatcaggtttttgatcgccagggtgatggcgtcccaggtcccggcaaagccgatcttggccgcatcccccaaaatgctgacgatgcgcaccgggccgcccagatcctgcgcgccctcaaatttgaagatcaggtttttaaggaatacgaacatctgggtcacgatatccaccagcatctgcccggcctgcttgatggcctcaaaaaagcttaaggggatgcgctcgccaaaggtgatgccgatcagataactctgactggcttcgtcatataccggcgtcatgaccaggttctccacgagctgaccctcccgctccaccgtaagggtgatgggctgggtagggtctttctgaatctctgtcctggcctgggaagcggtctccaccgtcacgccgttgaccgatacgatcttatccccggccatcagccccgcctcaatggccggacggccttcgtccaccgttataatccggctggaataatcgccgccgaaaaacatcagcaacagtgccgccaccacaaaggcgaacacaaagttcatcagcgcccccgccgccaccatgatggcccgccgccccacggaaatattattcatggccctggggtcgtcgtcggattcatcctcgcccaaaaagcggcagtatccgccgatgggcagccagcgaagggaatacatcgtgcccttgcgctctttttggacgatcttgggtcccatgccgatagaaaactccaaaacctgcatgcctaccgccttgccggcgataaagtgaccaaactcgtgcaccatgacgatgatgctcagtgccaatagcgcgatcaggatcgcgccgatgtttgaaaaaatagcgcccattgcatttcctttgtccttacttatttgcagcccagatgcgcgacaaccggtcggcctctacgacctctcctatcgtatccgcctttaaatgcgccccctgctctaaagcatattctaccaatcttggaatatccataaacctaatttgcgaatttaaaaatttagccacggccacctcgttcgccccgttgagcaccaccggcgccgcgccgcccgcccgcagggcctcgtaagccaggcgcagacaggggaagcgcgcaaaatccggctcttcaaaggtgagcggcgggcaggtaaaaaggtccagatgctgcgccgggctctccatacgctttggatagagcagtgcatactggatcgggatgcgcatatccgccacccccagctgtgccagcacagatccatcgcaaaacgccaccgccgagtggacgatgctctgcgggtgcaccgctacctgtatgcgctccggcgccaggccaaatagccagcgcgcctcgatcacctccagccccttattcatcatggtggctgaatcgatcgtgatcttcgcccccatggcccagttggggtgattgagcgcctgctccaccgtgacctgcaccatctggtccgcagtatagcccctaaacggaccgccggacgccgtcagccatattttttctacccttttgtcgtccgcgttgccctggatgcattggaagatcgccccatgttcgctgtccacgggcaagagctgtgccccgcccttgtgaaccgcctccagcaccagcgccccgccggtgaccagcgcctccttattggccagggcgatgcgcttgcccgccttggccgcaaccagcaccgcctccaggcccgcaatgcctaccaccgcaaccaggcaggtatccgcgccctcccaggcggccatggcgatcatggcggcgcggccggtgaccagctgcgtgcccttaggcacctccccggcaatgcgcgcggcggccgcctcatccaccaaacaagccatagccgggtggaaaaagtggatctgctccagcaatttttccgcctggctgtaggcgcagagcgccgttacttttatcttatctgggtgcgcagccgcaacggacagcgcctgtgtgccgattgaaccggtactgcccagtaccgccagcttgattttatccgtatcgcccaaaaaacgcgcctcctaaccctacaagaggaacaacgtaaagtatccaaataccgccactgcgttaaagacgatgccgtcaaaccggtccatcaccccgccatggcctggaaagactttgccataatccttgataccgcaaaaccgcttgatctgcgaggccgccagatccccaagctctccagccagagagctgagcacagccaaaatcgcaaaatgccacaggggaatgcccgcgccctgggcaaaataccctactcccatgcagaagatcaggttccacacaaagccgccaatggcgccctccaccgtctttttggggctgatctccgggcagagcttgtgtttgccgatgaaggtgccggtaaagtacgccccaatatcgcagatggacgaacccgccaccgcgatgagcaggccgtacagacccacccaataatccggccagtggttgagcgcgatcaaaaacgcgaagggcagcgagggatataaaagggtaaacgaacctgcgataatgttatccacacttcgcccctcgaacagcgcacaggtcatctgcgccaccaggcaggcggaaagcaggatcaccgcgccggtaaggcccttccacaaaaaggccggcagcagcaggatgccgaaaatatagaccggccaccgcccgatcttgggatatttacttttgagcgccgtcagcacttcccactgggccaccagcaaaaaggcaatcagcatcaggtccgccgcccaaccgcggaaggtcagaaaaaacgccaccatacatagcgcgacgatacccgttatgatgcgtgttcccatttcatctacgtccttctgcccggaaagggcgtttttttggttgccaacgatttattataccatatccccgcggtttaaacaccgccaaatcgcctgctgcggctttggtagatcgcgatcgaccggaaaaattcctccttggtataatccggccagtacacatcggtaaatacgaactccgcatacgccagctgatagagcaaaaagttgctcagccgctgttccccgctggtgcggatcaaaaggtccggctcgggcaggcccgccgtaaacaggtaccggccaaacccctcctcatccagcgcttcggcctgcacgtcgcccttggcaacgtccagcgcaaagcgcttggccgcctgcacgatctcaccccgtccgccataattaaaggcgatgttaaacttcagccccgtgttatcccgggtacgcacgcaggcgcgctccatcacctcgcgcacgcgcgagggggtctgctcctcaaaccccaggatgcggatgcaaacgccgttgcggtccagctcgtcgatctttttttcaaagtattccaccagcaggttcatcagcatggtcacttcttctttgggccgcgcccagttctcggtggaaaaggcgtaaaccgtcagggcctcgatgcccagctcatcacaagcacggataatggtttccagcgtttccatgcccgcccggtgccctgccgtacgcggcagcgcccgctgcttggcccagcgcccgtttccgtccataatcattgcgatatgccggggcagtttatccggcgagcgatccagcgcgatagcgccggcctgcaccgcctttttcttgaaccacttcatttgtatggagcctctttcctaaaaattcgcccaaggccatcacaagacagccctgggcaaatatttcatcattccatttttgcgcacgccgctggcgcgtaggcaaaggcgccggcgatgatctccaccgccgcgcgctgcgtcccctgcgcgcccagcaccctgagcctaatcacgcgcaaatcctttaaccgcgcgtcgtaataccgtatacgctggggcatcgtcagcttcacccgcaaggtatactgtccgccaagcgcggccttcacctcttccagcggccagcccaggtatttttgcagctcatccattaaaccgacataacttccttttctttttgcgcaaggatgccgtcgatctctttaatggccttatccgtcgccttttgcacgtccgcttccaacgttttaaggtcgtcctcggtaatctcgctggccttttgcatctttttcagcgcgtcgttggcatcccggcggatggcgcgcaccgccaccttggcctcttcgccctgctttttcaccagtttgaccagctctttgcggcgctcctcggtcagctctggcaccactaggcggatcaccttaccatcgttggaaggatggatacccagatccgaggcgttgatcgccttttccactgccgagatcatgctggtatcccaaagggaaatgaccagcatccgcggctcgggcgccgagatattgccgatctgagtcagcggcgtaggcgtgccgtaataatctactgtaatgcggtctaacagctgcgggttcgcccgtccggcgcgcaagctggaaagctctttttggagaacactctgggtcttggccattttttctttcgccgtagccagtacgtcgtttgccattttgtaccgcctccttgtttaacttaactttattgtaccgaattttgccagcggatacaacctatttcttagagcagcgcgcccacgcgggtgccaaactcttcccccatcaccgcgcggcggatgctgttctcctcgttaaggccaaagaccacgatcgggatcttgttatccatgcacagcgtaatggccgttgtatccattaccgtcaacccgcggttgagcacgtcgatataatcgatctgcgagaaacgtttggcattggggttgactttggggtccgaatcgtacaccccatccacgtttttagccagcaggatcgcctccgcgtcgatctcagccgcgcgcagcgcagcggtggtatccgtcgaaaagaacgggttgcccgtgccgcaggcgaagatcaccacgcgccccttttccagatgccggactgcgcgcctgcggatgtaaggctccgctaccgcgcgcatctcgatggcgctaagcacccgcgtgggcaccccgcgctgctccatcgcatcctgaagggccaaagcgttgatgccggttgccagcatacccatatagtctgccgtcgtgcggtccatattcgtaccctggcgcccacgccagatattgcccgcgccgattacgatgccgacctcgatgcccatctggacgacctgaatgatctgatcacagatcttgccgaccacgtcaaaattaatcacctggccgttttctccgccgatcgcctcgccgctgagctttaacatgattcttttataagccggttctgccatgaggaaagccccctttacttaattgttgcaaaaaacgagaacacaaggtgttctcgttttttgagcatccataacggattatttcatctggctcataacctcgtccacaaaattatcctggcgcttctccaacccttcgcccatctcatagcggacaaagcggcggatattcatgttctcgccaatggtcgcgatctgctcttgcaccatctgattgatggtcttatcgttgtccttaacaaagggctgctccagcagacaaacatctttgtaaaacttctcgatacgaccctgaaccatgcgctcgacgatcttctcaggcttgccctcgttcagcgcctgctgacgaagaatttccatttccttatccagcacgtcctggggaacatcttcctttttgaggtaggtggggttcgccgcagcaatatgcatggcaatatcccgcacaaaagccttaaactcggccgtcttagccacaaagtcggtctcacagttgacctcgaccattacgccgatcttgccgcccatatggatatacgcctcgacaatgccctcggcagcgatgcgtccggccttcttagccgcagcggccagccctttttcacggagcagctcgatagccttatccatatcgccattggcttcattcagggcgcgtttgcaatccatcatgccgacgcccgtgcgttcgcgtagctctttaacctgttgcgcagtaatcatagcactttcctcccgatgcttttatcctaaagtttatctcagcttattcagcggcggcttgcgcagcctcggcctcggcttcttccatctgctcgccctggcggccttccagcacggcgtcggccatcttgccggcgatcagcttgaccgcgcggatggcgtcgtcattgccggggatcaccatatcaatctcgtcaggatcgcagttggtatccacgatcgccacgatcgggatgcccagcgcgcgcgcctcggacacggcgatgtgctctttacgcggatcgactacgaacaacgcgcccggcaggcggggcatcttgcggataccgcccaggtttttgagcagcttctcgcgctcggcgttgagctgcagcacttctttcttgggcagcacctcaaaatcgccgtcagcctccatcttatcgatgcgatccaagcgctggatacgggttttaatggttttaaagttggtcagcataccgcccagccaacgctggttgacataatacatgccgcagcgctgcgcctcgacctcaatggactcctgcgcctgctttttggtacccacaaacaggatatccccgccctgcatggcaatatcgcggacgaacatataggcctcgtccacctttttcacggtcttctgcaggtcgataatgtagataccgttgcgctccgtaaagatatagggcgccatcttggggttccaacggcgggtctggtggccaaagtgcacaccggcttcgagcagctgcttcatagaaataacggacataaaaaaacctcctcgttttttccttcccctgcttcatcttttatgggtgaccgctgtgcggcacgagcccactcatccactaggggtgtgtttttcctgaaaaattatatcataaccccgcaggcaatgcaagcgcgcattttggtcgcaaacatacctcaccttgtcggacgattgtcgatttttggggaaatagatatgataatgtatagaattgcatttcttttcactcaattcctaggacttttgcaaaaatttggagaggggtttttgtatgaagaaaatcatcacgcttgcactcattgccgccctagctgcattcagtaccgcgggctgtaccttcgcaccggccaaacaggcggccgcaacggtttccgccagcgcaacggccacagttgtaccggcaaaagcgacagctgcgcccagcaaggctgctgcaacggccaagcctgctaccgcatcttcagccaataaggggactacgggcagcgtgctctcccccagcgctcaatttaatgcgatagccgaaaaatattactttaagatcaccgatgtttccgatccagacctgtaccagcttacccttcctatcagttctgcgggttataccagcaggcgggatctggctgtggacgcgcttttacaggtcatgcgcctgttcggcgatgtgatccagctcgatcaggtcccttgtcagggcctcattatcagcatcaatctagatggccgggatatcgccgtggtttcggtgtacaccgccgtagacctgggtatgctggggaccaacgagcccatgatgctcgataccaactacagcgacgcttttaaatccgtttaccagcagtatttcgccgagatcgattataaaacgctgaccaaataactagtgataaatacaaaaaagcgggtaaatcaaaattgatttacccgctttttttcataaacaaacttattcttcttcctcttcttgttccatgatcgcaacgaattcgttaaaggccgcatccagctccttctcatcctcgatcacttcatagacctcgccgccatcaggctcctcgtcgatccgcatgatggtgaccatatcctcctcgtcctctacttgctggagggcgagataatgctttgcgttgtactcaaacgtcagcagatggtggaacgcgacgccctctccatcttctccgatcagctcgatcacttcgtattcgccattgtccgccaatgccattcccctcacttcgtcttttgtggttgcatgctcaggtaatccagataattttgtaagataaacaccgccgcgatcttatcgaccacgtttttgcgctttttccggctgacgtccgcttggatcagaacttgatgggccatgttcgtggtcatccgctcatcccaccagaccggctcaagtccgcagcccgcggccagcttttcgccgaaggcctgcgtcagcagagcctgttcgcgcaggctcccatccatggatttgggcagtccaatgactagcacatccgcctgttgaccggcgatcagctcacaaagcgcggcgatatcctccgcctcgcccttgcgccggtacaccgtaagcggctgcgccgtccagcccatcgcatcgctcaccgctatgccgatgcgcttgttgcccacatcaaggccgatggcgcgcatcagttttcctcgatatggagactatccagatagaatttgaccacatactccaatatctcatcccgctccagccggcggatcagataccgcgcattctggtggctggtgatataggtggggtcgcccgagataatgtagcccacgatctggtttacagggtcgtatcccttctcgcgaagcgcaacataaacccgggtcataatatcgcgtacggtcgcttcatcgtcacgcgatacttgaaattggatggtatcgttaaattcactcatgggttgcgctccttttcatttgcatgtcctgcggcgctggaaacctgaactaagttatattatacaggatagccccataaatttcaattcatctcctccgggctgatggttttcttttccacccgcgcccggtaggcgccctttaccacgatgcggatcatcagcatgatgggcacggaggtcagcatgccggctacgccaaaaagctgccccgccgccagaagcagcaccatgatatagagcgggtggatcttgacgctgtccccggtgatttttggggccaataccgcgccctgcaggctttgtgtcaccaccagcagccctaaggtaaagatgaactgccagctgccacccgccagcgatgccagcaggatggggatggccgcaagtacagggccaaagtacgggatgaagttgaaaaagaacatgagtatgcccagcagtaaccagtacgggatgccgataatggccagccctgcgccggttaaggttcccatgatcagcgccagcaggatcgtcccgcgcaggtatttccatagcgcggaatcgatctggcgcagcgtgcgcttaacgcctgcgcgcttgcccgcggggatgagcttggtcagctcggtcgcaaaataatccttatcctttaaaaagtaaaaggtgatgattggtatactgaaaagccagggtgaaatggccaaaaagccctggagatggctcatggtcgcctccagcagctggggccccagctcgggcaactgatctatatagttctgcaccagtcccgccaggtctacctggatattcatcgcctgcagcttttgatccaggctgcttacgatctggctcagacgctgcatattttcaggcagactgcccaccagtttagccagttcctcccccgcctggggcacgaataccccggcgatcagcaacagcacgaccaggatgccgctcatcaggaaaaagagggcatagtcccgccctgcccgttcccccagataggataccagagggtttaacagataagctaaaaacagcgcgcccagcagtgtccacagcaggttcaccagcatcccccgccacaatacggccaaaacgatcgccacagctgcagccagcccggctatgatataaattttctttttcctgttcataaggcaccgcctaaaaaagagggagaaatcctctccctctttcatttttccataacttctctttggatattagtgcatcgccttggcgatgtttctggcatagcgccgtgccatgcgtcggccctgcttgacccattgctgggtatttttctctaccatcggtgcggcgatcatccctacagccagccccacggcggctccggcgatcatcccggttgctgtactaaccttcatagagttcacctccttttttgcgcatcgtcttttcttcctcctgggtcacggcgatcagattcttgcggtcaggcagcaggccgaaatagcggataatggcatagcctttctgaatatctgccagcaacccttcggaaacctccaacgcatatactcggcaggagtggctctccaccaataggccggacagggtgccgagctcctcgcccgcgctgtccactacttttaaaggccagccctgctctcccggcggtttagccggcggcttgttccccgcagccgagcgattgactaaaatgctggctgcgcctagcagaacgatatcttgccgcgccgcatatgcttttttacgatatgcgcctgtgccacggaagtaaatcccatcgatataccgcgatccgggattccactgggcgccttctgcctggccgacgatcaccccatcgggcatctgtacgaccggaaggccggtcaattcctgtactcgtctatatcgcgccaatttcagccgctctcctttccgctcccttattttgtccccccactgccccaagcataagcggaaattcgaggcaaatcgcaataaaaaaagccatgctacttttttatagcatggcttttgccgttctttttatgtatgcgccgctttagcttttttgcatgtggttcttgcggtagtcctcaatggcggagcgcagcgcctcctcggccagtacggagcagtggatcttcacatccggcagcccgcccagcgcctcgatcaccatcttgtttgtgatggccagcgcctcgtcaatggtcttgcccttaatcatctcggtggcgacgctggaagaggcaatggctgcgccgcagccaaaggtcttaaactttacgtcgacgatccgctcatcctccactttgatgaagattttcatgatatctccgcacttggcgttgcctacctcgcccacgccatcggcattttcgatctcgcccacattgcgcggattcatgaaatgatccattaccttttcagtatacatctcctattcccctttcgcttccgtatatagcggcgacatctgccgcaggcgctccacgatacccgggagcttgtcgatcacgtaatcgatatcctcttgcgtattgtccgaacccagggagagccgcaacgacccgtgcgccgtttcatgattcagtcccatagccaacaaaacgtgggacggatccagcgaacccgaggtgcaggccgacccactggaggccgcgatgcccatcagatctaagctgagcagcatgccctcgccctcgataaagctaaagctcatgttcacgttattaggcagacgctccgttggatgcccgttgagcttggcgtaagggatcttggaaagtccggcaatcagcctgtcccgcagggcggtcagccgcgcgttctcctggggcatctgctcggtagccagctccagcgcggtggccaggcccacgatgcccggcacgttctccgtcccggcacggtgacgccgctcatgctcgccgcccagcatctgcgcctcaaagcggataccctttttgacatacagtacgcccacgcctttggggccgtaaatcttatgtccgctcattgagagcaggtcgatccccattttttccacgtcgatctccacctgcccaacggcctgaaccgcgtcggtatgaaagattacgttatgcgcatgtgccgctttggccagcgcctcgataggctcaatagtacccacctcgttattggcaaacatgatgctggcaaggatcgtgtcgggccggatggccttttcaaaatcctccacccggacgcgtccatactcatccaccggcaggtaggtcacctcaaagccttgcttttccagccactggcaggtatgcaaaaccgcgtggtgctcaatcgctgaggtaatgatatgcttgccctttttctggttggcgaaggccacgcctttaagcgccaggttatccgactccgtaccgccgctggtgaaatagatttcttctgccttagcgcccagcgcctttgctacgcgctctcgactatcttccaccaacttacgcgcctcgcgtccgtaggcgtggatgctggaagcattgccaaagctctggccaaataccggcagcatggccgccagcacctcgcttttaacatgggtcgtagccgcatggtccaaatatactttcttcattttacacaccccttataaggcttctcctgtgtattgaaagcgcttaggcgcttttcatcgtccaacatgctctgtaaggtgatgccgtccagcacctcgttaagcccatcgcgtatcttttcccatacgatctgggtgacgcacccgcctgaccgggcgcatttagcgccgccctcctcctcgttcataacgcagacggagggcgccatcggcccgtccagcgcgcggataatatcgcctacggtgatctcctctggcgcctttgccagttcataacccccctgcgccccgcggacggaacgcaccaaccctgtccggcgcagcgtcagtaccaactgctctaaataggcctcgctgatggcctcctgcatagcgacctcgcccaggggcagcggcccttcgccatagcttttcgccagggcaaacatcgcccgcaggccgtatcggccctttgtagaaagtttcacgctcccgcccccttttaaatcttgactaaatcactcggatttcaatatcagcatactaattccgacaagttttgtcaagtataaatttcgtttttctaccgatagattaaacgttttggggtcagcttatgcgaaaacgtttttttctccggcaaaggcaatggttaaaacgatatagcgattctccaagcaaaaagctcccgggagggttaaaccttccgggagctttacaaaacaactgaattggatcaattagtcgatggtgtcgccctcgtacagcgggaagctgcggcacagctccagcacctgcgcgcgcacctggtcgatgcagctttcgccctccaggatcacccgggcgataaagcctgcgatcttctccatctccggctccttcatcccgcgggtggtcagcgccggggtgcccaggcggatgccgctggttacaaacggcttttgcgggtcaaaggggatggcgtttttgttcacggtgatattggcctgtcccaacagtttttctaccagcttgccggtcagctcctgcgcgcgcaggtccaccagcagcaggtggttgtccgtgccgccggataccaggttgatgcccttggcactcagacccttggccagcgccgcggcgttgagtacgatctggtgctggtaggccttgaagtcctcgctcagcgcctctttaaagcacacgcccttggcggcgatgatgtgcatcagcgggccgccctgggtgccggggaagatcgccttgtcaatggccttcgcgtattcctccttgcagagaatcaagccgccccggggaccgcgcagggtcttatgggtggtcgtggtcacaaaatccgcatagggcaccgggttgggatgctcgcccgcagccacaagaccggcaatgtgggccatatctaccataaacagcgcacctaccgcatcggcaatcttgcggaaacgctcaaaatcgatggtgcggggataggcgctagcgcccgccaggatcagcttgggcttattttccttagccaaccgctccagctcgtcatagtcaatgcggccatcctcttcgcgtacgccgtagggcacgatgttaaagtagctgcccgacatgttgaccgggctgccgtgggtcagatggccgccatgggccagattcatgcccatgatggtgtcgcccgggcgcagcatggcaaagtaaaccgccatattggcctgcgcgccagagtggggctgcacgttagcgtgctccgcgccgaacagctccttagcccggtcgcgcgccagatcctcggcaatatccacaaattcgcagccgccatagtagcgcttgcccggatagccttccgcatacttattggtcaggtggctgccggccgcggccatcaccgcagggctgacgaagttctcggaggcgatcagctccagatggtcccgctggcgtcccagttccttttgcagcgcgtcggccatctcagggtccgcctggcgaatggtgcgaaaatcaatcatcaattacatcccctttgcatttcaaaaagcgaacatttccgctatttttagcgttatcgtacttgtagattataaacaaagccgccgtgaaaaacaaggggatagagcaaaacccgggcggaaagattccgtccgggtttttgtacctgttctgttcgttagatattgttttgcaccatggcgcccagcgcgccggggttggcgccgatcacctgctccacctgctggccgcccttaaatagaatcagcgtagggatggacatgacgccaaaccgggctgcgagctcctgctgctcatctacattcaccttgcccaccttgagcttgcccgcgttcgcctcggcgatctgctccaccaccgggccgatcatgcggcaggggccgcaccaggtcgcccaaaaatccaccaatacgggcccctgggcctgctctacttcggttgcaaaattatccttcgtcagcgtaataactgccataaccatcactccttatcgatttgttcttcttcctgtccctgcacagccctgtgcactgaaaccatctgtaactggaagcgcttttgcctgcgtagcttgggttccagcagatggatgcccaaaaagcccagcgcacaaagcgcgatcccgctgatagccgccaccacatcgctctcagcgcccgcaaaaagcggcgccagcgccaatttacccaccaccgcaccggcaacgagcagcaaaagcggtatcacatagacgatagccgaggcctgcagcatcccctgggtcggcatctgcaccaccacctggtcgcccggccttgcctctatagtattctccaaagtaacgatcatatcctgcccgtttgccaacattccgcaggcgccgcaccgctcgcaggccgaggtacgcttaaaatgcacctgtacctgtccgttttcggctgaaaccacctgtccggtctccagcatgacttacgcaccctctttcttctccgctgcggatagcaggtcgttcaccaccgcgctagccagcgccagcccggcagatgcaggcacaaaggcgatactgcccggcggatgggccgccgcgtcctgctcaggcctaaagcttaaatccggcttatgcggcaactctgtagaatagactacctttagctttttgatccccatttcccgcagctcccggcggatcttgcgggccagcgggtcgcctgcggtctcaaaaatatccccaatgcgaaaggctgtaggatccagacggttgcccgcgcccatgctggccaccagcctcagccccatttcgttgcaacgccacaccaggtccagcttggcgcgcacgtcgtccaccgcatcggctacgtagtcaaaaccttggtttaaaatctccgccccgttatccggcgtatagttttgcgccaaagcggtaatatccgctgccggaaaaatctgccgaagccgctcctccatggcgagggccttgttttgccccagcgtcttttgcgtagccaccaactgtcggttcaaattgctgggagaaacgctgtccccatccatcaccgtcaggtgccctacgcccgcgcgcagcagggcctcggccgcgtgcccgcctaccccgccaaggccgatcaacagcacccgggcatgggctaaagctgcaatcccttcgccgccgatcagcatagccgtgcggcttttttccacttggttctccaatttattcctctccgccttccggcaggtccaacttgagccccaactcgcgcagctgtttatcgtccaccgcgcagggcgcttcggtcagcgggcaggaagcgttttgtaccttggggaaggcaatcacgtcccgaatggaatccttacccgaaagcagcatgaccagccggtcaaagccataggccatgccgccgtggggcggcgtgccgtatttaaaggcctccagcaggtagccaaactggttccaggcctgttctttggtaaagcccagcacgccaaacatcttttcctgcagcgcggaatcgtggatacggatgctgccgccgcccagttccgtgccgtttagcaccatatcgtacgctttggcgcgcacccgtcccggttcggtatccaaaagggcgatatcctcatccatgggcatggtgaagggatggtgcatggcgctaaagcggcccacctcctcatcccactccaaaagcgggaactccgttacccacaggaagttgaatttgctctcgtcgatcagtccaaacctgcgccccagctccaaacgcagctggcccagcgccgtgcaaacggtggtatcgtttgcatcggccaccatcagcagggtatcgccggtcttagcgccggcggcctggcaaacgtaagcaaactgctcttcgctaaaaaacttggcaatgggcgagcgcacgccgtcctcgcccaatacggcccaggccagccccttggcgtggtaggtcttgaccagctcgcccagccggtccagctccttgcgtgccaggctttgcccttccagcacgatggcgcgcacactgccgccgcctgccagcgcatccgcaaataccttgaagccgcagccctgtaccgccccggacagatcctgcagttccatgccaaagcgggtatccggcttatccgagccaaagcgcgccatggcctgcgcatagggcagccgctgcagcggcaggggcaggtccattcccagcacctctttgcagaccaactgcacaaacccctcgttgacctgcatcacatcctcttcctctacaaaggacatttcaaggtcgatctgagtgaattccggctggcggtccgcccgtaggtcctcatcccggaaacagcgcacgatctggatatacttgtcaaagcccgacagcatcaaaagctgcttgaactgctgcggggactggggcagcgcgtaaaacgtgcccggatgcacgcggctgggcaccagataatcccgcgcaccttccggggtactcttggtcaacatgggcgtttccagctctaaaaagccctgctcgtcaaaataccggcgggccagctgggctaccctgtggcgcagcataaaggtagactgcatctggggccggcgcaagtctaaataacggtattttagccgcagcgcgtcggagaccttatcggtatcctcatccaggttaaagggcaggttttccgagcggctgaggaccttgagctcctttaccgcgatctcgatcgctccggtggccagatccctattaacatccttttcctgccggcgcaccacaacgccctttaccgccagcacatcctcgtggcggatagtctccgcctgctcctgcagggcagcatcttgcgccgagtcaaacaccagctggacgatgccgctgcgatcccgcagccatacaaagatcaacccgcccaagttgcggcggcgttgcacccaacccatcagcgtcacttcctgccccgcaaggccctcttccacctgggcacagtagcagctgcgtttccaacccgataacgatgtttccatgcgtcgttcctcctatatcaatcgctttacgacggtgtgctattcggcaagccgggccgcaatggccgttgccgcagtatcaagcggcagcagttcctcttcgcgcgtggccatattccgcagtttgacctggccgtttgccagctcgtccccgcctacgatggccacaaacggcgcatcgatcttgccggcaaacttgaattgtgcctttaagctgcggcccacatggtccatatccgcgcgcacgccggcaaggcgcagttcgttgcaaaagccaaacgccgggccgcgggcctcctcgcccagcgaggctacataaacctgggtcaccaccggctcttcaggcaacaagttcaggctttccatcaccagcagcagccgctccatccccatgccaaagccgatgcccgcaatggcggggccgcccacctgctctaccaatccatcgtaccggccgccgccgcacaccgtgccctgggcgccgatgtcggtggagatgatctcaaacaccgtacgggtgtaatagtccagcccccgcacgatcatggggtcgatctcgtaggggatgcccaagcgcgtaagatacgcttctaactgctccatatgcgccttgcaatccgggcacaggttgtcgatgcacttgggcgcaccttcagcgatagccttacacaccggactcttacaatccaaaatgcgcagggggttgcgctccagccggcccttacaggtatcgcacagctcgtccacatgcgcggtaaaatagcttttcagcgcctcgttaaacttgggccggcactccgggcagccgatggagttgatgtgcaacgtcagtttttttacgcccagtccctggatcaccgcccaggctaagcttatgatctccgcatcgcagctggcctgcggcgcgccgaatacctcgatgccgaactggtggtgctcccggtagcgcccggcctgcggattctcatagcggaaggtgggcgaattaaggtaatacatcttggccggcagcgcctcattgtaaagcttgcgctctacaaagcagcgcgcggcccccgccgttccctcaggctttagcgtgatcgagcggccgcccttatcctcaaaggtgtacatctccttttgcacgatgtcggttgtatcccccacgccgcgcaaaaacagctcggtatgctcaaacacgggggtgcgcacctcgcgtacgccgtacagcgcacacacctcacgtatcttgctttcgatatagtgccatttgtagctctgcgccgggatgacgtccgtcgtccctttgggtgcccgataatccatatttaccgctcctttattctcactaaccaatacttcactgctcttatatagcaaaaagccctcacccttgcccaacttggcaaagataagggacgggaatcaccccgcggtaccaccccatttggtatgataacccacttcatcggcccggtaacgcgggccaagcgttttagcctactatgctttttcagctaaccgactccggggtgtcattctcccggggggcctggcgaaaacttacagtcgacgatcttcgctcccttacaggcccgtatcccgaaatactctccccttcattgtcttttcgcgcttatatgctttataagactttatcattatacaatgacagtctccggcctgtcaagcagcgccccgcataatctgggttccttgcgggcgatcatctcgtctacccgtgcaatatactgttcgatattcttcacattaggcgtacgctccaaccggttctccgccgggtatacccatttgctgatgccgcccgcgcccagcgccaaaatggagtgggtctcttccatgatgtcgatattataaatacaggccttgcccggcaggctgtagccgatattttcaaagttgcccgtcatgtacttttgccggtagaggtaataaggctccatgccccattcggcagcggccgtccgcgccgcttccagcatttttaagacctcttcgccgctgggcaacctaaagcgtcccttttcctccttgagcttgctggcccgcttcatggccagggtatgcaccgtcaggttatccggcgcaaggtccgcgatctggcgcagcgtccgcgccatatcctgcgcgctctctcccggaagcccggcgatcaggtccatattgatggcttcaaaccccgcttctcgagccagcgcaaaggcctggacgatctgctccggggtgtgggtgcgccccatgcgcatcagcgtttccccattcatggtctggggattgatgctgacccttcccacgcctgcttcccgcagggcgcgcagcttatcccgatcgatggaatccggacggccagcttccaccgtcacctccgccgcgccggggaaagccaggttgacagcctccagcagtgcagacagctgcggcgcagaaatagccgtaggcgtgcccccgcccaaataaacggcgcgtacctgccagccggcctgctgagccatctgcccgcacaccttgatctcatggtgcagcgccgcaaggtagggttctacccacttgcggtttttgcggatgtcgcaggctgcaaatgaacagtaggtgcagcgggacgggcaaaaggggatgcccacatagacgtccagctgccggaaggattcgtggcatacgatgccctgctgcgcttttaagatctggaagagcaggtccgccttatcccggctgacgtcaaaggtatcccgcaggtattgggccgcctgctgcggggtcattccctgcgaaagcagttcataagccagcttagtgggccgtatgccagtgagcgagccccagggcattaccttgccggtagcctgagtcagcagatggtataaagcgatcttgacgccatatttaaaataccgcttttgttccagcgtgccctctcccatctcctgctgtcggtaggtagatgtaagcgccaccccgtctgggtcttttagcagggcctcgtgcagatagcctgctccctcccgccgcgcgcgctggacgatcaccaggcccgcttcgggttccgggtcgccctccctataaagcgtcagcggcgtatccccgtaaaaaaggcgcaccacatcccccgcttcactataaagggcggggtgctgcatcttaagcgttatagatcccataggtcttccccttgtaaaaatggattggttcttttctcccggccgatcgtgctctcttgcatgtgcccgggataaacctttgtctcctccggcagggtcagcagctctttttggatacccgatagcagtttttgcatatccccgcccggaaaatccgtgcggccaatgctgcccgccatcagcgcatctccggtaaagacggccccatcgatataaaaactcaacccatcgggcgaatggccgggggtagaaagcaccttgaccggctgccccgcaaggtacagtgtctgcccgcctttcaggccttccggcgccgtgcgcataaaaaccggggcgatccccatgccggcggacaggttcttagccggatcaggcccggcatccagctccccctgcggcgcataaacggcggcctttgtcgccgccgccagttcatccaccccgccgatatggtcaaaatgcatatgcgtgatgaggatcatctccacctgcgcgcccagcagagcggctcgcgcggcaatgcgctggccttccccgccggggtcgattacggcacaagcgccgctttcaaccagcagataggtattcacgcccaacggccccgtggccatccgttcgatcagcatatcgcacgccccttaaaatttctttttggaatccagcagcaaagtcaccggcccgtcgttcaccagttccacctgcatatccgccccaaagcgccctttttgcacgcgcaggccgtagcccgccaggcgttggagggcggcctcgtacagcggctcggccttttccggcagttccgcatccgtaaagccgggccgccggccatggcgcgcatcccccaatagggtaaattgagagatcatcagcgcctcgccgccaatatccagcagggaaaggttcatcttacccgcctcgtcctcaaaaatgcgcaggttaacgatcttatcgcaaaggtattccccgtcctttagcgtatctcctttttccacgcccagcaggatcaacagtcctttgccgatggcgcctaaggtctgcccgccggtttccactttagcccgggctacccgttgaattaccgctcgcatgcgttccctcctctaggcgctggtgcggaaggcttccagcacttccggaatcttgcgcagttgtttgagcatcttttcaagctgttcggtatcggtaatctctaccgtgatattgatcatcgtggtctggttcttgctcatgtgggcgttaatggccacgatctgcatcttcatatccgatatagcattggtcacatccgccagcaggcgcggacggtcggctgagatgatctgcacctcggcgtggtaaccgctggtcttggggctatccgcccaggagacctctaccagccgctctggctcgccgtaaaaactggccacgttggtacagtccgtccggtggatggatacccctctgccgcgggtgatgtaacctacaatgtcatctcccggcaccggattgcagcactgggcaaagcgcaccagcatatccgcctcgcctttgacgatcacgccgtggctatcctttaaccgctcggcctgcggctgctttgcgcccccgctttgggacgattgcccctccttctccgcggcggctacctgggcggcgatgcgctcttccttatgggcctgtttatattcagcaatcagccgggtcagcacctggttggtggtcaagccgccaaaacccacggcggcatacatatcctcaagggagttgaggctgaacttttgtagcgcggcctccaccgcctctttacgctccagctgccccagggtatagcccaggcgcttggcttctttatctagcatgtcgcgcccgtgtacgatattttcatccttaaattcttttttgaaccactgccgtatcttgctgcgggcctgcgaggtcttggcgatcttgagccaatcccggctggggccatgcgaggaagccgaggtgatgatctccaccacgtccccggttttgatggcgtaatccagcggcacgatccgcccgttgacccgcgcgccggtgcagcggttgcccacagcgctgtggatataataggcaaagtccagcggcgttgcctccttgggcaggttgatcacgtcccccttaggggtaaagcagaacacctcgtcgttaaataggtcgatcttaaaggtatcgataaattcagaagcatccgccatatccttttgccagtccagcagccgccttagccaggccagcttctcgtccaagtcattagaatcgctgcgtccctctttatatttccaatgtgcggcgatgccgtattccgccgcccggtgcatctcaaaggtcctgatctgaatctcgaagggcacgccatggctgtcgatcagggtggagtgcagggactggtacatgttgggcttgggggtggcaatataatccttaaaccgccctgggatgggcttataaagcgtgtgcaccgtgcccagcaccgtatagcagtcctgtatcgtatccacgatcacgcggatggccgtcaggtcgaagatctggtcaaagggcttattctggtttttcatctttttatagatgctgtaaaaatgcttgggccggccgttgatctccgcatggatacccagctgcttgacccgcgcttctacctccgcgatgacgcggctgacgctctcctcccgctcctggcgcttcatggccaccttttcgctgatctcttcatacgcatcatgatccaggtagaaaaggcaaaggtcctccagctcccatttgatgcggaagatgcccagccgcccggccagcggcgcatagatttccagggtctcattggcggtctgctgctgtttttcctcccgtttaaagcccagggtgcgcatgttatgcagccggtcggccagtttgatgaggatgatgcggatatccttgctcatggccagcagcatcttgcgcaggttctctgcctgcatcacctggcggctgtggaagttgagcttgtcaagcttgctcacgccctccaccagcatggccacggtattgccaaagcgctgggcgatatcctcgtattcgtattgcgtatcctcgatcacatcgtgcaaaagccccgcggcgatagcgtctacatccatccccaggtccagcaggatgttggcgactgacaagggatggacgatatacggctcgcccgaggcgcgccgctgatctttatgggcgtcctgcgcaaaggcatacacctgctttaatgtttccacctgctcgggcggataaatcttttcgatccttgcgataaaatcgtccaacgctctttgcctcccatccccatccctgggcaatatctaaatatctcgttgccgctacgaaacgtgcgccgcctgcacgtcaggctcctgcaaaagcgcacgcacggcgcagaacagcttgctgtcctccaaatttctgcgcgccgcttgctggggcagcttgatgtgcaccatccaatctctggcgcaggtaaagtgtaaaagccccagttcattaaatacctcaagggcgaagtataactgctcctgcgccccggcgtaaccgcagcatgcacacagctgtgcaaacggcatggctgcgatctcgtgctttggcagggcgctgatccgtttccagcactggcccagcgccgcgcgctccggcacaaggtccttcaaggcatcccgcaccagttcctgtggctggtcgtgccgcagggcttcggtctggcaggtatcaaaaaccagcccgccgtctagggccgccccttccgccagcaccaaccgttgccagcgtccgttcaaggtaaaaaactccggcagtggcgccaatacaatagcattttcgccgtagggctctgcaggcggcgcaccctcgtagacctcaaaacgatggagcacgtctgccttttccagcgcctccagcagcagcgcagcgccttgcggagtgtagcataccgcaagcgacccaaacggcgaaccggccgccgccaaagcgagcccggctacgccctgctcaaaggggtattcccgaatcgccccggcccccggtttatccatattatagcgaatcgcccctaaaattgcacggacaaatttgagcgcggtattctcaccggaggcgagcgcgctgcgcgcgttggcctggggcgcgaacgccttgacctggcagcgcagctcccgcctgccgccgtaagtattgatctccggaacgaccagcagcgtcgcccgccccatccgctctaattcccgctggcgctctcccgcctgccaggcgatggcgggcaacctgccccccaggcgcattttgaggtggcggttttccttgccaaaggcctgcgcctgctctacgcgctcattctccagcaaaaaggccggttcggggttgccccagccaaagggggatagatgctccatttcgccgatcagctgctcggtcacctgggacagtgcgatcttaaggtcgtattcataggagcgctggaacagctccggcgaaagctgcgccgcaagcgcattgatcttttccgcaaagggcgcaaagttctcgggggccagcgttacgcccgcggcctgcgcatggccgccaaagcgcataaacagctccctgcaaggcgccatcagctcgtaaatattgatccccggcacgctgcgggccgagcccaccagccgcccttctttaacggcaaataagatggccggccggtggaaccgctccaccatccgggaggcgacgatgccgatcacgccctcgtgccagtcgggatgctgcaacaggatcacgcccttttgcgcggctttctcatcggccagcaccattttttccgcctgtgcggaaaaagccatctccatctgctggcgcttttggttcagtccgtccaactctgccgccagcgcccaggcgcgctcaggctgctgggccattaatagctccacgccctttgcaggcgagtcgatccgtcccgccgcgttcagccgcggcgcaaggccaaaagccaggttgccggcggatagcgttttgccgtccagccccgcagcccgcgccagcatctggattcccagactaggcgcctgattgatcttttccaatccccggtagaccaaaatgcggttttcgccatgcagcggcaccaggtccgctacggtagccagggcaatcagatcgatcatttcatcgagcatttcctctccgcctaaggcacccagcagtttgcccgccaccgccgtcccgcaaaggtcgctaaaagggtatcgttcatccgcccggtgcgggtcgatcacggccagggcgggcggcagttcctccgggcagatgtggtgatcggtcacgatacagtgcagccccagttcgtttgccagcgcgatctccggtgcggcagtgatgccgttatccaccgacacgatcagccccggcccgccggcggcgatggcgcggatggccccggcattcatgccatatccctctttatcccggctggggatatagtactccacacgaccacccaaagttctcaggccgcgcatcatcagcgccgtagcgcacatgccgtctgcgtcatagtcgccgtagatgacgatgcgctcgcccccatcgatcgcctggcgcaggcgctgcactgctttttccatatcccgcagcgccatcggatcgtgcagcgtgccctgctcgggatgcataaaggcgtaagccgcctgcgcatccccatatccccgggcgcacagcagcgcggcacaggccggggatatgtccagcgcctgctccaaggcctttgccttttccctatccgtatccttgccgatgcgcgcgcgccaatggatcacagccattcctcccaagctaaaatataacggtagggctgccgctacggcaaccctacccaaaactacctaaactgcaaaatcacgatcaggcccacttattcttgcgccggtgcatcttcacttttttaggcgtatcccggccgctgatcagccaccaggtaggcgccgcaaggaataccgacgagaaagcgccggagatcaggcccacgatgatgggcagcgtaaattccttgatggaatccacgcccatgacgtataccaggaagatcatgataaacgtcgtcaatgtggtgttgatcgagcgggtcagcgtctcgcggatgctggtatccacgatctgcccgcgggtggactcccgcgagggcatcttatgcacattctcgcggatccggtcgaataccacgatggtggcgttgatggaataacccacgatggtcaacatcgccgcaacaaaggaggtgttgacctggacctgcaacagcacgacaaaggtaaacataatcagtacgtcgtgcaccagagccagcaccgccacgatggcggaatatacttcaaaacggaaggcgatgtagatcaggatcaggatgcaggcgatacccacagacatcaacgcgttcatctgcagctcctgtcccatgaccgcgcctacctcttccatcgaatccatccggacatttggatatttatccttcagcgcatcctgcaaagcctggcctacgccctcatccacatccccgggagaggtcttaaagcggacgaccgccagcgttttgacatccccgtcgccggatttggagaccggcgcatcgcccaggtccagcgccttaagcgcattttgcacatccgccacatcgtattcctgttccatatccagcgtcacgatggtgccgccggtaaaatcaatgccccagttgacccccatggtgcaaagtcccacgatgcccgcgagaatgatcacggccgagatcagaaggcagtacttgacgtttttggtgaagctgaactttttcatttacttcgcctccttcgctgccgcttttttggcgccggccaggtagagcgaacggttggtgatattcagtcctaccgcgatgcgcatcaggaaccgggtgaccacgatagccgtaaacatcgaggtcaaaatacccagcagcagcgtaatagcaaagcccttgatggtgccggtgccaaagaacatcagcaccacggcggcgatcagcgtggtcaggttggaatcaaaaatcgcgccaaaggccttggaaaagccgctggaaagggcgctggtcagggtcttgcccagccgcagctcctctttaaaccgctcaaagataatgacgttggcatccaccgccatgccgatagataggataatgcccgcgatgccgggcagcgtcagctgcaccgacgggatcgtcgccagcagcaccagcatgatcagcatatatacgcaaagcgaaatatttgccatcagcccgggcagccggtaatagatcagcatgaacagcatcaggataatcaatccgatcaagcccgcctgaaggctgcgggcaagcgcgctttcacccagcgtagcgctgatggagcgcacctccacctgattaagctccagcggcagggaaccgctttggatcagcatcgcaagctctttggcgctctcggcatccatgttgccggtgatgctgcccgaacccgtggcgatcaccgcctccaccacaggggaggagatcgtttcgccgtccagcacgatcttgatgacctggcccttaaactcctcggtggccttggcaaatacctccgtgccgctttcgttcaactcaaagttgaccacccactggctgccgtcgcttatggcaggttcggcctttttaatatcctgccccgtcaaaatcgtctcgttattgggatcgacaaactccagctttgccggtttgccgatgatatccagaatctcttcaggatcgtccacatccggcacctctacgcggatgcggcttgtcccctgctgggtcacggtggcctccgtgtagccggaagaatccagacggttgcgcagcacgctcatcgcgccgctgagcttgttttgcaggtcctcctcgccatcgttggcctggtaaagcgcgtaaacgccgccccgcaggtccagcccctgcttgatggcctccggcaatggcttaacacgatagatgccgatctgcaaccccgtcagcgacaaggtgcccagcaccgccaccaccagaagcatcacgattaacttgatcaggtttttcctcttggccctcatgcccgtgatgtcctcctcattttcacgatgagcaatcccccttagcctaactgctaccgctttttatgtatcattcatccattatagtatggcccgccccttccgtcaatgaaagggcgcccgtttattcgccttgctgttgcgcccagtcccgctcgatggcgtagatggccagggcacattccaggcgcttgcgctccatctcgcagcccagctcatagggtttggcgatatccccgttgaactgataagcattggccgcgcagccgccggagcaatagaacctggcccaacaatccttacactcgggcttggccagcacgtggttggccgcaaatttggcctgcaaatcccggtcaaagctgccgtctaatacgctgcccatcttaaactccgggatgcctacgaactggtgacagggatagatatccccctggggcgccactgccacgtactcgttgcccgcgccgcagccggtcagccgttttttgacgcagggcccctggcccaggtcgatcataaagtggaaaaagttgaaccactggccgtctctgcgcctgcgcaggtacagcgaggccagcttttcatactcgtcaatgatctcgggcaggtgctccgggtgcaggctgtattccacctcgtccggcgctaccaccggctcaatggagatctgctcaaaaccctgatccgccaggtacagcacgtcggaggcaaaatcaaggttatgccgcgtaaaggtgccgcgcacataatacttatcctggttgcggctctcggccaaacgcttggccttgggcaggatatgctcaaaagagcccgtgccctttacagtcttgcgcagcaggtcgtgcacctcgggccggccatctaggctgatgaccacgttgtccatctcccggttgacaaagtcgatcacctcgtcattgagccccaggccgttggtggtaatggtaaatttgaagcgtttgccgttaggcgcctccagcgagcggccataggcgacgatctgcttgaccgcctcccagttcatcagcggctctccgccgaagaagtctacctccaggaaatggcggttgcccgagtgggccaccagaaaatccagcgccttaaagcccacctgcgcatccatcagcatccgctcgccgtggaactcgcccgtagaggcaaagcaataggcgcagcgcaggttacaatcgtgagccacatgcaggcacatggctttgactacgcccggctgggcgccctcaaacaccccatcgtaatcttcatgggtaaagagcatcccctcccgcgccacttcctctacttcttcataggcctcctgcacggcgctggcgccaaactcaccctggagcgaggcgatgatctcctctttgctcttgctctcaaactggcgaatgatctcataagccagcttgtccacggcgtgcaccgcgccgctgtccgtatccagcgccatataggttccgcatgcttcaaaggtatgtaccataatgaacaacaatccctcttttttactgttcttgccggtctgcccgtcattcccggcgataaaaaaagcagtaatgcaaggattactgctttgccgcgtccaaaagcggggcgcgccttatttctgctttttctggcagctctggttccccaccgtgcaagacgttttgcaggcgctctggcaggaagcctggcactcgccacagccgccggtagccatcgaatctttcaggcaagccttttgcagcgtcgtaatatgtttcatcgcttatccctccccaagcatttctttcagtggcattataccccatttcatacgcactgcgcaagttctttcgcgcagaaagccgcttatttcccaatattggctcgaataatgccgatcaccgcgccggaaaccacgcccaagatcacatcgctcagcagcgccgcatcaaagatcacgcgctgctcgatggcgctgaacagcgcgactgacagcaggatatacagcaccccgatgaccgccccgcgcagccagccccgggataccggcgagcgcttgcagaaaaatacgcccaggatgatcgaaagcactttgaccacctgattgaccggcgcgatcaccgcatcgaccggattggccaatttgatgaaaagcgcaaagatcaatacggcaagaaaagaaaaaacgatgccgatcatcgccccgcgtaggcagctaagcgcaaaccccagcgcggattcctgaccggccggcttggctgattgactcactcttggcattttattacgcccctttcgccgcttcttgctacactttatgacggtaaatgccagggtatgctaaaagggtacaaagaaaggccgctacccatgcaggtaacggcccttccgccatttacattaagcctttttcacttcagcctcaacctcgatcgcctgacggccatcgtaataaccacacttggcgcacacgcggtgtggaagcttgggctcgtggcactgcgggcaggttacgataccgggaagcgtcagcttccagttcgcacgccgggagtgtttacgggctttggacacgcgtttcttgggtactgccatggtttacacctcctcatcctcattcaaaagcgattttaataccgagaagggatgtctgtccgcattctccgcctggcaaaaacaatcgccctcattcaaattcatgccgcaaaccgggcacagccccttgcacgcgggcgtgcagagctgctccagcggaatctccgagaggacatattcctccaccaatgggtctaccagcaatacgtcgccttcaaagacccgccgatccgggtgatccgggtcctcggtcctggcgaattcctcctcgaactcaacatccaagggatactcaaacgggctcaagcacctggcgcaatgcaactgcaataccgtctgcaaccgcccggtcatctctaaaaagtcatgctgattgacaatcttcccctcaaaacgtaccggcgcggcaaaagcataatccaacccgccaaacgtaaagggaggcatctgctcgctaaaggcaaactcagccgatgcgccgtcctgccttgcgaccccagcaatatctaacttcaagccctacacctcgaatcgttagccatccaatattatactaaggcttagatggcttgtcaattattttatttcaccagatccagcgtttcgcgggcgatggccagctcctcgttggtctcaataacgacgaccttcaccttggaatcatcggcgctgatgacaaagtcgccgccgcgatgctcgtttttcgcctcatccagtttaatgcccaaaaagtccatatccgcgcacacgcgccgacggatatgcgccatattctcgccgatgccggcggtgaacaccaggcaatccagcccgttcatagccgcggcatagccgccgatgtactttttaatagcatagaccagcatatcgatagccagctgcgcgcgctcgttgccgtcgttggcggcggcggtcacatcgcgcatatcgctggtcaccccggttagtcccagcaggccggattctttattgagcatgttgttcacttcgtcaatggactttcccgtgcgctgcatgatgaactggatgatagccggatccaggttaccgctgcgggtgcccatgggcacaccttcaagaggcgtcagacccatcgaggtatccacgcacttgcccccatccaccgcgctgatgctcgaaccattgcccaaatggcaggtaacggtcttaagcgcactggctggcacgcccagaaaatccgccacgcgtttggaaacatagcggtggctggtgccgtggaagccatagcggcggatcttcagatccgtatagcactcataaggcagggcgtacataaaagccttgggcggcatggtctggtggaaagccgtatcgaaaaccgccacctgaggcgtgcccggcatcaccttctcacaggccttaatgcccatgaggttggccgggttgtgcagcgggcctaaggggatatactcctcaatggcctgtttgaccgcatcatcgatcacgaccgaggccgagaacttcgagccgccgtgcagtacgcggtgccccaccgcatggatatcgtccaggctcttgacaacgccgtgcttttcatcggtcagtgcagccaaaaggtgctgcatgcccgccacatggtccggcatatcggtctccagcacaaagggctcgccgctgcccggcttatgggtcagcttgctgcccgggataccgatgcgctcgatctgccctttggcaatgacgctttcatcatccatattgatgacctgatatttaatcgaagaactacccgcgttgatgaccagaatattcatgaacttatccttcctccgtaattatacccttaactcgcctatttactcatctgcgcctgtacagccgtgatcgcggtgaccgccacgatatcctcagggctgcagccgcggctcaagtcgtttaccggcttggccagaccctgcaggatggggccgaccgcctcggcgcccgccaggcgctgcaccagcttatagccgatattgcccgcctgaaggtccgggaagaccagtacattggcgtggccggctaccttgcttccagggctcttgagctggccaacggattcgaccagcgcggcgtcggcctgcagctcgccgtcgatctgaagctcgggcgcctgctctttggccatagccgtagcctgcacgaccttgtccacaaattcgtgcttagcgctgcccttggtggagaaactgagcatcgccacccggggctggatgccacacagggcctcccccgtctgggcggaagagatcgcgatggcggccagctgctcggcgctgggattggggacgacggcgcaatcgccgaaaatcatgatgccgttatcgccatagtctttattggggatatccatgataaagcaggaggataccgtagacattcccggagcggtgcgaatgatctgcagcgccgggcgcagggtgttgccggtggagttgatggcgccggccaccataccgtccgcctcgccctttttgatgagcatggtgccaaaaaacagcgggttcttcatggattccagcgcctgttcgggcgtcatccctttggccttgcgcatctcatagtaggtatcggcgtaatcctgcaatttatcggaagtctccgggttgatgatggtgacgccatcgagctgatcgccaccctccatcgccctaatctccttttcatcgcccagcatgatcaagtttgccagcccctggcgcaagatctcgcccgcagctttaacggtgcgcggctcgttgccctcgggcaggacgatgcactttttatccgccttggccttgtctttgatctggtccattaacgacatgattctttcccctttccaaaaagaaaaattccgttcgatttccactatttattaccttaacgaattggcgcttgcttgtcaattatttccctcaaaaagtgcaggttttcctgcttttattgtgaataacggggaaaaacagtataataaaagtaataaactcctgtatagaaagggggcgttgggtttgcgtgtgaccgggatcgtagccgagtataatccgtttcataacgggcacctctatcatctggagctgggccgtacgctgacggatgcggactataccgtggcgatcatgagcggcaactttgttcagcgcggggagcccgcactggtggataagtggctgcgcgcgaaaatggcgctggagcagggcgtcgatctggtgctggagctgcctgtgggttacgcgctagccccggcggaggactttgcctacggcgccatcgccaccctggacgcctgcggcgtagtgaccgacctggttttcggcagcgagtgcggcgatctgggcagcctccaggtaacggcgcagcgggctttgaacgagaatgaacaggagcgggccaccatccgccggtacctggacgaggggctgtctcacccgcaggcgcgcgccatggcttatggcgacgacgccgggccgctggcctcccccaacgacatcctgggcgtggagtatctcaaagccctgacccggctgaaaagccccatacgccctcacaccatcttgcgcactaaaggctaccacgatcccgcgctgcacggcgctattgccagcgccaccgccatccgccgtggcatcgatacgggagatgatgcctggcgcaccgcgatgcccaaggcagcggccgcaaggatcgccagcgcctggcagcgcggagattctcccatgcggacccaggtattaagcaccctggcgctgggcgctctgcgccgctgcagccccgaagagttgtccaaaatcggcgaggtcaccgagggattggaaaaccgcatcgcccgcagcgcagtccaggccgatacgctggcagaattttatgccctgtgcaagacgcggcgctaccctttaagccggctgcgccgcatcgcgatgaagtcaatgttgggcatccatggcgtttcccacctcacccccccggcctatatccgcgttttggggctgcgcaccgatgccgcgccgctgctcaaatgcctgcaggaaaatgcccgcctccccatcattacccagcccggccgccagctcggcacgcttccctatccggcgcaggtccatctgcgtcaggacttccgcgccagcgacctttacgccctgggactgaccagcctgcctaaccgaaaaggcggccgggattatacccagccgctagtcattctcaaatgattttgcagttcactgtccgctgctttccacttcacctttacgctgttccaattcggcggcccttttcagggccgcttttttgatgtcctccactcgctcgcgggcggctacccgccccagctcgatacactcttgcgcctgcttcatggtataggggttgatgtgccttaccttgggcaggatcattacatcggcaagctgctcttgcaatcgggtgatctcccagcccatcaggtccagcgtctggttgatgatatccagcgtggaagcggttttctcctgctcgcgtggctcgccccggtagccgatatccacgcccaccagcagctcgtcccccatagccctggccgctgccagcggtaccctttgcatggcgccaccatccaccaatagcctgtctcccatgaccaccggctcaaacaccccggggatggacatgctggcccgtaccgccgtatagatcttgccggtattgagcaccaccagctccgccttgggcaggtccaccgcgatggccgcaaagggaatgttggtctggtcaaaatttttatcgtgagtgagcgtgcggatgatcgactgggcgcgcacgcccttgaccaggccctgccggggcaacgtcacgtcgataaggtcccggtcctccagcgccatcaccagcttttccagcatgggcatgggcgcgccgcagcaatatgccgcgccgatgatcgccccaatgctgcacccagcgacatacgcgatatcgatcccctcctgctccagcacctcgatcacgccgatatgcgccagcccccgcatcgctccgccgcccagcgcaagcccgattttcacactcatatttccattgcctcccagcataaatactctatgatccagtatataaaatccgttgacgggaagggaccttatgcgaagaaaaagttttaccctcaccctggtgttcccaacactattgattatactcttaattctctatccgcaacagtccctgcaggcggcgcgggaggggtttgcgctgtttaccggctctgtactgccctcgctactgccctttttcgccgcggccagcctgtttgtggccctgggcggcgcgcactgggtcgggcgcatcctcgagccggtgatgcggcacgtgttccattgcccgggcattgccggatacgtactggtaatgagctttctctccggctatcccatgggcgcgcggctgacggcggacctgtacgcccagggtcagatcactaaggccgacgcgcggcgcatgaccattttgtgttctacctccggcccggtgttcattaccggcgcggtgggtgccggcatgctgggcaattcccgggcagggctcttgatcttgctggcccattacgccgccgtgctgatcaccggctttctctggcgcgggggcaagcttagccagccacccgcccgcgtatccatcccccaacccctaccctttggagaatcgctgggcaaggcggtcaaaagcgcggtggaatccatctttacgatctgcggctttgtggtgctctttgccgtaatcatcgcccagctgacccagacgggcgtgatcgccttgctggcccaggggctaagtccggttttgcagctgctccagctgccgcccgatctagcccaagccatgctcgggggaatggtagagatgaccaccggctgccgcctcgcggccgagactacggcgcccctggtcagcaaatgcgcggtcatcgccgcggcgatctcctttggcggcttctctatccacgcgcagacctttgcctttaccgccaaatgcggcatgcgcccctggcattattttatcgccaaatgcatgcacgccctgttcgccttttgctttacggtgatcctgggccgctttctcatccgcccggatgcggcggccgcctatgtggattataccggcgcatattttatgcccatccccacctttgtcaacaccctgcacatcgccttgctctactgcggatttgccgcggtgctgctgatcattatgctggtattggactatatggattatcgtgcccgaaaaaaaggcaaatcataacaaacgccgctttggaaaaccaaagcggcgttaacctgctgcactatacccggcctattccggtttgatcatctcgttgtccgcgtcgctgtcctccaggttgcgaacggcccagcgggcgatcatcaacttggttttatccgcgccgacctcgactaccagcacatcgtcatgcgcctcgaccacgcgggcataaatgccgccaatggtggtgatacgatcccccgccttaatggaagccaacatctccttggtctttttctcccgcttttgctgcgggcggatcaggaagaagtaaaacagcaccaccagcaacacgatcggtccgatattaacgaggatattgaggaactggttgctttgctctacggagacgcccgccgcttcggcaatcggcataagattctgtaaaagtcccggcatgatattcaaacacctgctttctctgttatcaagtaattattctacttgattttggtaataaaatcaacctgattcttgtcgaatacctaaaagcgcccggcttttgcgaaatattctttggcaaaatctgccaggcggtcctcccagatcgcctggcggatgcgctccatcaggtcgatcaggtgataaaggttatggtagctggccaaccgggcccccaaaatctcccccgctttaaacaggtggcggatatacgcgcgggaataattgcggcagaccgggcaatcgcaatccggatccagcggtaaaaaatcctcagcgtaggtcgcgttgcgaatgaccagccggccgctccaggtcagcaccgtgccgttgcgggcaatgcgggtgggcagcacgcagtcaaacatgtccaccccgcgcagtacaccctctactagacagtccgggctgcctacacccatcagataacggggcttatcctttggggtatgcggcatcaggtcgtccaaaacctcatacatcagctccttgggctcgcccacggacaggccgccgatggccgtaccgggaaagtccagctcgctgatctgctcgcagctgatgcggcgcaggtctttaaaaagtccgccctggatgatgccaaacaatgcctgatcctccgggcgcttatgagcctgcttgcagcgggccgcccagcgggcagtacgatccatggcggcgcgcacccgctcgtactcacaagggtagggtgaacactcgtcaaagcacatcataatatccgcgcccagcgcgttttcgatctccatcaccttttcagggctaaaaaaatgcttggaaccatccaggtgagagcggaacatcacgcccccctcctccaccttgcgcaggctggccagagaaaagacctggaacccgccactatcggtcaagattggccgatcccaattcataaactgatgcaggccgccggccttttttaccagctcgtgtcctgggcgcaggtaaaggtgataggtattggaaaggatgatctgcgcgtgcatctcctttagttcatctaccgacattgccttgacggtagccgccgtacctaccggcataaagaccggggtctccaccacgccatggggcaagtgcagccggccgatgcgcgcaccagtctgcgcgcaggtctttaatatttcgtattcaaaagccatggggtctctccttacatatcagtttaaaaagctgcccagcgtcatcatgatcttaaaggtgaccgcatcgtcaaacctgcgcagatcaagtcccgtcagcttttgcagcttatccagcctgtagaccagggtgttgcggtgcaggtacatctgtcgcgccgtttccgatacgttgaggttattttgaaagaacttctgtatggtctggcgcatttcttcatccaggctcttgccgccgccctgcggggctacgcgctgtaaaaagtccaagctgaccgcctggggcacctggtaaaggtaaagctccagcgccagcccttcataaacgtgaagggcctgtccggggtcgatgcgggtaccaacctccatagcctgacgggcctggcgcagggcctgctccagctccgcgatctgcccgcaattgccgctgagcgaaaggacgggacgaatatccaactccgcctgcaaggtatcggctgtggccaaaagcgcctctatcagctcctccttgctatcctggcggaaggtatgcaccagcgccagcgtctgcgcgtccagctcaagaagctgatcctgcttgcctttgggaaagatcgagcttaagatgcgcttggcagatgcaagcgtttgatctgccacacggcacagcgccacacagcgctcagcctgcgggacgatgtgcagcaccttgcacagctccatgacctcgacggactgcagacggccgaagaaaatatccctgtacagcccctctgtatccggccgctcgtttccgccccccgtccgcgccagggggataagcgccgccagcaaggcggcattcgcacgattcaagcgcccggcatcttccagccagaggtaaccgccgcgcccccgcgccggacccagggccagcaggccaccgccgccataaggaacccactcccccagcgggacatcttccgcaagcgctatgcgctctggcgccgccatgtccgcagccgagactgctagcagctttccgtccgcctggtaataggctatctgcgtccccagcgcctgggcacagcgctgcaaaacttttttcatcgctctttaccgcctctccttcctgcgcctataaaaaaagcagaaacaataaatgtttctgcttttttggttaaaatccttctttataaggcaaatgcttatttcgtcaggatagaagcctcggtctccttgtcgaagaactgcaggcggttcgggtcgaacgcaaccttgatggtatcgccaaagcggctggtggtacgaggatcaacgcgggcgatcgcattgccttccttaccggagatgttcaggtacaggtaggtctcagcgcccatcagctcgacaacctcaacgtaagcggatacaacatactcggaggcattctggatgaacagctcctcatcgtggatatcctcaggacggatgcccagggtaacctctttgccgatgtaggactcatccgtcaggcgttttaccttgccctcgggcactttgatcttgttctcgccgaagatggcgtacacatcgttgccctctttaaccagctgagcatcaaagaagttcatctgggggctgccgatgaagccggccacgaacaggttggcgggatagtcgtacaggttctgggggctgtcaacctgctggatgaagccatccttcataaccacgatacgggtacccatcgtcatagcctcggtctggtcatgcgttacatagatgaaggtggtctgcaagcgctgatgcagcttggtgatctcggtacgcatggcaacacgcagtttcgcgtccaagttggaaagaggttcgtccatcaggaagaccttcggctcacgaacgatagcgcggcccagggcaacacgctgacgctgaccaccggaaagagccttgggcttacggctgagcaggtgctcgatgtccaggatcttggcggcctcgtgcacgcggcgatcgatctcctctttgggggtcttgcgcagcttcagggcgaaagccatgttatcataaaccgtcatatgcggatacagcgcgtagctctggaacaccattgcgatatcgcggtctttcggagcaacttcgttgcacagacgatcgccgatgtacagctcgccggaagaaatctcctccaggccggcgatcatgcgcagcgtggtggatttaccacaaccggaaggaccaaccaggatgataaactccttatcctcaatgtccaggcagaaatcgctaacagccgtaacgccgccggcatagaccttgtaaatgttttttaaagtaacatttgccattatagatgaacctccttcaaaatgcaccgataaggccttagccttaaggttagttttattatatagtttcagcctcttcctgactatgggtatatgtcacaaatttacccgcgattttatggatattttatataaattgcacaaaagggctatccctggcgcagcgcggcgatgggttccagcctggcggcctgccgggccggataggttccgaaaaagatacccacaacggccgaaaaacctgcggccgccagatagaccatcccatccagcatcacgggtaaaccgatggctgacgcggcgatcaacgtcagccccgttcccagcagcatgccgccaaggcctccgcccagggcaatcagcaccgactccagtaaaaactgtgccaaaatctgtctgcgcgtagcgcccaatgctttgcgtacgccgatctcctgacggcgctcccgcacggtgaccagcatgatattcatgacgccaatgccgcccaccagcagcgagagcgccgctacgctggcgatgatcagcagaaataccaggacgatattgctggccagctgcgtttctttagacaggttgacagttctaaaatatccctcgccctgatgcctttggtctagcagctgctgggctacctgggctaccggttctaccgcatcgccgttatctagcgtcagggcgatctcgtcaatcgtggtgcgccccagataacgctgcatggtcgtcagtggcaccatgcagcgtgcggtgctgccgctgcccagggcgctgtcatcttgcagtacgccgatcacggtaaaatcgattccgctgatgcctacgctttgccccacggcctgttgctcgccaaaaagctggcgggctaccgcctggggcagcacgattacacaacgcgcctcccgggcgtcccggaaggagagcgtacgtccggaaatcaatttgaacccctcctcctgctccacgccccaggtgcagccccgtagctgcacctgggcatttcccgcttcactcttcaaccccgcctgcaggtaggctgccggctgtacgctttctacgcctttaagcgtctgctccagatagctggcatccgccaatgtgagtgcaggcgcctgttcgttttgatcaatacagctatagacccacacacgctgaataccaaatttttgcagctcatcccgtatgcgccactccccgccccgtcccagcgcgtaaactgcgatcaggcaggctgtgccaatgatgatgcccagcatagtgagcagggttcttacgggattgcttttaatattaaaaaaggccatccgaagatagtccgccttgttcatatccgtcctccctcgcattgagaaggcttcagccttccatcccgcagtatatattgccgatccgcatagcgggcgatctccgactcatgggtgatcagcaccaccgagaccccactttgactaaaattctgtaaaatctccatgatctcgctgccggcgcggctatccaaattgcccgtaggctcatctgccaataccagtttagggctgttgatcagcgcgcgggcgcaggccacccgctggcgctgcccaccggatagctgatcgggccggtgatgggcgcgctgggcaaggcccatgcggcgcagcattgcataagcggcctccctgcgcccggcctggggcacgccccggtacatcagcggcaacgctacattatctatggcggtaagtttaggcagcaaaaaaaaggattggaagataaagccgatccggtcgcgccgcacaagcgccatttcctcgtcgctcagctccgtggtcagacatccatccaggcggtaagtcccgctgtcggcatggtccaggcaccccagaatattcatcagcgtggacttacccgatccggagggacccatgatggcgatgaactcccccggcgccaccttcaggttgatgtccttaagcacctcgatgccgccgctgcaatcggtataagttttgcacacatttgtaagctcgatcattggctcagcctccctgccgggatgttggcctgtccattttcatctggatacagcactagatgctcgcccggcgccagaccgcttatgacctcgatataaaaatcatcctgcagcccggtctcgattttgacccagtgccggctcccatccgcctgtaccacgcaaacaaagctttcgccttctcgttcataaagacattccagtggcactttgaccacgttttcccgccggtccaacaccacggtggccttgactgcggtgccctccagatagcccttgctgcgcatttcatccaggtcgaactccactaccatctgcgccgtagccccgctttgggccgatacagccgactgcacgcgggctacggtggtcgtcagcgtttctccgctttccgctatatatattgaagcttcttgtccaaggcgcagacggctgacgttattttgtagagccgttacccgcgcgacccgggcgtccgaagtcacggtcacaaccgtttggccggggatcacataactgccgggcagcgactggatacgggataccgtgccggaaatggtacttttaagcgcatactgctcctgctgcttaagcatggtgcggcgtttgagttccagcagttgcagctgctggatggactgtgccgcgctggactgcgtagcagacgaaaggctttcgtctatcccctgccaaacagattgggcctcctcatcccctacagcctgcgtcagatcagacagggcgtcattcatgcgcgctaggtctttggcattcatcccgtcgaataccgaaagggcgttttgctccaatatttcccaatcctttgccgaaagctgcatcttaagcttttgtgcctcttgctccgcctccaccatgctgatctgatccttgatcagcgtatcgtccaggcgcatcagcatatcgcccggcttgaccttggccccctcctgaacatcgatctgcgatacgcagccgcttaccgggaagctggcggcatagacctgttgggcctctatggttccgctcaaaagcaaggtagcctcaatatcccccatcgaagaaaggactgtatgctgcaaatgcgcatccgcagccggttttgaaaagatcaatgcacaaatgatccccgtcgttaagaccagggcggccgatgcagcctttcttttgaccatagcgaacctccatacttgacataaacctattttggcgcgctggccaaacgatataccctgaaagatttccctatcgcgcgcacggctgctcgggaccaaagattttgccgcgcatggtgaaattttatgcatagaatacataaccgtcctgattttaagatacagctccctgatttgcacgagaaaattgccaaataaagcctaaaacgcttgcatttttattcccgtaaatgtataattatcaccatcaacaaaatgaggaggcagggaaattatgattcgggttggcattatcggcgctacgggctatgcgggcatcgagcttgtgcgacttttgacccagcaccctgaggtaaaacttacgcatttggtttcccacagctacgtcggccaagatgtggcggggatctataaaaattttaagggtatcctttcaaaagatttagaggatatggatctggacgttttggctaaggaatgcgatgtggtattcacatcccttccccacgccacctccagcgaggtgatccccaagttggtcggcgctggggtcaaggtgatcgacctgagcgcggattaccggtataactccgccgcagtttacgaggcctggtacggcgtgcctcatcccgatccggcgctgctggcccagtcggtctacggcctaccggagctgcaccgcgagcagatcaagggggcgcaactggtgggcaaccccggttgctataccacctgttcgatcctggggctctacccgctactgcaggcaggcctggtttccccggagaatattattgtagacgccaaaagcggcgtgactggcgcgggccgcaaccccagcgccaacacccacttttgcgaggtggatgagagcatgaaggcctataacgtggcccggcatcgccatacctctgagatcgaacaggagctctccctggcagccggccaggaggtgctaatctcctttacccctcacctgatccccatgaagcggggcatcctctcgacgatgtacgccaacctgaccggagcctacagccatgcggacctgatggccgcctacgaaaaggcttatggcgatgagtcttttatcgtactgcacgaggaaggcagcctgccggaggtcaagttcgtgaatggctccaactattgccacatcggctttgtggtcgatcagcgcttaaagcgcgtggtggtggtcagcgtgatcgacaatctggtaaaaggcgcggccggccaggccgtgcagaatatgaacctgctattcggcctgccggagaacacggcgctctccgccccgggctggtatctctaagggaggcaagcaacatggaaaactacgataatctgatccacaaggccaatatcctgaccgaggcgctgccctatatccagcgcctggccgggaagaccgtggtcatcaaatacggcggcaacgccatgacggatgaaaagctgatcaccaccattttgcaggatatcgccctgctcaagtgcgtcggcgtcaaccccgtggtggtgcatggcggcggccctgagatcaataaactgctgggcaagctggagatcgagagcaaattccacaacgggctgcgcatcaccgacggtgccaccatggaggtggtgcagatggtgctcaccggcaagatcaataaagacatcaccgcccagctcaactgcctgggcgtcaaggccatcggcctttgcggcaaggatgccaacctcatcgaggtggtgaaaaaaccagccgcagacggcgtggatctgggctatgtggggcagattacgggcgtcaacgaaaagctgctgcacatgctcacacaagatgagttcatccccgtaatcgcgccggtgggcgtagggccggacggggagagctacaacatcaacgccgatacggccgccgcggagatcgctgcggcgctgcaggcggaaaagctgatcttcctgacggacatcgacggcatccgtctggacccgcaggatcccgaatccctgatctccgtgatcacggtcgagcgcatcaacgaactgatcgccgatggtactatttccggcgggatgatccccaaggtgcagggctgcatccgctccatcgagctgggcgtgaaccgcacccatattctcaacggcaccatcccccacccagtgctgctggagatctttacggacaaaggtatcggcaccatggtggtgcgcgcctaatttaaagggaggttaaaaccatgacggtagagcagatcaaagccctggacgaacagtattatatgcacaccttcggcgcgcgcttcccggtctccttcacccacggggagggctgcacgctgtacgataccaacggcaaggcctatactgattttttggccggaatcgctaccaatgcctttggctacgccaacccggccatcgttaagaccatcagcgaacaggcggccaagctgacccactgctccagcctgttctatatcgagccccaagctaaactggcccaactgctggtggaaaacagctgcgccgaccgggcgttcttcgccaactccggagcggaggctaacgagggcgccatcaagctggcgcggcgcttcttctcctctaaagggatcgaccgatacgagatcatcactatgcaaaattccttccacgggcgcacgctggccacgctggcggctaccgggcaggagaaatatcaaaagcccttccgccccatgccggcaggctttgtgcatgcggagtataacgacctggcggatgtaaagtccaagatcaccgacaagaccgcagccatactgtgcgagaccgtgcagggcgagggcggcgtaatgcccgcgaccccagagtttttgcagggcctgcgccagttgtgcgatgcaaacggcatcctgctgatctttgacgaggtgcagaccggccttggccgcacgggcaccctgtttggctaccaggtcagcggcgtggagccggatatctttaccctggccaaggcgctgggcggcgggctgcccatgggcgctgtgctggctaaagagcctgcggcctccgccttccagcctggcgaccacggcacgaccatgggtggcaacccgctgtgctgtgccacggccatcactgtgatccaaatgttgctggatggccaggtggaaaagggcgcgcaggcaggtgcgtatttcaagcaaaagctggaagcgctgaaaggccagttcagcttcattaaagatgtgcgcgggcagggcctgatgttgggtatggagctggacgctgccgtgcccggcaaagaaatcgtcgccaaggcgctggaaaagggctttatcatcaactgcgccgggcacaatacgctgcgctttgtaccgccgctgatcattacgcaagcggatatcgacgcgctgtgcgacgtactgtcggtcatcttcaaagacatctaagtaaaggagcaacaccatggatttattgaaatatcaggcccaatcggtcttttcccagcagcacctgctctgcctgcaggactatacgcccgacgagatcctgcagcttttaagcctggcggccaagctcaagcaggagcaaaagttaggcatcccccaccccatcttacagggacagaccctggccatgatctttagcaagccctcggcccgtacccgcgtttcttttgaggtgggcttccatcagctgggcggccatgcgctctacatcagcgcaaatgagatcggcctgggccagcgcgagagcgtggaggacgtggcgcgcgtattttcccgctttgtggacggcatcatgatccgcacctttaagcaaagcgacgtggagggattggccaaggcgggctctatccccatcatcaacggcctgacggacgacttccacccctgccaggtgctggcggatatgctgaccgtttatgagcacaagggacagattgccgggctgaagatggcttttgtgggcgacggcaacaacatggcccatagtttaatgatcatcgcaagcaaactgggcatggatatcaccatcgtctgccctgaggggtatgacccgcaggaaaaggtcgtagcctgggccaaggcaaacgccgcccagtccggcagcaaggtagagatcgagcacgaccccatgaagggcgttgccggggccgatatcgtctataccgacgtctggtccagcatgggccaggaggcggagacagagaaacgccgcgtgatttttgcgccctatcaggtgaatgccgccctcatggccggcgccaaggcggacgccatcttcatgcattgcctgcccgcccaccgggatgaagaggtgaccgacgaagtaatcgaaagcaagcaatctgtcgtctttgacgaggcagaaaaccgcctgcacgcgcaaaaggccgttatggccaaattgatgaatcgttaggggcgagaaaaatgtcaaggctgcaccatcattatgacgacctgatcgagatccgctacgccacgccggaggacgccgaggatatccacgagatcacccacgacgcctttgagatctatgcccaaagcctgggccagccggataaggtagccgcattgaaggagacgccggaggacgtcgtgcgcgacattgggaaaaagcatgtgatcatcggtacgttcgtatccaagccggccggttccatccgctttgatatcctgccgggcaacatcgcctacatcagccgttttggggtgcgccctgagtttcagaaatacggcatgggtaaggcgctgatccagtttgtacacgcccgctgccgtgagctagggttaaacgccatcgtgctacacaccggcgcaaaggtgttccagctggtacggttctattatggcatgggctattacgtccactccaccaccaccgaccggggctatatccgtgcctttttggtacacgagctgcagcccgaatacgacttgagcgcagcaatggagaaataaacagcaaaaaacagccggtaaataccggctgtttttttatgccctaaattactctaccggcaattctgccgaagccactgaaaaatgaatatagacctccggatagccctccagcggcagccagaatttgatccgaccggcgggcgtattttgcacctgcgccttttgcgtatgcagggcaaggcccgccttgcagccggcgtgccgttgcgggtttccatcttcgttgcagcgctcccccaccttaaagcccaggcccgccgccgtatcgttgatggccagcacctcatggctgcggtggatcatccgcacacaagtggggaatccatcccacatccggcggaaggcttcaagcgtcttttcatcgatctgcaccatcttttttatcccctttctcagtacacggcccaatgggccagataagcgtaaaagtacaatccattggcaaccaggcacagccccgtcgccaggcggtctgcccaccgcttttgcgccagtgcagctacggcaaaactcaaagggaacgccgccatcaggtagcgcggcccgctcagcagccaggtggcacctatggtcgctataaaataggcgataaaataagcggtgtaggaagggcgcacccgtttaaccgccgcggccatcacccctagggcggcaaagtgataaagcaggttgggcagccacaatcccataaagccctgcacatcgccactttgcaggtagcttacggcataatccgcctgataggcggccgtgttaaaaaagtaacccagccgctggccccagtgttcgctttgatagtagagaaagcgcagcggatcgcccgacacagcgtaattgactccgcaataggcggcaaagcctagcggaatcaaaagcagcgccgccaatctacccagcgtcttggacagcggcggacgctggcgcagggtatcggcaattccctcaaacaataccggaaccagcacgatcaacccgggcagccgcgtgaacgaagcacacgtccctaacagccccgccagcacaaaacgccggcgccggaccaggtagaggcaaccaagggtcagtagcaaaaagaggctgtcgctcatcggcgcccagaggaagaaggcgcccggcaggatcagctgaaatttgacggtttttagcgccgcgtccacaggcagatcgatacgcgccagcttataaagcatgcaagccgccccggcggccgatagggccgaaacgacgaacgccgcggccagataatcctgtaccagccaggaaaaggccctgaccagcatgggataacccgggaaaaataccagctgcaccagctgatcccaggggccttcggataaatagccacctcgcctggcaatgtcctggtactggttcacatccccggtgacccaagcgtcaaaccccaacgctgtaccgatggaacgccctgccgccatttgcagcagatacccggccagataataaagcgcgcccgccagcaggaatacggcaaacagcttaaagcacgttgccctgtcaggctgcgccagttgcccaccttccgactctcccctccaggccttcatccattgcgggataaagcggacgcccagcagggcaaacagaccggcgctgagcagcgcggcggcctgtgcatagggggagcgcggcggattttgccaccaccacagcgcgaaaagcccggccaataccgccaggcaaacgcctgtcagcaggttttgccccgccctgctctgcccttttttgatacgctccataccgcgccatcaaaccttggtataataaccggtgggctgcagctcgcggctttcctcccccagctgcccagagaggaaacgccgcagctcgatgcacaggtgacatgcgcttaaataacctttttcaggctggtatcccttggcctgggcggcctccagcagcgcccccacccccttttggtagagcagggtgctataaggatacttctcctcatccaggggcttgcccagatcttccagcgcaatggccaggccctggcagcccaggtaattgccgtaaaggtcgatatggaagtgcccggtctgatagggcttatggcaggggccggcctttttcaggatttgagatagcggcgtaagcgcaagccgcgttttgtaaaactgggccgcccgcccggtgaagccgatccactgccggggcatatcgtcgataaaatgccggccaaagtgcgcgtcgtattcagccagtgtatgggtcttacatacatccagctggttgatgtcgctaaaatattcgctgatccaggggaacacccgcatgcccgccttacggcaggcagccatcacgccatgtaccttctggaagggaatgtattcgttatgaaagggactcatggagatcagcagggtatccacccccagcgcctgcagcgtatggagcttctgcagcgcgtcggcctcatcccgataccaggacgagttgctttcgatgtattcaatcataatgcccgcatcccgggcctcctcgaggaaagccttgagcccttcaaaattcagcataggctccccgccgcccacatggatggaatcacagcccatgccgcgcatccgccgcaggatcttgcgcgccatctcccgggtcatataatcctttgcccagctgggcgaggacgccaccgaacagtgcttgcacttgctggaacaataataattggtgatcacgccaccagaatagagatgcttgacttgcgggttttgcatcggatgaacctcccatcagttatatcggggatcaatctacccatttgattttattataccatacgcagcctgggccttaaaagcacccgctagcggtaatacgcttttttaatctgtctgtcctccctcccgtttatcggcgtgacatgcgttttccgcgcgcgaaacgccgcgaaatattgcaaaaagggcagcttgcgtgctatacttttgccaatgtaattgtttatctgcaaagcccggccacgctgggctttacacggttatcagccaaattcaaaggaggaacttatgcaacaggatatgatcgtcgttctggatttagggagtgaggacaataccctcattgcccgggagttgcgtagcctgggcgtgtacagcgagatccatccccacgacattaccgctgcccagttaaaggcgctgcccaacgtgcggggcgtcattttaaacggcggccccaaccgtgtggtcgacggggtgagcattgacgcatctaaagccgtttatgaaagcgggctgccgctatttgccgttgaccacaaaggacagattccccaaagtctggagcattggcccaaggacgcggggcagttgcgcgatacgctgcgcgcgtttacctttgaggcctgcaaggcccaagccaactggaatatggaaaattttatcgccgatcagatcgagctggtgcgcgagcaggtaggcgataaaaaagtgctgctggccctgtccgggggggtggattcctccgtcgtggcggcgctgctgctcaaggccatcggcgatcagctcacctgcgtgcacgtcaaccacgggctactgcgcaagggcgaggccgaacaggtggttgaggtcttccaaaaacagctgggcgccaacttggtgtatgtggacgccagcgagcggttcctcggcaagcttgccggcgtggccgaccccgagcaaaagcgcaaaatcatcggcgccgaatttatccgcgtgtttgaagaggaggcccgcaagctggatggcatcgagttcctggcccagggtaccatctatcccgatatcgtggagagcggcaccaagacggctaaaatggtcaagtcccaccacaacgtgggcgggttgccggacgacctgcagtttgagttggtagagccgctcaagatgctgttcaaagacgaagtgcgcgcctgcggcgtggcgctgggcctgccggacaacatggtctaccgccagcccttccccggcccgggtttgggggtgcgctgcctgggcgctatcacccgcgagcggctggaggccgtgcgcgagagcgatgcgatcctccgagaggaatttgcaaacgcgggcttgcagggcaaggtttggcagtactttaccgtggtgccggacttcaagtccgttggcgtgcgggataacgcccgcagctttgaatatccggtgatcctgcgcgcggtcaacaccattgacgcgatgaccgccagcatcgagccgctggactgggcgctgctggagaagatcacccagcgcattacccacgaagtaccgggcgtgaaccgcgtcctttacgaccttacgccaaagccggtcgggacgattgagtgggaataaatatttagtgttttctgaatcctgaaaagcgttggcaatacagcgtttttcaggatttttcttttttagtggctacaaattggctacatttgcagcgatttttgtagccagcggctcacggcataatgccgtcaagctgtctggctacctccacctgcttgttggggtacaggtggctgtatgtgtccatcgttgtctgcaccttttcatgtccgagccgctccgcgatcagcagcggtgagaagcccatctccaccagcaggctggcgtggctatgtcgaatgtcatgcacccggatacgctttacccccgatgccttgcagccatattccatttcgtggtatagaaagctcttggtgtagggaaagagcctgtcgtccttttgcagcccgtagcaatgggacatatactcctgcaaacaggtgcaaagaccgtcgggaatggggatggtgcggttgctcttgggcgttttcggtgtggtgatgatgtcctctctgccgagacgctgatagctcttgtttaccgtcagggttttcttttcaaagtcgatgtccgacggcgtaagcgccaatagctcgccttcacgaattccggtgaagtacaaggtcataaataccgcgtagctggcaggccggtctttcgtgacctcaatgaatgtctgtccagaacagcatttcatcggcgtgtttcttacccatacttcccgctttatggcacggattctctttcagtccataatacttgactgcgtagttgaaaattgccgtgagctggttgttgatgcacttgagataggtttgggagtagggcttgccgctttcatcgcgatagctggtcagagagttctgccactggcgcacatgggtaggcttgatctcgttcagcgggattttcttgaagaaaggcgtcaccttcaggtcgattagccatttcttgctggcaacggtggagggcttgagacgatgctccatatccttgacatacaaagcgatgaagtcaccgaaggtcataccgaggctgcccgtggattggctgatgaagtcacgttcccattgaagggcttcctttttggtggcgaagccgcgcttctttttgtggatggtcttgcctgtccaatccgttacccggatctgcgacatccagcgaccggtgtcgccgtcttttgttactgacatttttacctccttccctcaagaatcaggctttgatggggttatttactcgttactctcgcttttgccgtattccttttccagaagctccgtccgtcttgcaatcagttcgtcacggttaagttcttctggctctgtgcatttgaccgcgttcgcggcatagtatgcaagcgtctgctccttccagcgcttatatgctgcctgcgtggagttataggcgcgaagctcgctgcgctcatcctcccattgttcaaggaacaggcacatatccgcgttgaactccgccgtgctctttccatcaaaggaaaccgagcactcccattgtttgctgcggggcggcttctgcacattgatcttgaagtcgatgccctctaccgtttccagcttaaagaggaagtccatcacgtcggcaagcgtcctgatctgcgccgtgctggattcatagccaagaatataggttgaggtcgtgtccagcaggtctgcgatctgattgacaacggcaatcgacacttcaatctctccggtttcgtacttctgtacggtgcggagggattttttaagcatttgtgccagctcggtctggttcagccccttccgttttcggagttgcttaattctctgcccgatggcgggataatcgaaattgtccatatctgattcacctcgtacatatcataccacaggataaagcgaattgtaagtacatatttttatttcgaaaaggcttgacagatgcaccttgtatgcgtataataaaatatgtactcaagatgcgtattacaaagaatttgaagaaaggagtgcgaatagaagatgcgcagaccgaggcagatcgctttgaaaaaggaggtactatgagagcacagtttatcacagcgtcagaggtggcggagatcatgggcatcagccgcagcaaggcatatcagatcgtccgggagatgaacagagaactgaaagcacaaggctatctgaccgttgccggaaaatgccctgcccagtatttcaagcagaagttctacggcttccagattcccggaggtgagcgaaatgacggaaaatgagaaaacgaccgccctcatcccatctgttggcgcagatggagggcagccgcctcacgattcaactaaacagaggataccacatgaaacctgcgaaagcaatccccctgaggaaaatattgaggaaatgcgtgagaaaatccggcgcatgaacgatccgcgttatcttcatacggtttccatgacagagctgtatcagaccgcctacaagagcaggccgcccgtcatagacggtctgctctactccggggcatatatcctcgcaggagcgcccaaaatcggaaaatcgtttctggtagcgcagcttgcctaccatgtcagcacagggcaaaggctgtggggctatgaagtccattagggtacggttctgtaccttgcactggaggatgatttccagagaatccagagtcgaatgtttatgatgtacggcgtggcggataccgccagcctgcattttgcaacggcagcaaacaaaatcggaaacggtcttgacgagcagcttgagaatttcataaaggaacaccccgacacgaagctggttatcattgacaccatgcagaagatcagagaagctggcggcgaggcttacagctacgccagcgaccatgagatcatcggcaagctcaaacgttttgcggacagacacagcatttgcatcgttaccgtccatcacacaagaaagcagccagccggggacagctttgaaacgatctccggcacaacaggacttctcggttgtgcagacggagcactcctgatgcagaagaagaaacggactgcattggaggccacggtcgatgcggtggggcgagatcaacaggatcagattctatatctgaaaaaagatgccggcacgcagatatggagccttgaacggacagagaacgagccgtatcaggagccgcccgacccggcattggatacggtttcccagcttgtttcctccgaaagcagagaatggacaggcagtccgactgagcttgcggagacggtcaacacaggcatggcagcaaacgctctcaccaaatacctgaacgttaaatccggcaggctactggacgagtaccatgtgaagtacgagaacagagcaaaacactccgggcggcaggtgaaactcacctatatggtaatcgacaatgtagagtacgaagtaatcgaatgaggacggcgcgacggctgcgacggttgcgacggtaaatctgataccgtcaaaccaaccgtcgcaatcgttgcgaccgtcgcggaggaagcccggcagcacgaccttccgcgtcccccgtctccatcgaaaaaatccgcagaatttgagatggatgtgggcagaagattatgcgcagcggacacctgcaaataagctactgaccacgctggtttttgcggtttgtgtcctcactgcaaaccgcaaaaccggcagaggcttccgcagaagccgcataccccctcggagagcccacgatactttgcagccgcaggatgaaagtatcatagtgggttattacacttccgcagaagtgctcccccgaagctactcgtcctgcacaatctgaaatcaggaggtaaactgcctatggcaagaggcgacggtattcaccgtaccagcgcaagaaacgcaagaatgaaagatgcagacatcgacaacgcgcaggcgcacaacgagcgcgaaaaatcgtcgtatgtcaatcaggacatcgttcccgaacggacgccgtacaatgtccatttaaaacaccaaccgccgggtatatggagatgttcgagcagatgcgctccgacggcgtgatctccacacgcggtctgaaagcggatgccgagaaatttggagagctgatcttcgatgtcaactccgcatatttcttcaaccacggcggctatgagttcgcaaaacaattttacgctgatgcctacaaagccgcaatcaaaatcgtaggcggcgaacagtacatcctttcagcggtcatgcacgccgacgagcgcaaccgcgccatgtccgacgcgctggagcaggacgtgtaccactaccatcttcatgtggtctatatccccgttgtggaaaaacaaatcctgtggtcgaaacgctgcaaggacgagtcgcttcgcggcacggttaaggaaacaattcagcaggtcagcatgagcaaaaagtgggattccaagcccgcgctggacgagaacggcgagccgattttgagcgcaaagggcaaacccgttcccaagaagtcctacagcgttttgcaggacgatttcttccagtatatgcgcgacgccgggtacgacgatgtggagcgcggcgaacgcggcagctccgaggaacatctgacggtgacacagttcaaggtgcagcaggaacaggcgcggctggcagaacttacagagcagaatcgccagcaggagcagcaggcagcgacaatcggcaggcaaattgagaaaatccagaatcagcgggtcgatgtgcggtctatcgaaaaaatcgtggcaacgtccattcccttctcatccaaagttgccgtggagcgtgaggactttgaccggctttccactttggcaaagaagtacgttacagcagagaaaaaggaatccaaactgcaaaaggcggtggatgcggcaaataaactgattgcaaagctcaaggctgagattgacagtttgaaacaggaaatttctgattatatgtctgtccacagcaagctccgtgcggcagaattggagcgtgaaaatacggagctacgcgggaaagtccgcagctatgaggatgtaattcagcgtaataatctgtggcgattcttccatccgctcagagaaaaagcggtcacgagggacgaagctcgctgattcctgtgtagagccggaaaaaacgcattttatcgaatgggagcgcgtcggacagggcagacatcgtccggcgcgctcctgtttgaaaatcgccatttttcccaagtcaagagccgaagaaaatccccgaaaaacaccccgattgcgtgacagagccgcagaaaggataagcctatgagaacaggacctaccaagcaggaaaagaccaccgaaatctattttgacgagaaagaccccaccatcttcatccgcacccacaacaccgacctcaaaaacaggctgaccgcatacagccgcaaacaccctgccgtctgcaagctgacggacgtagaccaggacacgggctgcaaggaatttgagattgaaaagggacgcttctctttccggctgactgccccatacagagaggaacgccgcagggcggcaagcgaagcggcgaaaaacgaataaaagggttttagggcttcgttgattgttgcgttggcaaccccaccgcaatggtagtgcccttctccgaacttttctctacccaaacggagccgccgtggaggtcggcgatctcccataccagtgagagccccagtcctgcgccaccgtattcccggctgcgagacttgtccacccggaagaagggctggaagatactgcgctgatacacctctgggatgccgcagccggtgtcggagacgcggagcaggagcttttccaactcctgagtgacagaaacccgtaccgagccgcccggccggttgtacttgacagcattctccgtcaggttgaagatcagccggtagatcagtgcatcgctgccggtcataatgccgtcgccctccgccgtcagcgtgacgccaagcttatctgagagcggcgcaagatctgtgaagatctcctcgatcatgggagcgagctggatccgctcgttccgcgccacctgccgcagattgctcatctccagcagtgtcctggtcatctgtatcagccgttccgtctgctcacgcaaaagcgtgaggaactccgccgtctccggtcgcacatcaggatgctccgcggaaaacagctccaactgcgcctgcattagtgccagtggcgtgcgcagctcgtgggcggcgttgccggtgaactgccgctgggcggaaaaggcgttgttcagccgctccagcatctggttgaacgagcggctcagctgccggaactccgaaatagcatcttcatcgatcctcatatcggcaagattgttcagctgcacctgctccacctgcgaggtaaagctgcgcaggggcttgagagcgcgtccgctgacgaaataggcgaggatgccgctgagcagcgttaccgccgccgtgatgtaccagttggtggtgcggaagcgcccctgcaccccatcgacgacgatggtcaactcctcgttgggcgctatgagctgcgggtcaaagctcgccgctccgccatcattcaggatcaccgtgccgccgccttgtaaactgtccgcaatggtgtccatatagtacacaccggaggagcacagcagcaaattcatggccacgcaggtgatgccgatgagcaggacggacatcagcgtgatgcgccactgcagggaaagccgcttcattcctcctcgcctcccatcagatagccctcgccgatgcggttgcggatggggtcatagcccagcacggcgcggagctttttgcgcagagcggagatgtggacgcgaatggaattgctgaagctgtccacgctattgtcccaaacgtgactcatcagctcctcctgacttactggccttccctgatgcaccatcaggtattccaggattcccgtttccttccgggtgagcgtcagcgtctgcccgttgacggtggcggtacgggagcgggtgtcaaaggtcaggcctccgcagcttagcagcacatcctgctgggtgaactgccgcaatgtcaggctgcggatgcgggcctccagctccgccaagtggaagggcttcgccagatagtcgttcgccccggcatccagcccctgcaccttgtcctccacttcgctgcgggcggagaggatcagcacccgcgtctcccggtcggtctgccgcagggtgcgcagcaccgtcatgccgtcctttttcggcagattcagatcaagaagcaccagatcgtatcgttccacgcccagaaacgccagcgccttttcgccgtcatagcagtagtccacgctgtaggccagccgccgcaggctgcgaacgatggtctcgcacagggcgcgttcatcttcaattactaaaaggtgcatgagagccctcctttttatttcttcgtttttgtgttgctttcattatagcaaaaacagataaggtttgcgttaagttttcgttcttaacagagactttaactctcccgcgctatgatgggggcagaaaatcggaaagggtgatgaaaaatgagctgcgggaaaaaggccgcggcgcagatcgtgctgctgatggccggagccgccatgctgtgctttggtgtctggcggggcgaggcggcgacagtgctgagcaaagcaatcaaattatgtctggagtgtgtgggcattgggtaaaaagttttcaggcgtttcacagaccatgtcccgcttccggggctggattcaggcgggggcgacgctgctgaccaacctgcatctgccgaactttctcaagggcggactgtatcaggggacggggaagaccgtctgcgtgccggggctgaactgctactcctgtccggcggcgtccggggcctgccccatcggggcgtttcaggcggtggtggggtcttccaagttcagattctcctactatatcacaggcttcctcattctgctgggcgtgctgctggggcgctttatctgcggctttctatgccccttcggctggtttcaggagctgctgcacaaaatccccactaagaagctttccacaaagaggctgaagccgctgacatacctgaaatacgctgtcctgctggtgatggttttcctgctaccggcgttccttgtgaacgatgttggcatgggagacccgttcttctgcaaatacctctgcccccaaggcgtgctggagggagccatcccgctgtcccttgccaattccggcatccgggcggcgctgggcaagctgtttacatggaaattcagcatcctgctgtcgttgattgcgctgagcgtactgttctaccgaccgttctgcaagtggctctgcccgcttggcgcgttctacgcgctgttcaaccgggtgtccctcttccagatgaaggtggataagaataagtgcgtctcctgcgggaaatgcgccagagcctgcaagatggatgtggatgtgacgaaaacgcccaaccataccgagtgcatccgctgcggaatgtgcatccgcgcctgtccgacgaaagccgtgtgcttccgctacggcttcggagacggtaaagataaggcaaaagcagcggaaacgctacagacaaacaacaataacagggaggaataaaacgaatgaagatgaataggacgaatactgccggcagaattctggcgctgctgcttactgcactgatggtgctctctctggcagcctgcggcacaaagggcggagacaaaatggacggaatgagcagcgaaccgaagaatgccgaggaagcggttgccatgcacaaggagctgatggcgcaggaaaatgccattctctcggaggacacagcgctttgggaaaaggttttcatggcggccgacaagggcatgaccatgcaggaggacgacaaaaactatggtgagttcttgttggacaccatcgaaggttccaaagatcagtttacggaggatgagctgaagctgctcaaggaggcggcggagaagatccgcgagattgaaaacaagctgaccatgatagagaaaaagtaccccgaggcggcacagcaatctacggatggcgctatgagcgtgcccgcgggcagcgacatgaccacgccgcctgatgacggcagcatgcagaaattccccgcctttgagggcaagaacctggatggcaacacggtgaagagcgacgagctgttctccgccaacgccgtcaccgtggtgaatttctggttcaccacctgcaatccctgcgtgggcgagctttccgagctggacgcactgaacaaggagcttgcgaagaagggcggcgcactcatcggtgtcaacaccttcacattggatggcgatgaagcggcaatttccgaagcaaaagatgtactggccaagaagggcgtgacctaccagaatgtgtatttcgcttccgacggcgaggcgggaaagttcactacaaacatttttgcctaccccaccacctatgtggttgaccgcaacggcaatatcgtgggtgaccccatcgtaggcgccatcacggaaaagaagcaggcggagacgctgcaaaagctcatcgaccaggctcttgccgccgatatgggctgacaaacgaatttatcttctcagaaaggagggatacaccatgtatcggagagtattgccgcttctgctcaccgcggtactgctgctgagcggctgcactgccgggcagaaaaatatgccgcagaaaacggacgagaaggaaatgaccggacagccctctgatatgtccggtgaaggaagcatgtatatggataccacggaaaatgtcatatatctggcgggcggctgcttctggggcatggaacagctgatgcagtccatccccggcgtcatcgatgccgagagcggctatgccaacggcacctgcgaggcggacgccgattacaagaccgtctgcaagggcgagaccggctttcgggaggccgtgcgggtggagtatgaccccggacaggtgagtctcgacgccctgctgctggcctacttctatgtgatcgaccccacggaggagaaccggcagggcaacgaccggggcagccagtatcagaccggtgtctattacaccaacgaaagcgcgaaggaaacggtggagcgcatcgcggagatcgagcggggacgcagtgaaaagttcttcgtggagatcggcccactcaagaactactaccccgccgaggagtaccaccagaactacctcgaaaagaacccgaacggctactgtcacatcccgcgcgcggagatggagctgttttcccggctgcgcatcgatccgggcgactatcagaagcccgcggcggaatccatccgggacaagctgacggcggagcagtaccgtgttacgcaggagagcggcacggaacgtccattcagcaatgagttctgggatcagttcgagaagggcatctatgtggatatcgtcaccggcgaaccgctcttttcctccacggacaagttcgagagcggctgcggctggccggctttcacaaagcccattgaagagcctgccgtggtggagcttgaggacaacagcttcggcatgcgccgcacagaggtcagaagccgtgccggagattctcaccttggtcatgtgttcaccggcgatccggaatcccccaacggcgtgcgctactgcatcaacagcgcgtccctccgcttcgtcccctatgcgaagatggaggccgagggctacggatatcttctgtatctgttcgaggaatgagttcgcagaatacaatgatataataagcagcgtcccaatcattatgaaccgggacgctgtcgtttatgctcatgtcggtttattcaaacaggacgttcagcttgctgttcagaatcagatcggcataggcaagcgggtccttgtagatcagatagttcagctctgaccgatgaagcggttgtcggcaacttcgttttcaacggctgcgcagtcaatggaaatccggcttccatcgtcaaaaaccagttctacgctggctgtgtcgatgttgaattgacagaaaataagtttactcatagtcatatctccaagatgttttttgaggtgaatcaggcggtcaattccgggtgattattggcaggaatcataccgaaacccgctgcaaatcattcaaaataagtcgttgcgaacggttagtacgtataaaatagctggctacaaaacggctacaaaattcgtaagaaacctatgtacagcccgaaatacgtggattatttggacaaaatgcgtatcgatagtgcattttataaccctaaatcaaagcccaagacttgagtgggaataatcttttattaaccatatagcaaccggttatccaactgtgataaccggttgtttcgatataaccattaaaattctataggagtataaaatgcgtttaaaaaagtatttagctatacagtacagggataagtatttccaattgggaaaaatcgaatggcatgaagatggatcaatctatttatttctgccctccgatcgacaaattggtgatttaaataaagtttcaattcatacctccggccggattaattacggcatagaaatggaaagtcactttattgatccgcttaccaatattcaagagccgacaattatatgttccttgtatataccatccttatcgaaacttaaagaactagatcatattgatcgcaataatacaggattaattccgttgcattcgaattcttacttttctatcagcattgtactatcaaataatttagaaatatataaacaaaatcctaaccacgttcttgcgttggattttgaaggatatgttgttttaaactatgttattgcaaacttaaagatagatgcgcgaagtcaaaatcatattatgctttatacaccacacacacgcaaatacacaagccaagtaattgacagatatgaagcagaactcgcgtatagcaagcagctatataaagcagaagactttaccgttctagggccagatggaaatggtgaactactggttctctttgacgttgttatgcggcgcacgccttttttcaaaatcgaatttgaaaatccggatttatgggttgatcgattgcgtggaaataaatgcaagttaaagtttgtagtgaaaaacaaaaaatgcgggaacaaaatcgttaaagacgcgaagcgaatcataataacagatgctgctcttgataaagagatatacggtgatgatgaagcatttatacccgaagggtttctcaagcccaactctttgtgtagtgagtagcaaaagcgggagcacttgctcccgcttttgcatgcaattcttaagtattaactattgatgatgggcgttttttccatcaatactccttttggcctccctgcagtacaagcgtacaccatcacctaacatgtgagtcaaggtattttttcaatctgcccggaaacctgtgggctaaagtgcgtatctgtttgctcgccatcggagccgatccatggtatgatggagatgatattgaaattgtgttggagggcatatgaaagattaccggagaaaggatccccgactttccctttgcgggttaaactgtgccctttgccccatgcaccttggcggctattgccccggctgtggcggcggcgaagggcaccaaagctgtgcggtgatccgctgcagccgggagcagggcgagatggattactgctttgaatgcgcacaattcccttgcccgcgctacgacagcctgaccgaatacgattcttttatcccccatcggcacatggtgcgcgatcttaagcgcgttcagcagatcggccccgctgcttatggcgaagagctggagcaaaaatcggctatcctgcagcgcttactggagtactataacgacggccggcgcaagacgttttatattacggcggtatccctgctggatctatccgatctttcagcggcgatggacgagttggatcgtttctccatgtccgcacaagacgcctccattaaggagcgagccgcatttgccgtcgcgcgattaaccgcacttgctggggaaaggcacatcgagctgaagctgcgcaaaaagccaaaatcaaggtagccgcgctacccttttcgtacattgatattaaatgagggcggccaatgagccgccctattattgtagcactattcaaccataaagatccgattcgcacgccgcggcttgccctccccggtctctccatccgggtaccccaagcatacgctgcaccgggcgacgtattccgggccgatccccgcccttttcatcagcgcctgtccctgctcagtagcaaaagtatcctccgcacgtgtaacatgcacgctgcctatgcccagtgaccaggctgccagcatcaggttttgggccattaccgtacaatcgttgatgccccagcggtgtccctccggcgcaaaaatcgtgatgacggtaggcgcgcagtaaaatgcgcttaaaagcgaatcgtcttctgcgatgctgatctgcttttcgttgacgatatgcgcgccgggtttgagcgcgcctccgaaaattttgcggtttatgcgccccatatcttcgttcgcttccgcgtcctgacagaccaacatgatggccgattggcggccgcccgcactgggggcccaaagacccgcctctaaaatctggcgcagatgctcaggcgaaagctgttggggtttaaagcgcctcacagagcgccgcgacattatattttccattaccgcattcattattattctatcttcccttctggcccaacgtggccgcttttctttcatcttataaaatgcaatacagccgcgcaagtacgcacaattttgttctcaggttacctatgcgtaaccataaacggggcatatgcgctacagtgcgtccgctgatgcggctattgcaggcgctgaaacggtacatcgatgccggggagggcttttcccccattcccattctaaaaaagagccatgcaggcaacgaaacattttgaacttcatcccccccagaaaaccacgaataggccggcagaaaacgttttttccaaccaccttttcgggttcgcaaatgaattgacacacccatttttgttagttatactcagcttagggcgttttgcaatgtactaaaggggtaaagcgtccgcggggtggtttggggaaacactccgtattactaggggtacacggcaagctatattaggatgtttaagggaggaatgaatgttgagtacactaccggagaaaatgaaggcaatcgtcgcttatgcgccgggtgattaccgttttgaaatggtggacaccccccgcgcgggcgagggcgaaatggtgctcaaggtagaggcgtgcggcatctgcgcgggcgataccaaggcttttgcgggcgcgcccagcttctggggcggggacggcaatcccccgtacatcaaggcgccgatgatcccgggccacgagtttgtgggcacggtggtggagatcggccccaacgtcaagggcgattggaagatcggagaccgcatctgccccgagcagatcgttccctgtggcgagtgcatgttctgcaagaccgggcggcactggatgtgtgaaaagcacgatctgttcggcttccagaataacgtcaacggcggcatggccgagtatgtaaaactgaccaaagaggcgctgccctaccgcgtgccgcaggatatgcccatcgcgcaggccgcgctgatcgagccgtacgcctgctctttccactgtgtggagcgcgcccaggtcaagaccacggacgttgtggtacagtccggcgtaggcacgctgggcctggggatgatcggcgcactgcgccaggccaaccccaagtgcctgatcgcgctggacatgagcgatgagcgcctggccaaggccaaagaatttggcgcggatatcgtgatgaaccccggcaaggaggacgtagtagccaagatcaaggagatgaccggcggttatgggtgcgacatttatattgaggctacgggccatccctccagcgtacagcaggggctggaagccatccgcaagatgggccgttttgtggagttcagcgtgtttggcgacctggtaaaggtggactggtccatcatcagcgaccgcaaggagttggacctgctgggctcgcacttaagcccgttctgctacgacacggtaatcgaatggatcggaaacggcaagttgcccaccgagggcgtggtcacccaccagctgccgcttgagaaatgggaggaaggcttccatatcgccaagacaggcgaaggcggcgcgttgaagatcgttctggttccgggcatggaataagacaaaggatataagggggaaatgaatatgttgcaacgcatcatgaatcagccggacgatattgtagacgagatgctaaaaggctttttaaaagcccatagcgaactggtggaaaagaccgagaatcccagggtcgtcaaggccaaggacatccccgagggcaaggtcggcgtggtgaccggcggcggctcgggccacaagcctgcctttgtgggctatgtgggcaagaatatgtgcgatgccgtggccgtgggcgagatcttctcctcccccaccgccgccgcgttcctggatgcctttaaggctgccgatcagggcaacggcgtggcctgcctgtacggcaactactctggcgacaatatgaacgtgaagatggccgtcaagatggccaaaaagcagggcatcatggtcaagaccgtggtggccaatgacgatgtggcctccgcccccaaggatcagcgcgaaaagcggcgcggcgtagccggcgaggtgttgatgtggaaggtgggcggcgccaaggcggccaagggcggcagcctggacgaggtgatcgccgcggcgcaaaaggctatcgataacacccgcagcgtaggcattgggcttaccccctgcacgcttccggctgtgggccacccgaactttgagatcaaagagggcacgatggaagtgggtatcggccaccatggcgagccgggcatcgaggtatgcgcgctggagactgccgataagatggccaagcgcatggtggataccgtggtgccggattatccctttgaggcgggcgacgaagtggtggtgctggtctccggcctgggcgcgactccggtgatggagctgtatgtgctctacgatgagatcgataaactgctcagcgaaaaaggcatcaagacccataaggcctatgtgggcaactactttacctcccttgagatgatgggcgccacgctgacggtgatgaagctggacgacgagcttaaagagctgatcgacatgccggccaactgcatgggcttaacgcagttctaaggaggggcgcgaagatgagcgtatttcaaaataaagacggcaaacccgtactgctggctatggtcaaggccatccaggataacaaggcctatctgggcgaagtggacggcctgatcggcgacggcgaccacggcatgaacatgaacaaaggcttcagcctgtttgaaaagcggtttgcagacgctgatttcacttttacagaaggattagacgaactgggcaatatcctgtttgcggagatcggcggctccatgggccccatctacggcacgatctttatggattccgccgaggcaggagaggacttagaggagatcggcgtacaggagctgcacgacatgctggctgcgggcctggagggactgcagggcattgtggaggcgcaggtaggcgataagacgctggtggataccctcagccccgctgtggacgccctgaaagcggccgcggctgcgggcaagccgttatccggggcgttagaagacatgaaagcggccgcccaggcgggcaaagaatccaccaaagatatggtggctaaatatggccgctccagccggctgggcgagcgctcccgcggggtgctggacgccggcgctaccagctgttgcatcattttaacggcgatggcggacgcgatcgccgcgcagctgtaagcgcggttttacggaaaggaagaaacggtatgaaacttatcatcggctgcgacgaggcggcttataatcttaaaatggtgatcatcaagcatctggaggaaaagggctacgaagtagacgattttggcgccgccaagggtgagaccgtgctctaccccgatgtggcctataaagtagcgggcgaagtggccaagggcaactatgaaaaaggtattttgctgtgcggcacgggaattggcatgtgcatctgcgccaacaaagtgccgggcatccgcgcggcggtatgccacgatccctacagcgctgagcgcgcccgcaagagcaacgatgcgcagatcatgtgcatgggcgagcgggtgatcggcgtggagctggccaagtatctggtggatatctggctggggtgcgactttgccggcggcggatcggcgcccaaggtagcccgcattatggagctggaaaaggaataccagcaaagggcttagccttataacccaaagggcacaggagaataattcctgcgcccttcttttgtttcctttgggatttataggtcatataaaacccccgcacctctttacagggcgggggttttgttcattagccttccatttcaggcagcccgataggattattccgccccggaaccgatcaatcccatcgcctgggcgatgtcgatattgaccagcaggacgttgacggtatcctcgccaaatacgcccagcactttgccgcccgtatgccgcgccacgatctcgcggaccgtatcctcgctcaagcccgaggcctttacgatgcgcggaatctgcacctcggcggacgccggagagatatgcgggtccagcccggagccggaggccgtcagcagatcggtaggaatatcctcgcgcttgacatccgggttgcgctccaaaaaattggcgatatcctcctctacccgcgccgccaggtccggattggagggcgcgtagttattggagccggagctcagaccggcaaactccgtaccatcggtatagtattggttgccctgtgcatcctcggtataaacgttgtaatgatacgccgagggccggctccacatataataatcctgtgtgaattcctgccctacattctgggcgcccagggtctgcccctctacctctaccaggctgccgccggcctgatgtggaaagatcagcgccgaaaggcccgtcaaaagcgtgggaaagatcagcccgcagatcagcatcagtaccagggtcaccacaacagcctgtcgggtcccgtgcaggaatccttttgcagattctttcataatctcatcctccttataggcccatcagcgcaagcagcggatggatgatcaggtcgatgatcttgattccgataaacggggtaatcacaccgcctacgccatagatcagcatgtttctgcccagcattttgcccgaggacatcggccggtacttaacgcccttcatcgccaggggaatcaggcagggaatgatgatcgcgttaaagatgagtgcggacaggatcgcgctgtaaggcgtggccaagtgcatgatgttgagcacgcccagctgcgggatcgccatcataaacatcgccggaataatagcaaaatactttgcaatatcgttggcaatggagaaagtggtcaggctgccgcgggtaatcagcagctgtttgccgatctccacgacctccagaatcttggtcgggtccgaatccagatcgaccatattggcggcctccttggctgccgtggtgccgctgttcatgaccaggcctacattggcctgggccagggccggagcatcgttggtgccgtcgcccgtcatggccacgatcttgccctgggattgctccatcttgatcacatcgatcttatcttccggtttgcactcggcaataaagccatccacgcccgcctctttggcgatggtagccgcggtcaggggattatcacccgtgcacataatggtcttgatgccgatggcgcgcaggcgctggaaccgctctaccataccgggcttaacggtatcctttaagtagatcacgcccaaaatccggtcattcaggcagacggtcaggggcgtgccgcccagactcgagatcttatccacttgctcatgcaggtcgccagggatctggccgccaagcgccttgacgtattgctcgatggcatcggccgcgcccttgcggatgcgggtgccgtcgggcaggtccacgccgctcatccgggtctgcgccgtgaattcgataaagctggcgccttccaccgcttcgctatgatcccccattgcccgagccagttgcagggtggatttgccctccggggtatcgtcctgcaggcaggtcagcgccgcgcagcggatcagttcctccagccgcgccccgcccaccgggaagaaatccgcggccaggcggttgccataggtgatggtgcccgtcttatccaggatcatggtatccacatccccgcaggcctctacggccttgccggacatggcgatgacgttaaaccgggtaacccggtccatccccgcgatgccgatggccgagagcaggccgccaatggtggtagggatcaggcagacggccagggcgatcaatgtggaagtctgcaactgcacgcccgaatagatgccgatgggatacagcgttacgatcacgatcatgaaaatgatggtcagcgaaaccagcagggtgttgagcgcgatctcgttgggagtctttttccgcgaggccccttcgaccagggcgatcatccgatccaagaagctattgcccgggtcagaggtgatgcggatcttcaaccagtccgaaaccacggtggtaccgccggtgaccgagcagaagtccccgcccgattcccgcaccaccggggcggattcgccggtaatggcggattcatccaccgaggcaatgccctcgatgacctcgccatcgccggggatgatctcaccggcgcgaaccaacaccacatcaccttttttcagctcgctggaaagcacggtcctttccccgccgttgtcctccagcaatcgggcctgggtgtccttctgggtctttttcaggctggccgcctgggccttgccccgcccttccgccacggattcggcaaaattggcaaacaacaccgtaatgaacaggatcaccgctacgatgatattataggtgcggagggatccgccgcccacatacccgaacagtgccggaaaaaaggacagtaccagcgtgatcacaaaccccacctctaccacgaacatgacggggttcttcatcatataccgggggttcagctttacaaacgaacctattaccgcctggcggaagatctccggcgtaatcagcttttgattgcgtttcttactcatgttaaggcttcctccttatgtccagaggctgagatgttccgcgatgggccctagcgagagcaccgggaagaaggtcagcgccgcgaagatgtataccacaaataccaaaatgatggcaaacgaggcggtatcggtatgcagggtccccacggactcattgacaaagcgttttttcatcaacgacccggcgatggccagctggatgacgatggacaggtaacgcccaaagaacatagccaagcccgttgtaatgttccagaacatggtgttatccgccaggccctcaaaaccggaaccgttgttggccgctgaggacgaaaactcatagagcacctgcgtcagcccgtggaaccccgagttggtaatgccttccagcccgccctgcgtggcgaccgcgatagcggaaaatgtcaggatcaggaagggatggatgatgatgcaaagcgccgtcagcttcatctcgcacccctcgatctttttacccaggtattccggcgtccggccgatcatcagcccgcagataaacaccgccagtatagcgtacatgatcatgttcataaggcctacgcccttgccgccgaagacgacgttgagcatcatatgcagcaggggcaccatgccgcccaaaggcgttagggtatcgtgcatattgttaacggtacccgtggtaaacgacgttgtcgtcgtggtaaacatcgcagattgagcgatgccgaaccggacctctttaccttccatactgccctgtgtttggctcaagcccacatcggccagcgccgggttgccctggctctctgcccagaaacaaaggcccagccccaggataaagatgatccccatagcggcaaagatcgtgcgcccttcgcggccgtacatccatacggttaggctcttgcgcaccttgcctctgatttccagcttctgtccattggcctgtgcctgctcgcgcttgcggtcccttaccattttgccaaaggtgatgacgcaggcaccaggcaacagcatcatcgagtaaagctcaataaggttggaaatgatcgtcgggttctcaatgggcgtagacgagttagcgcccaggaagccgccgccgttcgtccccaggtgtttaatgatctccagcgccgccacaggccccatggcgatgatctgctttgcaccctcgatcgtatccacgaccacattgccggtaaagttctggggcacgccctgccataccagaagcatgccgccgatgatggaaaaggggagcaacacgcgggtggtgatgcgtaccagatccgcaaaaaagttgcctacattgtccttggtcttccccgccaggccgcggataaaagccacgcaggccgcataaccgctggccgcggatacgaacatcatgaagatgatgaccagcatctgcgacaggtacgaaaggccggactcgccggagtagtgctgcaggttggtattggtcataaagctgatgatcgtattaaaggacagggattcttccatattcccgatcccattggggttgaaaaggccgatactctggatccgcaggataatataccccagcaggatcatgacggcattggtcaccagaagcgataccgcatattttttccagttcatacccttatggggatcgatgccgctgatccggtaaatcagcccgtcaaggcggttaaataccgggtcggcaaaggtatgctttccggcggcgatatgatagacatagatcccgaccggaatgaccatcatcaaatagatgagaatggtcaatacgagctgcaccataacgaactcctcctgaaagctttagaatttctccgggtgtaccagtgcatataccagatagcaccccatcagtaaaacaataatgcctaggattatcatcataccttcccccctactcgttggaatccagttgtttttggcaccaatggaccaacaggccgagtaatccaaagctgacagcaaagatcgctatcatcaataggtcgagcatgcgtatcatctcctcatctacttgtttatcgagataattatactcgccggggtatgagcattgtctttgcaaaaccgctgtgatattaagattgcgttaagaatacataaagaaacgtatccaggcataaattaggcgattcgggcataaaaaagaggcatccttttggatgcctcttaccataaccgctataacggaccaaaacttatttttttacctgctcatcatagatcatgtcgatatcgtagcagatatgggcgcccttatactcaaagcggcgcgaggtgggcagccccgggaagtgcatggaaggcgaggtaatatccgttttcccctgcgccccgtccaggatcatctggtcgcaaacgataaaatcgttgatatagcttttatggatagccatgccgttatgtcccgggcagatgatgtcaaagtcatcataataagctttcagtttacgcatattgcgctgatggttctggatactctggcagctttggatattctcctgatggcccgccatcttaaagatcagcacctgtcccggatccacctcatccccggtaaagagcatgcggttctgcctatctaaaatggcgatgctgccagggttgtgcgccccgtcgtagatcacctgcagcttgcggctgcccagatcgaacatatgcccatcttccaccgtaacgatctcataatccagcggatattgggaatcgtcaaagggctttttagcctccgtagccgcataagggtgcatgtacgctaccttgaaccagccgttgccgccggtatggtcaaagtgaccgtgggtattgatcacccctgtgatgggcagatcggtaaactggcgcgcgtattcgtggatatcgcggtggctcatgccggtatcgatcatcatggccatctcatctcccatgaccagataactgtagcaccccacccccgagatcaggatcgtgtttggcgtgatcttaacggacataaaaaccgggtcctgcattgtaaaatcccccttttttctttatggtttgattataacacagggtgtacaatccgttaagcctcccggactaaaaaaccgcccggtgctttatcggcacttcgggcggttttaccggcggggtattgtgtttaccagttctgaagatttaggccgctgtactaggctttatccgccatcagctggcatacccggttacaatacgctactggatcttcgatctccatgccggcgatcagcagcgcctggtcgtaaagcatctgggcatactgcccgagcttttcctcatccttgccctgcagcttgcacagggtctcaaacaccgggtggtcgccattcaattccaggatgcggtcagccttgaccttctcctctgtgggcatggcatttaataccttctccatctccagggacagggggccgtcgctgctcagacaaaccgggtgggatttcagccggctggagagcttgacctgcttcacttttccctccagcgccttttgcatatcttcaaatagcgccttgtgttcagccgcctgctgctcggccttttcctgatcctcctggctatccagccccaggtcgttatcggagatggacttaaactccttccccgcaaagtcgcgcatcatgcgcacggcaaactcgtcgatatcctcggtcatgcacagcacatcgtaccccgcgtcccgcacgcgctccatctggggcagctgggccacgcggttgatatccgtgccgcaggcatagtagatatatttttgcccatccggcatggcgtccacatactcctgcagggcgatcagcttatccccggccagggagtggaacagcagcagatcctgcaaaaactccttttccgcgccatagttggtatatacgcccacctttaactgacggccaaagtttttgaagaagagctcgtacttttcccggtcgtttttaagcagcttttgcagctcgcttttgatcttctttttcacgttgttggcaatggcgcgcagctgcctgtcgtgctgcagggtctcacgggaaatattgagcgagaggtcggaggaatccaccaacccgcgcacaaagctgaacgcatccggcagcaggtccgggcacttatccatgatcatcacgccgttggaatagagttgcaggcccttttcaaaatcacgggaatagtaattgaaggggacagctttggggatgaacagcaacgcctgataggtcacggcaccctccaccgcgtgggacactaccaagagcggatcctcaaaatccataaacttttctttatagaagttgttataatcctcatcggtgacctcacccttggcccggcgccagatgggcaccatgctgttgagggtagaggtctccaccacggtctcggtctcagtttcgcttccctctttcatgcgggtggattccatctccatctgaatgggatagcgtacatagtccgagtattttttgacgatggcggccaggcggtactgctctaaaaactctccatagtgctcctcgccctcgtcatccttgatctcgaggatgatgtccgtgccattttccgccttttcgcagggctcaatggtgtagccatccgcgccggtagactgccactgccacgcctcatccgagccgtaggcgcggctttgcaccgtcacctttttgctgaccataaaagccgcgtaaaaacctacgccaaactggccgatcacgtcgatatcctcgcccaggtcgttatcctttttaaagttcaaggtaccgctgcgggcgatcacacccaggttattttccagttcctcccgcgtcatgccgcagccgtggtccgagatcgtcagaacgcggttttccttatccacgccgatatggatgggcaaatcctcccggttcaggccggtattgccctccttcatcgcggtaaaataaagcttatcgctggcgtcgctggcgtttgagatcagctcccggagaaagatctcccggtgggtatagatcgagttgatcatcagatccaaaatacgcttggattccgtcttaaactgcttttttgccataatccatcacccctataatgaaatcaaaatttatcttctgcacattttagcactcatcgcttttaagtgctaacaaaataatagcgcaacgccgcgcaaaaatcaagccctgacctaaaagagaaagggccttgcggccctttacggagctaaagatcggagccttctaaaaagttttgccggtaaaaatcatcaaatgcgcccatgaggaagcccttgcgcccctttttatagtaaagggccagcaccactacaaaggccagcgttccggcggtacacacgatcatgtccatcatggtatcgctcacaccggtatgcagcacgttttgcgggtcggttccaaagatcaggctgatcgcgtattcgctgatctcccaaagccctgctaccgccaccgaactcataaagacaaaggtgcccgccagggcgcactcttcccgcctgatctcccggtctggcttgatcagatagtacaaaaacaaagctaaaaacgctaccagcacgccagacaggccatgggccagcttatcaaaataaaggatgcgcgcatacccctggtagaccagaccgatggtataggccaaaatgaaaaaggcgtagatcacgcagttcagactatagcaggtttttagcttgagcgccttataaagcccgtaaggcagcggtaaaaacatcagcccgcaaaaggccagggcatagtaataaacccttgcgccactggccagatagtatatccccgcggccaaatggccaatggctatcagcgccatcagcgcccagttgatcttcttaaataccgcttcgcgtttctccaattttctgctcctttttcaatagcatgcgcgccctgcccgcgcttcatgtaggctggatgcagcaggcccggcgcctttgcgccgggccaagccaaggtcattttatccgccaaaggcgtctttcatcttttcaaaaaagtttttgcgcttttcgtgctgagcgttgcccaacgacgcatcgaatttgcgcagcagctccttctgctcggccgagaggcgcttgggcacctccagggtcaccgttacgtaaaggtgaccttttgcgttggagttgagcactttaatgcccttgccgcgcaggcggaaggtcgtgcccggctgcgtcccctccgggatattatagcgcaccttctcctcaagcgtgggcacctcgatctccccgcccagcgttgcctgggcgtaagtgatggggatttcgcaataaaggtcgtaattctcccgccggaagagcttatgcgggcgcacgcgcaggtgcacataaaggtcgcctgccgggccgccccgcataccgggttgcccttctccgcgcatggtcacagcctgcccatcgtccacacccgcgggaatgttcaccttgatcttgcgcgaacgacgcaccttacctcgcccattgcatttggggcaggggtcattgataatgtgcccagtgccgtggcaggtctcgcaggtgcgcacattcatcacccgccctaagatcgtctgctgggccacctgtacctgtccggtaccgccgcagaccgtacaagtcgtaggttgggtgccctttttggcgccgctaccgccacactcctggcatacctcgtcgcgggtgacgttgatctcccgctgcacgccaaaggccgcgtcctcaaaactcagggtgacctccacatggatatcttccccgcgcgcaggcccattgcgccgggcgccctgcccgcggaaaccaccgcccataaaggcctcaaaaatatcctcgacaccaccaaagccgccgaaaccgccgaagccctcaaagccaccgccgccaaagccagccgcctgcggcccctccgggccaaactggtcgtactgggcgcggcgctgggaatcgctcagcgtttcatacgcctcgttgacctctttaaacttggcctcggcctctttatcgccagggttcaagtccggatgatatttttttgccagattacgataggcttttttaatatccgcatcgctggcgtcttttgcgacgcccagcacctcataataatcacgtttggccaaaagcctcacctacctccacactctcggattctgccctcaacatgggcagggcgcggccacaagccgcgccttttgccccatgaatgttccccttattttttatcgtcgtccaccacttcatagtcggcgtccacaacgttatccgggccgctttgtgctccggcgttgcccgcatccgggcccgggttggcgccctgggcgccggcctgctgcccggccgcctgctgctggtagaccttgccgaaagcatcgtaggatacctgggtaagtttctcggtctcggccttgatcgcatccaagttgccgccttccagcgcctttttaagggcgtcaagaccggcctgcaccttgtctttatccgccgcatccagcttatcgcccaattccttcaagctcttctcggtggaatagaccatctgatcggcctggttgcgcacttccacttcctctttgcgcttcttatcctcggccgcatactgctcggcctctttcacagccttatcgatctcgtcgtcagacagattggtcgacgcggtgatcgtaacgttctgctcgttgcccgtgcccaaatccttagcggatacgtgcacgatgccgttggcgtcaatatcgaaggtcacctcgatctgcggcacgccgcggggagccggggcgataccggtcagctggaaacggcctagcgtcttgttataggtggccatttcgcgctcgccctggagcacatgtacctctaccgaggtctgtccatccgccgccgtggagaagatctggctctttttggtggggatggtggtgttccggtcgatcaggcgggtaaacacgccgcccatggtctcaatacccagggaaaggggcgtaacatccagcagcaggatgtccttgacatcgccacccagcacaccgccctgaatggccgcgcccagcgccacacactcatcggggttgatgcccttaaagggctctttgccggtgatcttctgcaccgcctccgccacagcggggatacgggtagaaccgcccaccagaatgaccttatcgacctgagaggccgtcagccccgcatcctgcagcgcctggttcatggggccggtggtctgctcgaccaggtcgtgggtcagctcgttgaacttggcccgggtaatggtcatatccaggtgtttggggccggaagcatccgccgtaataaagggcaggttgacgttgctggtcaacacgccggaaagctcgatcttggctttttcagccgcctctttcaggcgctgatgggccatcctgtcactgcgcaggtcgatgccgttttcctttttaaactcgtcggccatgtaatccaccaggcgctggtcaaaatcatcgccgcccaggcggttgttgccgtgggtcgccataacctcgaacacgccgtcgccgatctccagaatggacacgtcgaacgtgccgccgcccagatcgtaaaccaggatcttctggttatgttctttatccatgccgtaagccagggccgcagccgtaggctcgttgatgatgcgcagtacctctaggcccgcgatacgcccggcatccttggtggcctggcgctggctgtccgagaagtaggccggcacggtgatgaccgcctgggtcaccggctcgcccaaatagctttcggcatccgccttaagcttgctcaggatcatcgcgctgatctcctgcggggtgtagtcgttgccatctacccgcactttgtaattgctgcccatctcgcgcttgatggaagaaaccgtcctgtccggattggtgatggcctggcgcttggccacctggcccaccagccgctcgccctccttggtgaacgccacgaccgaaggcgtagtgcgcgcgccctccggattggggatgacaaccgcctcgccgccttccataacggctacgcaggagttggtcgtacctaagtcaataccgataatttttcccatgatctatacctcccattggattgaattttcaaaatttatttaaatggattgcctgctattattgtgccacttttaccatgctataacgcaaaaccttttcgcccgcgcggtatcccttctggaacacctcgcaaacggtgccggcgggataatcctccgtggcttcggcctgcatcaccgcgtgatgcttttccgggtcaaaagtctcgcccagggccggaatctcctctacacccatcttggtcatagtctccagcagctgtttgtaaatcttttccacaccctcaaagaacgcgtccgcatcggcttttgccgccatcgcccgctcaaagttgtccagcaccggcagcagctctttcagggtatccagcttgccgtcctgataggcgtccgcccgcagggtctggttgcggcggcgaaagttatcaaactccgcctgaaggcgctgggccgtattgagataatcagccgactgctgctgctctttctccagcagcgccttgatcttttcaagctccgcatccttatgcttcttcttatcttttttcttatcctgcgccttgggctcttcgcaggccgcttcagcctgctgcccgcagtccgctgcgttaggctcggtttcctgattcaaattctcgtttttttcttccatcgttatcctccttatgccgctattcgccatcggttaggttcgaaagcacctcggtgaggctgcgccccataaagcccagcacggacatgacgcggctgtaatccatccgcgtcggcccgatcacgccgatcgaacccaagttttggtcgcctatgcggtaagttgccgtcaccaccgaacaattgcgcaagtcctcaaactcgttctcccgcccgatggtgatgttaaactgcaatttgctaccccgccggagcagttgataaagccggtccttcgtctccaaaaccgataagaactggcgcgccttatcgatatcactgtattccggatggttgaggatcttgcccgcgccgcccagcaccaactctttagagaggttgggcacggcgtaggtatccagcgcctcaatcaggctgcctgccaggcgtttgtgcccctgcagagccttggccaggttttcatccatctgctggtgcagcgtctcctcgatctccgccagcgtgtggccgcaaagctgcttggccagcagcttggatacctcatatatctgatccgaatccatctgtttggggatggagatgacctgatctttaagcacgccggcctcggtaaccagtaccaccagcgccaaattttccgtgatcggcaccaactggaacccggtgacgacgctgtctttcatctgcggcgtcagggcaacggccgtgtaattggtaatttcgctgagcagattcgccgcctgcgagatcacctcttcgatctcgcccaggcggaaatgcacgtactgctgcatgtaacggatctcctctgcggaaagatccggcacctgcatcagctgatccacatacagccggtaggctaaatcagaagggacgcggccggccgaggtatggggctgctctagcaaacccatctcctccaggtcgctcatctcattgcggatggtggcgctgctccagtccaaatactttttggcgatcgtacgggagccaaccgggatgcccgtggcgatatagtcgtcgatgatcgcgcgcagaatgcgcagtttgcgttcgccaatatccatctcgcccaagcacctcctcgtccgctttgttgttagcactctcaaaagaggagtgctaaaacctatctataaattagcaccgcgggccggaattgtcaagggtattttaaccaaaatccagcctacggtgcaaaaaaatcaaagaaagtcaaaaattattatccagtgcctgtaagaatgccaccaggaggggattctgcacgtccagcccccgctccgtcagggccaggcggccgttttcaaggcgcatcagccctccgctctcataggtatggatgagttttttccatttctccggcagcggcgcgccgtaccgcccttccagggcggccagcggaacgccccgtaccatgcgcagccccatcatcagcgtttcaaacagcgcgtcattgccggaggggtagctgcgcgctgccaccggaccttcccccgcctgcacgcgcccgatatattcgcacagctccgcggtattctcataccgctccccgccgaaatagccgtgcgccgcgcagcccatgccgataaaatcgccgttttgccaatagttcaggttatggcggcattcctgccccggccgggcaaagttggagatttcatagcggctgtatccccggctggccagcaggctgcgggccagctttgccatatcgtcctccgcgtcctctccgggcagagcggcggcgcgccccgcctgcacatccgcatacagcgccgtcccctcctccaggatgagggaataggcggaaatatgctccggcgccagcgccgtgacccgctcaagggtatcccgccactgcgcaagcccctgcccgggcaggccgtacatcaggtccacattgatatggctaaagcccgccgtacgggcgagcttatagttctcctcaaagacaggataggtatggatgcggcccagggcgcgcagcagcccgccgtccgccgtttgcaggccgatgctcaaccggttgatcccgctctcccggtattcggtcaacttctccgccgtcagcgtgccggggttggcctccagggtgacctccgcttgcggtacgatggtaaagtgccggtatagtgccgccaccagatgggcgaccgccccaagcggcaaaatagagggcgtgcccccgccgataaagaccgtttcaaaggccgtatcctgcgcgcgaaccgcccagcggtccatttccttttccagcgcgctcaggtaggccggcatatccgccgcgcgcccggcatacgaggtaaaatcgcaataccggcaccgggccttgcaaaaggggacatggatatagatacccgccatatgcgcgcctaattcattttgagcacggccataaacgcctcgctgggcacctcgaccgagccgacctggcgcatccgctttttaccctctttctgcttttccagcagcttctttttgcgggtgatgtcgccgccgtagcatttggccagcacgtccttgcgcatggccttgaccgtttcccgggcgatcaccttgccgccgatggctgcctggatgggaatctcaaagagttggcgcgggatcacctctttgagccgctcggcgatggagcggccccgggcataggctttatccttatgcacgatcaacgtcagtgcatcgcacacatccccgttgagcaggatatccagcttgaccagttcgctgcgccggtagtccttcagctcataatcaaaggaagcgtaaccccgggtgcggcttttgagggtatcgaaaaagtcgtagatgatctcgcttagcggcagctcgtaatgcagcaccacgcggctctcctctaaatactgcaattcaatatagaccccgcgcttttcctggcacagctccatgatcgcccccacatattcgggcggcgtcatgatcttggcgtccacaaagggctcctccatgtactcgatctccgcgggattgggcaggttggtggggttgtcgatggtttcctgcgtcccatccgtgcgcttgactttatagatgacgctgggcgcggtggtgatcagatccaaatcgtactcgcgctccaaacgttcctgaatgatctccatatgcagcagccccaaaaagccgcagcggaagccaaagcccagggcgatggaggtctccggctcaaagtgcagggccgcatcgttgagctgcagcttctccagggcatcccgcaggtcgggatagcgggccccgtccgccggatagatgccgcagtataccatggactgcacccgcttataaccgggcagcggctcagatgcgggatgcgccgcatccgtcaccgtgtcgcccacccgggcctcccccacgtttttgatcgaggcggcgataaagcccacgtcgcccgcggaaagctctttcagtgtggcgggctggggataaaacgccccgacctccaccacatcaaattcgatgccgctggacatcatgcggatacgcatgcccgcacgcacgctgccctctttgacgcgcacgatgcagatcgcgcccttataattatcgtaataagagtcaaagatcagcgcgcgcagcggggcatcctcctccccgctgggggctgggatataggaaacgatgccttccagcacatcctcaatgcctaccccgctcttggcggagatcagcggcgcgtggccggcttccaggccgatcacgtcctcgatctcgctgcgcacctgctcgggctgggcgctgggcaggtcgatcttattgatgaccggcaggatctcaaggtcgttctctagggccaggtagacgttggccagcgtctgcgcctcgatcccctgggaggcgtccaccaccaaaagggccccctcgcaggccgccaaagcccgggagacctcgtagttaaagtccacatgccccggggtatcgatcaggttaaactcataaaccttcccgtcccgcgcgcggtaattcatgcgcacggccttgcttttaatggtgatgccccgctcccgctccagctccatagagtccagcacctgctcggacatatcccgcttggccatggtctcggtggcctccagcagccggtccgccaatgtggatttaccgtggtcgatatgggcgatgatgctaaaattacggatcaaatcctgatgttcccttgccatgtgttttactggactcctttatatctcaaagttgccgggcgcgaacagccctgccgccgcgccgcctgcattttaatacggatgaaacttccttcatcataacgaatccggggccaaaaagcaagatttgcattgccccaggcggcagtagacagcgacataaaaataggtgtatgataaaaatggaataaaatttgcttattcatggggtagaacgttttacgggaggttttggagcaagatgaacgaaatactgcaaaccacggcggacaacctgaatgcgcgcggttttgacgcccaaatctttaacacggcggacgaggtaaagcgcgcggtaatggattttatcggcgagggcaaaacggtgggcatcggcggctctgtaacggtgcgggagctggggctgtacgaggccttgaaggacaagggaaacgatgtggcctggcattgggaagtgatgggcaaaccgggtatggatcaatccctggtcaaagccctgcgctataaggccaatgcctcagaatattacctgaccagcgccaacggcgtaagcagccagggcgtgctgatcaatatcgacggcacgggcaaccgcctgtccgccaccctttacgggccggcacacgtatttttcatcgtgggccgcaacaagatcgccgcaacgtttgaagatgcgatgaaccgcgccaagaacgtggcctgtgtgctcaacgccaagcgccttaacacccaaacgccctgcaccaaggcgggcaagtgtatggattgcaaggcggccgcccgcatttgccgcttgacagccatccacgaatatgccccttcctttgaagggcccaaggtccacgtctatctggtggatgaggatctggggtattaaactatactatatcccaataaaaagggccgcaggtttatgcctgcggcccttttctgatgcacctattcttctacggcgataacggataccgggcaattatccgcggcctcctgtgcggcttgcgccacttcgtccgtaaccggggcgtacacctcggcccgtccatcttccgccatgcggaatacctccggacaggtggccgggcacagcccgcagccaatgcagccttctcgatcgatactcgctttcatttatcctatctccctttcgcatcaagttgggcctagtatctgcgaaaacagagattatgatgcgctaaaatcccgcgtgaacagatcgctgtgctccagcagctgttccaccgtgtcaaaccccagccggtgcagcagttccagtacataagggttttgcagcggcgtggcataggttgccgccgcgccataggcgtccacgttttcccgcccggtctcacggtctaaaatcgccctggggccgcccacgcagccgcctacgcagcccatcccctcaaaaaagttggccttcgcctcgccctttttcagccggtcgatcatcgccttgcaggccggcacgccgtcggcctgttcggtccgtacggcgatcgctcggtcggggtttagctgctctaccgtcacgcgcaccgcctcgctgacccctccggtgcgcgcataaatgcgccctgcccgtgaggaatgatccttttcgctctcctccagctcctctggtcgaatgtccgccgcctcgaaaatatcccgcatttcctgaaaggtcaaaacataatccacggcgcctgcaatatccttttcccgcgcctcactctttttcgccaggcaagggccgataaaaaccgtcaccgcgtccggatgcagctttttaatgacgcgcccgcaggcgatcatcggcgagaccgagcccggtacgtgcggcatcagctcttggtatatcttgcggatcatgccgatccacatgggacagcagcagctggtcagctgataatcggcctccgttacgatattgcgatcaaactccagcgcctctttcagggtgaggatatccgcaaacaatgccacttcgatcattccgtcaaaccctagtgctttaaaggcgctgcgcagctttccaggtgtaaccgcatcactgaactgccccaaaaaggccggcgcgatcagggcgtaggctagccgcccgccctggcggacggacttcatggcgggcagcacatcccggctggcggtcagcttgcccgagcggcacgcctcaatgcaggcagcgcagcccgcacaccggtcagggtcgatggtcagcttaccatcctcccccatggtgatggcgtcgaacacgcaacttttgcggcaggcctggccggacgtgcagcctccgcagtcctcggtttgcagcaccactggatatttctccgggtgcagcaggcaatccagctggcgctcatcctgcgcgggcaacggcgctttctccccccgcatctcccggcgcagcagggtttgataaagcgtatcaaaagtcatacacagcccacttccttacgatcggtatctttccacatagtatagcctgatcttgtccccttcaatccgtctgttatccagcttaccgggcacgcgctagcacctctaccgcctgtggctccagctcgatctctccttgccaggtgccgccgcccagcagccgcgccccgcccgcgcccacgtctacccgctggggatggtggctaaagttcatcaaaaaaacatactcccgctccccgtcggtgcgcgccatggcacttacccctcggggcagcgcgccgggcaacacgggcgaaatgccgcaggaagccgtaagtttccggtaaaagtccatcaaaaacgcatcatccaatcggcaggccatgtagtaagcgcggccctggccataatcgttgaccgtcagcgccggatagcccgcgtaaaagtccttctcgtaggctgctagcgccctggcgccctccaggtgcacaagggtgcagtagccctgcgcccggtaggttttgccctgccaagtaacttgattatattgatccggatacagggtatccagctcctcatcccatatcccggccagctccttgagcgggcccgggaagccgcccaggttcaccagatcccgctggtccacatagccgctcatataggtcagcaccacctggccgccggcacgtgcaaattctgtaagccgctttgcaaagccctccttcagcagatacgccatgggcgcgatcaccagtttgaacttatccaggctgctctcttcatccaccatttccaccggcacgctcaggtgccaaagtgcccggtaatgctcgcgcaccacgtcctcaaagcgcttatcggtgttgtcggcaaactttgcatcccgcagggcccagcggttttcccaatcgtaaagcagggccacccgcgcgggcaccgtggtgcccacaacggcgtccagcttggccagggccgcgccggtatccgccacttcccggaatacccgggtacgattgcttccctcgtggtccaccaccgcgccgtggaacttttcataggagccccggcttttgcggaactggaagtactgcaccgagtccgagccatgggccacggcctgcaggctatgcagcttgtgcccgcccggcgcgctcaggcgcgcgaccggctgccagttggtgggcgaaggcgagctttccatcaacaaaaagggctgcccgccccgcatgccgcggaacaggtcgtgcataaaggccgcctggcaggccacttcctcatccccctcgtccgtgcgccactgggggtagttatcccaactgaccacatccagcttccgcgccaggcggaagtagtcgatctccatatccacatcgtcatggccttccatgcgcataaagttggtggtaatgggcacctccggcgtaaattcgcgcagcggcgcgcactccgcctgataaaaatcgatatactgatcggtcgtaaagcgcatccagtccagatgctggccgtgcaccgtgccctcccccagcttggagggcgcctcgatctggctccaatccgtatacaggtgcgcccagaacccgccccaccaagcctcgttgagcgcgtccagggtttggtagcgcgcctttaagtactgcctgaacttctcctggcacatttcacaatagcaggcgccgccgtactcgttggagatatgccacatgccaagcgcgggatggttcgcatagcgcctggccaaaagggtattgacctggcgcaccttttcccggtagaccggggaggtcaggcagtggttgtgccgggcgctatagcggatgcgccgcaggtctctgcccgtgcgcagcacctccggataggcctgggccatccagggcggccgggcgccgctgggcgtggccagaatcgcggtgatacctgcatccgccagcatatccatcacttcatccagccattcaaaatgatactcgccctcggccggttccagcatagcccaggagaagatgccgatgctcagttcattgatcccggcctctttggccaggcgcatatcctctttccagatggtgtccttccacttgatccactggtcgggattgtaatccgccccgtggatcaggtgcggacacgcgctgattacgggccggaagcgaacaggtgtttgctggtgcataaagtccccctcctattgcggttttatctttgctatcatcatacacccacgccgcgtctgggcgcaatcaaaacgtttccgcagcgcatttgacaccgtcccttcccgcgcctataatgggataaagccgacagggggatttgtatatgaaggttaccatcaaggatattgcgcgcgaggccggtgtttcgatctccacggtctcctacgcgctgaataaaaaggggcgcatcgtctcggataaacacaggcggatcatcgagatcgcacgcaaatacaattacgtacccaacgccaacgcccgctctttagcctcggggctgagcaataatatcggccttttgctctacaacagcgccgggctgaccagtccctatatcctcaagtgtatctccaccctgtccgatattatcggtgaaaattacggctggctggcgctttgccagctcaaaagtcccgcgattgacctgcaggatatgcgccgctatctaggcaattcccgttcggacgggatcatcgtatttaacgcacagctgccgcaagaggtaattgccctgctgagtacggcaaaaacgccctatatcgtctttggcagggagcaggcctcctgcagctatgtctgctgtgacgatgctgcgggcatccgcgaggggtttgacgcgctctacgcccgcggcaaacgcaaagtgctctttatctccgggtgcacagaggctgaaatggacaaagacgtgcgcacgcaggcctatctgggctgcattgcggaccacggacttgccttttgccaggtagtaggcggcggctatagccgggaacagaccgctgccgcgctgggggcgtattttgccggcggcggagaaacgccgcaggccatcatggccgccaacgatgaaatggcttatgcggccatccatgtgctggaggagcgcggcctgatccccgggcaggatgtggcgctgatcggctttgacgacgccgaccccgagcataacgatgcgattggcctgaccagcatccgccagcccatcggccagatgacccgggcttgcattgaatacatctatcaaatcgtagaaaaagatgaatcctctttattgcagcaaaaatatgcgccgcagctggtcgtgcgcgcgggcacgcttttgtagcgcccttgacagctcgtcgcgttcttgttatactgatttcgaaacgtttctaaaacgatatttaatcgtgaaccaatacagatttattttatatttttagaagggtgtggcaatgatgagcgaaatgtttccccgtaccaagattggcaacctctccgtctctcgaatgatcatgggcaccaacaatatcgtgggtggttcccaccgcaccaaggccagggatacccatatccaggagatcaacaacaataaagaggctgtagccgagatcgtgcagacctatctgagctatggcgtggacaccattatcggcggcatctccggcaaggattacatgcttgacggcgtgcgcctggccgaggagcgcaccgggcaaaaggtgcatatcgtccagctgaccaatatcgatgtgaccgacagcgacgaggcccgcaaagaggtgcgcaacacctttaaacagtttaaggaggacggcgtggagatcgtgctgcccctgcatgtggcggtggaaaagctggtcaacaagggcaaggaaaagatcgagcgcattgaggactatctctatatgatccgcgagctggatatgatccccgggctttcggcgcatatgcccgagatcatcacctatgccgaccagaatgggtatgatgtggaaacctatattcagatctataaccccatcgggtttatgatgcaggtggaaattgaaacggtgaacaccgtcatctggaacgccaaaaagccggtgctgaccattaagcccatggcggccgggcatttaaacccctttgtagggctgaacttcgtttggaataccatccgtgaaaaagatatggtggccgtgggttgcatgacgcccgacgaagtgcacgagacggtggagttctcccgcgcggcgctggagcggcgccatcccgaggtagaaggccggctgcatcagaaactttaagcaaagcatacaaggcccgtaggcatcctgcccacgggctttgtatatagcgtttttgctgccctatcccttgccagtaaaattcagctttagcggtataacggtaaaagtgcgccttaaaaaccggctgtggattttgaggttgaaggaggaagagctatggagcataagtgcaaaatcacggtattacgcaaagagtgttatcaggacctgcaggagcaataccttgccgatcctcactccggcccctgccccatgtttgaggtcgggcaggagtttatactggagcgcaatgacgagcgggacgatttttggcatatgctcgagggtaagttctgctctgaagcctgggacgccatcagccgctatgtatacacagccctgcagggcggctccatcatgcgcggatggaccaatgacgaaaaaatgatgatcgcctgctgcaacgacgggacccggccggtgatctttaagatcgaacgcattgacatagaagattagccggctcgggcggcgcagtatggccggtgtatttataaacaatttaaaaatatctcttcaaaagggtggcaaaacgtcaccccttttgataagcttaagtttgacatcacttacttttaaggaggtactctatgcagaccattggcgtaggcatcatcggttttgggtttatgggcaaagcccatacttacggacatttgaatatgccgctattttataacaaccttcccttccagaccaagctggtcggcgtatgcgaccccgtcctctccctggcacaggacgccaaggcgcgcgtgggttttgaatttgccaccgacgactataaggcgcttttggcccgcgaggatatcgacgctgtgcacatctgcacccccaatgctctgcacgtgccgatcctgatcgatgcggtcaacgcaggcaagcacgtttacgtcgataagccgctggcggtttccgcccagcaggcggatgaagcctgtaaggcgctggagggcaaggatgtgatccaccagatggccttccacaaccgcttcttccccgcctcgatgcgtgcgcgccaattgattgccgatggcgcgctgggcgatattttgaccttccgggccgcctattttaccgccggcggcgccaatcccaccggggccatgggctggcgccagcgctccgcactctcaggcggcggcgccatccaggatttaggttcccatgccatcgacctgctgttgtggttgtgcggcctcaaggctgagcggctgatcagcgagacctttacccccaaccctgtgcggcaggacgaaaatggcaaccccgtgcaggtgacggaggaccacagcaacatgatccttcggttggaaaacggcgccaccggcacggtagaggccagccggctgcgaaccggatttgatgatatgacccgcatcgagatccacggcaccaagggggccatcgttttggatctgacggagaacgattacctgcagttttacgataacacgctgccggattcgcccatgggcgggttaaagggctttacctccatttatgcggcccagcgctttgacgcccccggcggctccttccccaatgccaagcaatccatcggctggctgcgggcgcacgcgcattgtgtatactccttctacaatagtatttatacccatacgcccgccacacccagcgtttttgacggtgccaggatccagcacattttggatacagcctaccgttcagccgaagcacacacctggcttaatatcaaataaaaagcgctatatatagtgcaaaaggccccgtccagatggacggggccttttctgcaatctcccctgcctttaattgacaggatggccctgcaatgctatgcttgatgtgaaaagatcatcaaaggaggtgcttgtttgtcggtatcccggtaaggaaacgccgtcttgggtcagcgttttgctgctggcctgtttggttttacctgcctgctggtaccgctttaggcgagctcccccgtttaagcgatataaagcgcagttgaactgcgctgttttttgtatgggcttaaggccctgcggtctccaaaggcaggtctgtttgaatagcgagatcggaggtaatttttatgttgatacgccaagaaacgcctgcggattatcccgcggtttacagtctggttcagcgcgcgtttgcaagcgcgccggtaaaagacggcacggagcaggatctggtcgttgcgctgcgcaaaagcaggcattttataccgcagctttccctggtggccgaggatagcggaaaaattctgggccacatcatgtttaccactttacaaatcggcacgcacgaggcgctgacgcttgcgccgctgagcgtggcgccgggccatcagcgccagggcgtcgggcaggcgctgatccgcgagggacaccgcattgcaaaggcattgggttatgaggtcgtgatcctccttggcagcgaaaaatattatcccaagtggggttatcaaccggccagtacgtttggtatccgcgcccccttccccgtagcggatgagaactttatggctatccatctggacggtaaaaaggtcaggtgggacgccgtggtaaaattcccgtcggcgtttggcatagaaaatcgggaataatggcaaagggctgcgctattggcgcagtccttttgttttgcttttgcggtttatcaagcctttaccgctgccctgtcgtctaccagaggttcgcctaaaggcttgatctccttttggtagatgtgccgcaggaaaatggagcacagaatagccgaggaaacctccgctatggggaaagcccaccagatcgcatccagcccgccccacagggagagcaggtaagccaccggcagcagcaccaccagctggcggatcagcgataccgtcaagctgagcatgccgtgccccagcgcctgacagaccgaggaggtgatgatgcaaaagcccgccacggcaaaatggatactgatgatgcgcagcgccggaacgccgatctgcaacatggtttccgatgcgttaaagatgcccagcagctgtgccgggaatatccaaaacgccgccagacccagcagcatgatacataccgcgtacaaaatgctcagctgcatcgttttgaccatacggtcttttttgcgcgcgccgaagttataggcgatgatgggcaccatgccgttgttcagcccaaagatcggcataaagataaagctttgcagcttaaaatatacgcccagtaccgccgtagccgtagaggaaaaggcgattaaaatcttatttaggccaaaggtcattacagaaccgatggaggccatgatgatggagggcacgcccacactgtagatgtgcttgatgatgcccgcatcgggacggaaggcgcgcaccttcaaacggatctcgtggtttttcttgtggttcagatagaccgcaatgcatgccgcgacgatctgcccgatcaccgtagcggccgccgcgccggctacctccatccgcgggaagccgaatagcccaaagatcatgatcgggtccagaatgatattgacgatggcccccaccccctgggtaatcatggtataaaaagtcttgcccgtggactgaagcagccgctcgaaggtgatctgaaaaaagatacctaacgagcaaaccgtacagatgatcagatagtccgttccataatccacgatctcgccgatatcggtctgcatttggaaaaacagccttgaaaatataccgcccagcagcgcaaagacgataaagctgacggccgccaggaacacgccgttttccgctactttgttggcggtatcaaaccgtttttctcccaggttcttggacagccgggcgttgatacctacgcctgtgcccgtagccacggcgatcatcaggttctgcgccgggaaggccaacgaaacggccgtcaacgcgttctcgctcaactgcgcgacaaacatgctgtccacaatattgtaaagcgcttgcaccagcatggagatgaccataggtagggacatggtgaccagcagcttgttgaccggcatgacccccatcttattttcccgaatttgtgtttcgctcaatttctatcacccctaaattttaccagttgacagatcagctgcgcagcctgctcgatcccaacggagctgtccagcgtcatatcgtagtttttcagctgcccccagcgggcattggtaaagtaattgtagtacgccgcgcgctgcttgtcccgccgcagcacgtcgcttttcacatccgccgcctcaacatggtagacctcgcgcgcccggcggatgcgctgctccagcggcgcatggataaacacgctgacccgccccggatgttcccgcaggatatcatcggcacagcgccccacgatcacacaggggcccttctgtgcggctgcgcgaatcacctcggcctgagctaaaaaaacctgatcgcttagtggcaggttttcaggcgaaaaggataaattatagataaagcgcgattttttctgttccgcctcgctgatatagtcctcgctcaggccggttttacgggccgcttccacgatgacctcccggtcataaaaggggatctgcaaaagctccgagagccgcttgccgatcaaccgcccgccagagccgaactccctggccagggtaatgacctgattgtgcatattctccctccctattagttttaattgcaaccgttattcttaaatgatttgccagctaaattatagaataatccaaaaataaagtcaacaaagcttgacaaaatgccatattcataccataatatcgttgcaacagaaactattaggaggcccctcaattatggagcatgcggacattattaaaatgatttccgtagtctaccgcaaaacccagatgtatctgaacctgcaaacgcaggatgtgggcatcacaagcggacagatcccatttatcatgatcacttgcgagcgcggagcgatgcagcagcaccaattctgcgatattctggatatcgataaaagcacggtggccaagatgctgggaaagctggagctccagggatacgtgacccggacccccaaccccagggatagccgctcgatcgacgtgcgccccaccgaaaaggcgcatgccatctatcccatgctccggcaaatcggcgaggattgggctacgaccctgacgcaggacatgacgaagatcgagcgggcgatcttttttgagatgctgcaaaagacaggcgggcgcgccatggactactttgacaacatccgttaacgtttaaaagcgaaaggaccccgggcaatgcctgcggggtcctttgttttatatgcgttttacgcagccgtatccgcttcccaaaactatgtgcggatatggatcgcgctgccctgcgggcccttttccacgtagaccccggcctcgatattctcgcgcagcagcgccacgtgggagataatgcccaccagacgccgggagccccgtacggaggccagcaccgccagcgcatcctcgatggattgcggatccagcgagccgaagccttcatcgataaacatggcctccatccgcatcccgcccgaccgggcctgtaccactgccgcaagccctaaggatagcgaaagcgccaccagaaacttttccccgcctgacagactggctgccggccgccgctcgcccgaataatggtcgtacacctccagatccagcccgatcttgcgggccctgccgctgccctccagggtacgatagagctgataccggccgccatgtacgtttttaagcatctcattggcctgctgggtcaccgcggaaagcatgatgcccaacacatagcggcgcagactgatccccttatcgccgcgcagcagggtggcaaaagccgtcattttttcctgctcgatgcgctctgtttctagttgtgccagcgtttgctccgtttccctatgcacgcgctggaggcgctggcgctgttgctgggtcaccatccgctgggtttgcaggcggtttttctccgcacggatggtctcaagttccgcgcgcagcgcctccgcatcctgctgcgcgcgccctttcagctctgcctgcgcggccgacaggttgcgctgggccgcctccttgcgcgccttaaaagcggataccgcctgatccagcgcctcaatttgctcgggcgagcggcgggcggcaaaaaacgccgcttcatccttaaagcctgcctgcgcccaagctccgcgcagttctgcctcgctccgctccaagctctgggttgctgccaggctctcctgtccggcctgggccgcttgggcttgggcagcggagagggcgaactgcgctttctcccatgcctggctccagtctgctctggcctgttcggcccgttccagtgcatggcgttgcttcaatatttcattttgcaaagcgtcaaggctcttaatcccctctgcgccctgggccagcagcgcgtcgcgacgggcggccgccttttctagcgcctgccgggcttgtctctccccctcctggctggcagctcttttttgctccaaatcggctttgttctgcatcaggccgcgcagttcagccaatatcccttccagctgctcctgctgggcgcgcgccttttcaagagctgcctgcgctgcctccagctgcccactttcataaccgcccagctgttccagctgggtgcgcagctgggaagcctgccgcgcctttgccgtctgcccggcttctaacgccgccagcaagccagcctgtttttccaagttctggcgcaccatttgcaggctttgggccagcgcgtcaagctccttggcctctacgcgctcacactctgcctgggcggggctagggtggtgcaggctgccgcataccgggcagggctgaccctcctgcaacagttcccccagccttgcggccgcattgctaataaaactgcggctgcgggcaaggtaaagggcctccatatcctccagctcccgttgcagggcatcgcgccgttcccgggtctgggcctgtttttcctggtcccgggctatctctttttccacatctgtcaaagtagcaaagagctgccaggcctgctgagcccgcaaatagcgctgctgcagtgcgggcaggcgggcggccgcctcttccagatcgctccttacagcctgcagcttctccacctgggcttgcaacatctccagctcgccaagcaacgcttgcgcctgctcttgctgcgccaagtgcatcctatcggcgctgaaaaacgcatcctgcgctgcagccagccgctcatagaccggtcttagtccttccagttgcagacaagctcgtttggccgcctgcagggcgggtgcctctcgctccagcgccgcgccctgttcctccaaggtccgcacgcgcttttgtacctcgctttgctgggccgctgctcgtatacgcgcctcctcccgcagcgcactctcctgtctggcgcgctgcaccgcttcaaaggtaggcatgacctgttgggcgcgtctggccgcctgcagggcacggaagttttcccgcatcccctccagctgcgtttgaacctgatcgttttccctctccagctgctctacctgcctgcgcagccgctgggtctcctgcgcggcttcgtacgccggcagcgcagccttttccgcccgctcagagcgcgctagcgcttcatccagctgcgccagctccaaggcggcctgccgcattttctctgccaattcctcctgggtggcgcactcgagactgccaagcgccgcctcgacccgcatctgcttttgcgtcagctgctctcgcagcgccgcggcgcgctcgtacaggctttgcgccaggtcctgataatgctgcgcatggaaaagggtgaccaggatgttctccttctcttccgatttagcgactagcagccgctcaaactggccttgcggcagcaggatgacctggcaaaactgctcgtaactcatgccgatcagctcctgcgccttggcctcaacatccctttggcgggggttttcaaacagcggcacatcctcgccccgcccgtcccggtaaaaggcgttgcactcgggcaggtattccaccgtaccgttgcgttttttgcgcgggcgcaggcgccggtaaaagcggtaggtcccgctgcggacctgaaaggtaaaagacacctgcgtttgctgtgctgcctcggccagctggcaacgcatggccgcaaaatccccccgtccgccgccgctgctcctgccgtaaagggcataggtcatcgcatccaaaagcgctgttttgccagcgccggtcaccccgtggatcaaaaacaatcccgctttggcaaagcgcgaaaaatcgatggtttgttttgcgacaaaggggccaaaggcttctatgctcagttccagtgggatcatgaagcgccccctccttcctctcgctccagacgcgctaacgcctctgtaaaccagcgcaactcctgctcatccggctggctttgcagaatatcccggtaaaagtgcagcagcacatcgctgtccgagagccgttccagctgcgccacctccaggctatcttgtcccttttccatctccagcgacctacccaccaggttgagcaggttggggtaatactcccgcagccactgcagtttttccaggctcgcaaagctgtccgtcagctctatacgcaggtaatcctgcgcctgcgcgtcctccttggccccggtcatgatctcttcaaacgccccgcggacgacccgcagatcgcgcttgggcatgatggggagctctcgcacggccatatcctgcgtatcgatcagggtcacactcttggtatggccggcttccgcaaaggaatacttcagaggcgagccgctgtagcgcaggtttggccccgcccattgcgcccggtgcaaatgccccagagcgacatagtcgaaccgctgaaataccgcggcgccaacctgattggccccgcccacgctggccgcccggtcgctttctgaaagcgccgcgccacccacaaagcaatgggccagcaatatatgccggtaacccgcctccagcgggatgccctccaccacgcggcgcatggccgccccataatcctccagcttgtcctcgggatagaggtagcgcgcctcgtcggtattaaagtagggcagcatatggatcatcacatcttgaaggggcacgcactccacctcccgggtcagccgcccggcgatgtgcagcccggcccggcccaaaagcgcgccgcaagaggccaggcgcgccgcgccatcgtggttcccggcaatgagcaggaccggcaggccccgctctagacaaagggcctccatcgcccggctgtattgcgctatggcctgggcggaggatacggcgtggtcgaatacgtccccggcgatcagcaccgcctctatcccctcccggtcgacgatcgccaggagctggtcgataaaatcctgctgttcttccgccagcggcgcctggtgcaggctcagccccaggtgccagtcggatgtatgtaataacttcatctttccctccaaattctatattttcagtataccttttcccccgcgcggcgtaaagccgtggggcctgtcgctatactttcgctctctttcttgctatactggtatcatctaaatatccagaatgggagagggtataaaatgaaacacatacgcaaggcggcggcgcttttgctggtattggcattggcaatagggtttggcggctgcgcacagaacatgacgcccgcgcagaagatcatgcaggcccagattaatctgagcaaggtcaaaaatatgacggctaccatggagatggagatggagatggatttctccatcgttcagcagccgatcaccatgtccatcctatacgatatgacgatttttagcgaccccacccgtgtgaaagccgatatgacggtggatggcggcgcgcttttgggccagcaggaagctactctatacatggaacagcaagacggcaaggcgatcacctacacccttctggcggacaaatggacccgaaccgaagaggccatcggcgcggaaggctccaaggcggatacgtttgacctgcagtccgccttcaagctctacagccaatgcgctgagagttttaaagagaccggcgaagagcagataggcggccgcgatgccatccgccttgaaggcgcgctgactggggaggctttggaggaggctgtaaccgcatccggcgttctgaattctatctcggagggcgggaatatcggcaaggaagataccgacgcactgtatcaggcgatcagcgatctgcccatcaccatctggctggataaggaaaaactgctgcccgtacgctatgaaatggatatgacggatatcatgaccgatatcatggaaaacgccatgagcggctctcccgagatggccgcctatatggattttaaggccaatacctgcagcgttgtggtagaacttggcgattttgacagcgcgcccgactttgatatccctgcagaggcgaaggaaacgcaggtttaacggcttgcatgccaaagccctgccggcatttaccggcagggctttttcttttctcagccttgctcagcgctcgaacaggcccccgcttaagtaccgctcgccgctgtcgggcagcagcacgacgatccgcttccctctgtacgccgggcgtctggccaacagggtcgccccccacagcgccgcgcccgaggagatgcccgccagcaccccctctgtctgcgccagcaggcggcaggcctctacggcctcctcatcccggatgcccagcacctcatcgtacacctggcggtccagcgtctgggggataaagttcgcgccaatgccctgcaacccatgcgggccggcctttccgccctccagcagcggcgaggcggccggttccacagccacgacggcgatcgctttgctttgcgccttcagatattcgcccacgcccgagagcgtaccgcccgtgcccacaccggcgacgaaggcatccagcgcgccatcggtatcccgccagatctcaggcccggtggtagtgcggtgcgccgcgggattggccgggttttcgaattggccggggataaagctgcccggcgtgcgcgccgcgatctcgcccgccttttcaacggcgccctgcatgcccagtgccccatcggtcagcaccagttctgccccataggcctttagcaggctgcgccgctccgcactcatggtatccggcatcgtcaagatcagcttatagcccttaacggtagcggctaaagcaaggccgatgccggtattgccgctggtgggctcgatcaacgtcgcgccgggcttgatctttccctgcttttccgccgcctcgatcatggcgagcgccacacggtctttcgcgctgccggcagggttaaaggcctccagcttggccaccagttccgcctccagcccgcaggccctgccataccgttccagccgcatcagcggcgtattgccgatcaacgccagcaaatcctgcgcgatctttgccatctttttcacgctccttattcacttgcgcgcctgcgcaaaatgtcgccctgttccagttggaacgggcagtccagccaatagcgcccctggggcagcagcgccgcctccagcggctcgcccgtttccttttgcaggcttttaatggcaaacgcgcgcccggtatacccgggggatagcgcctccaatgtttcgctcagtctaaaggcattgcgctgttctaccaatatgcgccccggctgcgccgccagaaccttgcccacaaatacactgctttggtgataggcgccgtttgccgcgtcaaaatgctgcataggccctaaataaaagccggtggcatagggccggtggctgacgcagtccagttcttgaagcaggtcatccacattcgcgctgcccgctatcgccatgcggtacgcgttggtcaccgtcgccacgtaatagggggatttcatccgcccttcgatcttgaaggaggtaacgcccgcctcccgcagacgcgccagtagggcgatgcagttcatatcctgcgagctgagtatggccatcttcccgccatcctcttccacggggaagtattcgccggggcgctttgcctctaccagggcgtactgccagcggcatggctgggtacaggcgcccgcgttggcgctacgggcgttcagataggcgctgatcatacaccggcccgaatacgccatgcacatggccccgtgcacaaaggcctccagctccagctcgggcggcgtgcgcccccgcagcgccgcgatctgctctaaggatagctcccttgccagtacgatgcggctggcgcccatatcataataagcgcgcgccgccctgaagttgcagcagttcgcctgggtgctgatgtgcaccgccagcgtgggcgcggcttcctttatggccagcagcgcccccagatcggatacgatggccgcgtccgctccggcatcggccaaaaagcgcgcataatctcccaaagccaaaatatcctcatccccggcaaacgcgttgacggtgacgtatacctttttgccccgggagtgggcataggcaacggccgcgcacagctcctcccggtcaaaccccgcactggctgcccgcagctgcaagaaagggccgcctaaatacaccgcgtccgcgccaaagcgcagggcggcctccagcccctccgcgctccccgcgggcgaaagcagttccacctgtttcaaagccctgtcctccttatgccttaccgcttccctgtagagccgaacccgccggctccccgggcggtatcgctaagctcctcggcctccacaaattccactgccagcaccggggtaatcacgatctgggcgatgcgctcccccgggcttacggtataagcctcagaggactggttgtacaggcagaccatcagctcgccccgatagtcgctatccactacgcctactttattggccggggcgatgccctttttagtcgccaagccgctgcgggcgtacaccaggcccgcatatccaacggggatctccatcgccaggcccgtgtgaatgaactgcgcctgtcccggcgcgatggtgaccgcctcttccatgcaggcataaagatccgccccagcggaaaaggccgaaccataggtaggcggggtggcgcgcgcatccaactttttaaatttcaacgtttgtttttccatgatgaaccctcgatttaatccaatttccgccattatatcacaatcggtttgcaccgtctatcttgccttcagcccgcacccagcctagaaaggtgctttggcttacgcccaggcgcaaagccgcctgccgtgaggagagcagcccccgccgccatagctgggccaccggcaaaaactcgggcgggaggggcttgcgcggccggccgaatttgaccccccgcgccttggccgcagcgatcccctcggcctggcgctgacggatggacatgcgctcgttttccgctacaaagctgagcagctgcaagacgatatcgctgataaacgtccccagcaggtccttggatttcgtcgtgtccagcagcggcatgtcgatcacccggatatccgcgccgatctccttggtgatgatgcgccactgttccatgatctcggcataattgcgccccagtcgatcgatgctcttgacgatgagcagatccccctcccgcaggtggcggatcatctttcggtacgcggggcgcttaaaatcctttccgctctggatgtcgatataaagcctgtggcgcgggatacgaaagggctctagcgcatcgatctgccgcctttcgctttggtcccggctggatatgcgcacgtatcccaatactctctggttcaatgaaacaatcccccttcctgtgcgatttgcgcggcactcaccatgttttacgcgctctaagggtactgtttcatattttaccttttattctcgcaaaggaccttgcgatatatcccataaaaaagagagggctttagccctctcccacatttaggttgcttatctatttggtccataggcccttcggcttatcacgataaccgcggctccgctgagcagggtcagcgccatcagccccaatgcatcgccatcctggccggttttaggctggcggggcatgctctcctcgggcgcagtttcgcccgcgctttgctccatctccgcctcaagcgccggaatggattcctgcgtcagctgataaccgcaaatcgtgcagcgttgcacacgcattccagcctgttcctgggttgccggtaccgcttctacccaatcgccagcgatatgttcctgccgagctccttctataccgcactgcgcacagttttgccagtgtccgctctcatcctgcgcccacacactctcaaaagcatgctcccgcacggtaaagcgaatctccactgtttgatcttgcatatccgcttcagacagcgtcagcatggccgtataatcccccgccggtaacccatctgtcggcgctaccgtaaacgtcgcctgctcgccaggggcaagcgggtcgatctgcgttttcgacagcgtaaagcagtccgcatcctcgccggccagagatagcatcagcggctgggtggacgcgttcccctcgtttttcaccgtcaggttgtatgcttctaacggcgcatagtcctcatctaccactgtgaatacgatatccccctcaggagaaagtaccagctcaccccgtaggcgcagcaccaggtgcagcgtactgtccttttggatactataatcctgtagggtattgccatcttccaattgcttgcccgcaaagattaaacgctgctggtcgggcgggatgccctctttatcctgtatcttagccttaacgtcttcgatccgatccgtgggctctacctctagggtaatatgcttgccggtcaatgtcttaacaaaaatttgcatggcaaacgctgtcgtcgggaaaaatgccattgccaaaaccgtgcacagcatggctgcaatcagtttctttttcatggtatcaaattcattcctcagctttttttaaaaaggcttttaccgcctcagccgttggcagcgagggcatagcccccttgccggtagccgtcagcgcgcctacggcattggcgtaccgagccgcggccagtatatcgcccgtttccaaaaagttcagcgtcagcgcgccggtaaaggcatccccacaggccgtggtatccaccgcctttaccgggtaaggcggtatatgggtcgccgccaatccatcgtaaaccaggcagccctgcgcccccagcttgatgactacgtacttagcgccgccccgctccatcagctttttcgcagcggcaatccccgcctcgcccgcatccggcaggataccggtcagcgccttcgtttccgtttcattaggtgagaggatctccatcccccgcatctgctctaaggggaacgcctgcgcagggcctgcatccagcaccacagggatgccctttgccccggcccaggcggccgtctccaatatcacatcctgcgggatctccagctgcatcatcaccgcgtcataatcctccggcagcgcgctcagccatccttcaggtcttggcgccgtattggcctggggataaacggcgatgcggttgctgccatcgtcctccagaaaaatgacggcaaggccggtggcgcacccctttaccggcgccatgtacgcggtaccaacgccctcatcatttaaggtctggcgcagggtctgccccgtttcatccgcccccacctggccgcaaaagtccactgcgccgcccaagcgggccgctgcgacggctgcgtttgcccccttgccgcccatggagtagaagtattggctgcaaatcaagctttcacccggcttgagcatccgcggcatgcacagcaccagatcctgattgatcgaaccgacgaccaaaatcttttttgccataatatccccctatttttctcccgcccgctggcacatcaaaatatagatggcgctggacaggcggttatatgcctctaaaagcgttgtctgcccctcatccaggacagccaccgccgcaatctccagctcccggctctgggcgcgcaaaaggtttagtttaagtaaaaaaggctccatctctgcgtccatctgcaaaaagcctaccccatagtaagcctgggtatggtgggaacgctcgcgcagctgcgcgggcgtcaacccaaaaagtttccacgcccctaacggttcgtccaatacttccgcgcgcattagaagcccacaaagcgcggcgatctcgccaagggcctgggccagttgcgcttcccctgcctgggccgcctcgcgctgcaaaagcatcgtttgcgcgccaaaagtatctagcttgccgcgcagtacgatgcgcgggtgatccttgcgcacggtctcctcacccttaaggctggtccggttctcttttccctccattgctaaaaggttatctgatccgcgccgcacagcagaatctttttctccgccaccgcgctgaccacttcgcgcgcatggcccatataccggcgcggatcggtctcattctcatcgcccagcagcacctcgcgcaccgcgccggccatgggaatcttcagctccgttgcaatattgaccttggcgatgccccgcgctatcgcagcgcgcaccgcctcatccggcacgccggaggcgccatgcagtaccagcggcaccgataccgccgcgcggatcgcgcttagccgctccaaatccagcttgggcgtgcccttatatacgccatgcgccgtgccgatggctaccgccagcgaatcgaccccggagcggcgcacataatcggccgcctcctcgggtacggtaaaggtcgcttcccgctcgtccacgttcaggtcgtcctccgcgccgcccacgcgccccagttcggactctaccgccacgccggccgcgtgcgccacctctaccaccttttgggccagggccaggttctcctcatagggcaggtgagaaccatcaatcatcacggaggtaaagccctccttgatgcactccacgatcatggggaacttcgtgcagtgatccaggtgcagggccaccggcacatccgcctttttagccaccgccttggctatggctgcaaactccgccacgcccatgtattgcagcgtgctttgggaagctgcgaccatcaccggcgcccccagccgctgggccgcccaaacgatggcctggatgctctcgcaggtatgcgcattcagcgcacagatggcctttttctgctccgttgccttttgtaacattaaaatcgggttgactaattgcatttttcattcgcctccaataaaattttgccgctgacctcccggttttcgatgcgtttaaaagccttatccgcctgagagagcgggacgatggaatccagcagtttttcggtctgcaccacgccgctgcccagcgcctgcagcgccacatgccactcccggcccggccagggggcggaatagctcatccaggagccggataccagcagttccttgcggttgatatactcaaactccgcgggctgcaaggtgaccggccgcgagggcgtgccgataaacatgacccgggagcggttgcccgcgtactttaaggacatgatctccgtagccgggaagccagccgcctcaaacacccaatcataccctcggggacaggcagccttgacctgcgcgtcaaaatcctccgccgcggtattaaaggcgcgagatgcgccgtactctttagcaatggccagttttgcctcgtcgatgtcgaatacatccacctcctgggcgcccaggtatttggcgcactgcagggtcagcagcccgatcgtgcccatcccaaataccgccacccgctgcccaggtttatagtccctatcaaagcccatcagcatcagcccatgcagcgccacggtggtgggctccaaaaaggcggcctgctccaggctgacatcgtcaggcacgtgcaggacattgcgcgccggcacacacaggtaatcctgccaggcgccgggcagccgcgaaccgataaagtcatagttcttgcaaagggaataccagccgtttttgcaatcctcacattcgccacaggggaccagtggcgcggcggagacccggtcgcccggcttaaaatccttcacatccgtccccacggcctccaccacgcccgagaactcgtgccccaggatgatggggaaatagtgggccgtgccctgcaggaccctgggcatatccgagccgcagatgccgcagtagctgatcttgaccagcacctcgtccggccgggggaccggcttttccacctcttcacagcgcaggtcgtttttcgcgtgtaaaaccgctgccttcatattttgtcgctcctttcaattaccgcgcggcctgggccagcttggcaaaatcgtccttcagtttagggtaaagcccctgataaatctcaaagtattgcccatagcggtcatgggtctggccatccggctcgtgcacccgttggatgcgtacgcatctttgcaccgcttcatcaaagcccgcataggccccgcagcccacgccggccaaaatggccgcgcccaagggcgtagcatggtcggaataaggcacctcaatacgtttcccagtcacgtcgcttttgatctgcgtccagacccggctgttggccgagccgcccacgctgaccatagtctccacctgggcgcccacctgggcggcggtctggatgttatggtgcagggagtaagccaccccctccatcatagcgcgcaccatatgggcacgccccttatcgtaggacaggccgaagaaaacgccccgggcgtcgctgtcccatattggcgagcgctcccccgccatatagggcaaaaaaatcagcccttcactgccggcggggatcgcgccggcctcatcgctgagcacctcaaaaacgctcttaccctgcgctttggcctccccctgctctgccgcggccaactgctgggagaaccagcgcaacgtcccgccgccacctacagagccgccctgcagcagccatccgcccggcaatacgtggcagcccaggatcaactgcggatggatcaggggccggtccgttaaaatactcatgccgcccgcctggccgccctgctcctgcgtctgccccgggcggatcacccccgcgcccagggagcagcacgccgcatccagcccaccggccactaccggcgtgccggcgcaaagcccggtctcccgcgcggcctgctccgtcacccctcctacgatctggtggcaggggacgatgggcgccagcttttccgcatccaactgcagcgctgcaagcatcgcctcatcatatttcagcttggcaatatcaaaaaaatggaacccatacccttgggataaatcctgcgaaggcatgccggtcagctgcatggcaataaaggcgttgcactgcaaaaaataccgggtacgggcataaatctccggctcattcgccttgagccacagcattttaggcgtgatataagctgcgtccaccgggttgccggaaagggcgatcagtttatcctccccaatcgtctcccgcatccattttgcctgtggttcggcccggcgatccatccagatcatagccgggcgcagcggcgtaccctgcgcatccaccggtaggcaggcccagctggtgccgtcaatgccgatggcggcgatccgctctacatccagcccctgccctcgcatatcctccaagcaccggcaggcggcgcgccaccagtccatcgcatcctgctccacgtattgcgggcccggatagcgggtttcatagctttgtgaggacgtagccacaacgccgccatccagatcaaacgcggcgactttgcaccccgacgtcccgatgtcgatccccagtaagatttccttagacaagtcgctccccccttacccccctcattttaaacacctttcccccttccgtcaacgaccaatcggctctcttggcagggcatagacgtttacccactccctgccctcatgaaaacaggtataaaaaagccccgcccggtttaaattccggcacggggctgctctttgacaggcaggcttatacccggtctttccacgttcgcagcgagtcggccacggcggcggcgaccgctgcgtgatccttcccgcgcacacagtccagcaggcgctgatgatagtcgggcgcttgggaatccacctgttcgatgcggatattctctccgatcgacctttcaaatacgctgtaaacgcccttcatgatgcggataaaaaacgcgtttttgcagctttcgatcagccccatgtgaaaggccaggtcgcaggcctgcatctgcgccacatcgcccttttgggcggccaggcgcatcgcggcaatactctcttgcaaaagcgcgcattcttcaggggtgatcttttccattgccaggcgcaccgtagcctcatccaatacctggcgcagctccagcagctcgccgccggtggcggcgtcgtaaaccatggagtagatcacccggtcaaaggccgatgcgttcatctgggtgctgatgtaagtgccatcgccccgtttgatctccacaatccccatggcggagagcaccttcatcgcctcccgcagggaatttcggcccacctgcatctgctccatcagctcaaactcgctgggcagcttggtgcccggcctatataccccgcccacgatggcgtccatcatgctgtcgatgatctgttccacaatggatttttgcccgatcgggcgcagttgttccttttccgccataggtcatcgctcctttacgcaagattttacggcacgatgaccgttttttccaccacccggccatcgcaaaggtgcacggccgccttccattcctctccggattgaatacccatgaccggcccctgtatccagttgccgataaagtttacgcagaacgggtcgtcataggcctgctggtaaagcacgccattgcggaagaaatccacatggtcgactttttcagggtacaggctggccaggcgcaaaaagcgcttatcctcataggccatgtccttttccaacccctggagatggaactgttcttccagcagcaggtcatgcttttcgccatagagatactctcgcagccgcagcgcgtaaaaccggtcctcgccatgggtgataccccaatctaccggcggctcctgcttggtcatattgttataatagccccaggatacgccgtttgcgaaggtgacctgcagctgacttagcgcctgcgaatcctcattgaccacgatggggcgagcgggcttcacagccttggctttcaagatcaggttatacagctggttgcgggtctgctcgttgccgtggatcaagatcacgtccgaggcctgggcgatgcgggcggaaaaatatcccccagtgccgctgcaccctaccggcatgccgccggattcgcgccgggccagttccatcaggcggataatgccgttctcttcgctcagcaccttatggcacagataagcgccggtatcgtgctcgttggcgatctcgatgatgatattgcgatccccacgcgcccgcagccagccgcaaatgccctttaccgcgttttccaccgcatcatcgtcctgcaaaagcgccgtctgcactccataaaaaagactgacgatcaccaccatgcccagttcatccgccgcgtcgatgagcctggccagtcgcttaagataggccggatccagcgcttttccatcgctgccgtaggggttattgtggatggtatcaagggcgatagtaaagcagggtccgccgccctgcaagcccacggtaaaggcccgcaggcccgcttcataccagtctggcagcgcggcgatcaactcgtctgtattttcttccggatcaaaatgtttgccaaagcggttatagcgttcccggtcagccgcatcgtcaaatatgccctggataaacctagcgttcatcagcagaccctggtgcgggcagtccacgctctcgctgtaggtcagcttgccgttgagcaaaaaacggtccccctggatcgacatgacggtctttttcatcagtccttccctccgcttcatatttgtagaacgtcctacgtttattattactataaaccctgtaccgcgctccgtcaatcccctttttgcagattcttgcgttttgatgggcacagccctgcggctgtaaattcaaacgggttttgtggtatactggtgtatggaatgaattggataaggatggtttgccatgatacaggaatcttttgaaaaaaatattatcgtcagccaatatgaatgtgattttcaaaaccggatgaagcccagcgccatcatgcgccaggtccagcaggtatcgacggaccactgcgacgctcttgggataaccgcgcaggtgtatgaggaaacgcataccgcgtttttgctggccaagctctcccttgaggtgtataaggatatccgcgtaggggaggctattcaattggtcacccgccccgcattgccggtacgcgcggtatataaccgctataccggcttatatgacgaggacggcgcgctggccgcggccatggattcgcgctggatcctgatcgacacccgcacccggcgcatcctccgccgcccgcccgaggggatcgactggccctttatcgccccggtgacgcaggaacattctctgacgatggaaaagcccgatgacctggagtccgtcggcaccgtaaaggtgacctattcccgcgtagatcaaaaccggcacctgaacaacaccgagtatgccgacatcatctgcgattgcctgccgatcgagcacttccaaaacggctcggtcaaaaagctggtgctctcctaccatcacgaggcccgctttggcgaggagctgaccctttaccgcgccgcgctggccgatgcgccgggttattacctttgcgggatgctgggcgaacagaattgctttgaagccaatatccgcttttagcgcaaaaggagaataatcaatatgctggaataccgctacgatacgcagctgctcatcgacgggatcaacttgaacgaagacgaaatctaccggcagatcgccgccgggtttgagggcgattgcctgctcgtggtcggggatgaaacgctgatcaagctccattaccacaccaatcagccctggaaggtgctggaatactgtgcaggccttggtgagatctacgatatcgtgatcgaggacatggaccgccaatcgcgcggcctaaagggctgaaccgaaaaaaacatggctgaaagcagtaaaaagccggcatccattttgggtgccggctgattttataggcttatcttgatactaccgtcaggccacgggcagcgcgctttgcagctgctgataaaaggcctgcgtgtcctcccctgttgcctggttaaaaaccagcggctggtcgttgcggatgtggacgaggatcacccattcagatgaggtgaccgtcgcgcagcggtagctgcccagttcatcgttcttgaacgcgccggatttcatccgcatattgccaaagccattggtacgtcggcccaggtcgtaatcctgccgcagttcgacccgctcgatctcgtccaggccgcaggttacgtcgcacatcatggcctgcacgcgcaattcgccctcctgcaaccgcgcctttaccccaccgctgcccgcaataaaaaaagcatagatcaccaagccgcccaccaaaaccagggtgaccaccgtaaagatcagcgtaacgcgcttattgacctgttccactattttgccctccttttcaggcaacgccttgtgatggtattataagccaaaacaaaaagatgggcaaccacaatcgttacccatctttttatggattcatccggcggcctttagcctacaggcgcctgttccgcctgcgcctgcccggcgccattatccatcgctacgggcgtaaaggtcagctgctcctgctcaaagtccagcttgaccttttggccgatcttgaccttgccagagaggatctcttcagccaggctgtcctccaccaggcgctggatggccctgcgcagcgggcgggcgccatacatcgtatcaaatccctctttggccaggtgatcccgggctgcgtccgtcacttccagatagatctctttttcctccaggcgctgggccacggaatgcagcattagatctacgatccggcgggcgtgctcctgctccagcggatggaacacgatgatctcatccacgcggttgatgaactcgggccggaaggtctgcttgagctcgttcatcacgttttccttcatccgctcataggagatgccgatatcgtccgaagagccaaagcccatggtctgctggcggcggatggtattcgcccctacgttagaggtcatgatgaccacggtgttgcggaagtctaccgtcttgccgtgggaatcggtcaaacggccatcttccaacacctgcaaaagaatgttgaacacatccggatgcgccttttcgatctcgtcaaacaacaccacgctgtagggtttacgccgcaccttctcggtcagctggccgccgtcgtcaaagcccacgtatcccggaggggagccaaccaagcgcgaaacggtatgccgctccatatactcagacatatcgatgcggatcatggcgttttcatccccaaacagggattcggccagtgccttgctcagctcggtcttgcccacacccgtggggcccaggaagataaacgaaccgatggggcgcttggggtccttcagccctgcacgtgcccggcggatcgcccgcgccaccgcgaccacggcctcatcctgaccgatcacccgactgtgcaattcgtcctccagccgcagcaaccgctcgctctcgtcctcggtcatccgcttgacggggatattcgtccagctggctacgatctgggcgatgtcctcctcgccaacggtaggaatctcctcgcccttgcgctcctgccaggcggttttggcggcctccatctcctcgcgcagtttatgctcttcatccctaagttgggcggccttttcaaagttctggttgtgcaccgcctcggccttctccttggaaagggcctccagtttggcttcgatggccttcatatccggcggggcgatgtagcttttaatgcgcacccggctagcagcctcgtccatcaggtcgatggctttatccggcaggtaacggtccgagatataccggtccgaaagggccaccgcggcccggatcgcctcgtcggtaatacgcaccttatggtgggcttcataccggtcccgcaggccaaagaggatctccaccgcctcttcaggcgtaggctcgcccaccgtcaccggctggaagcggcgctccagcgccgagtccttctcgatatgcttgcggtactcctccagcgtcgttgcgccgatgcattgcagctcgccccgggccagcgcaggctttaggatattggccgcgtcgatggcgccctccgctgcgcccgcgccgatcagggtgtgcagctcgtcgataaacaggatgatatcgtcggatttctgaatctcttccatggcgtttttcagccgctcctcaaattctccccggtacttggcgcccgccagcatcccggaaagatccagcgagagcacgcgcttgtttttcagcagctcggggatattgccgctgacgatttgctgggccagcccctctaccacggcagacttacccacgcccggctccccgataagtacgggattattcttcgtcctgcgcgagaggatctgtacaatccgctccacctccttggcccggccgatcaccgggtccagccgtccttcacgggcggcttgcgttaggtcgcgggtaaactgatccagcgtgggggtcttgccatcccctttcttgccgccggcagccttctcttttcgcccgccctcctgggtgagctgctcgatgatggcctcgctgaccccgcggatatccacgcccaggttcatcatgatccgggcggctacgcactcgcgctcgtgcatcaacgccagcagaaggtgctcggtccccacgtaatcatggcccatattattggcctcggccacgctggcctcaatgatctttttgctgcgcggggtatagccaaagttatcgttgaactgatacggaccgcggccgatcagctgttcgatctgctgcaaaatcttatccgtcgtcacgcccaactggctcaaaatctgcgccgccgcgccctgcccttcctcggcaaggccatagagctgatgctccgtgccgacgtaattatgccccaactcacgggcaactttctgggatagcgccagcgcccgctgggcccctttagtaaatctattgtaaactgccataatgcttttcgcttcctttcgttaaaaactatctaacaccgcgggcggttcgtcactgggccaggcacttgcgtaccagttccgcccgggcgatgttctgatcccgcgccgacatcctgcgcccggagcgcagttgtaagctggccggctgcgcatcgcacagcagcgcccggaaggcctgctgatcgtgaatctgcacgtatccgcagctttcagccagacgcacgtcggagtaaaggcgcataaattcttttaaatccatcattctggcgttttgcatggcgccccaggcccgcatcagccggtcctgcaattccaacggccgggcggccatcatggccttacgcgccaaacgctcctgcgccatcacctgcatacaggcgttttgtacgctggcggcgatctccttttccgtcaaccccatggtgacctggttggatatctggtagaggtctgcgctgaccgcgctgccctcgccatagctgccgcgcacggtcaggccgatcttacccaccgcctcgatgatggtattgatcttgcccatcatcgtcagcgccggcaaatgcatcatcaccgatgcacgcagccctgtcccgatattggtggggcaactggtcaagtatccccatcttgcgctaaaggcatacggtttttgcgcctccaaatcaccgcaaagctgctgtgcctgtgccagagcacgctccaggtccaggcccgccgctaggctttggatgcgcagatgatcctcctcgttgaccataacgcccgtggtccgctcatcatttagcgccagagcggccaccttcgcgttttggatcagggccgggctggccagataattctcgcccagctgccgcagctgcagctcgttcagctcccccagacgcagccaggtaaagccttggcggcctgataacagctcgccggtctgcgcggcgatctgctccttgcgggcctgatccagcgccgcgggaaaggcgtaatccgcatagttgcgcgcgatgcgcacgcggctggtcaccgccacatcgccctgcgggccgtccatctcccatatgcccatgcctatccctcctttacggcgccctcgccctccagcgccttgatcttatcgcgcaatacagccgcctgctcaaagtcctctttttccaccgcctgtgccatttgcgcgcgcagcgcttcaagctggtctgcgccctgcccctgggtttcaggcgtccctgccgggctggcacccacgtggcgatccttgccctgcacgtgcttgatgacctgacccagttctttttcaaaggtatcataacactgggcgcagcccacaaggcctgtattttgaatctgttccagggtccagccgcacccctggcagcgcttgatggtctgttcctgctgggaaggctcctgttctttggggagataccctaaaaggcccgccaggatgttgcccagcgcccattcgctgcccgcgcccagcttggccgcgcactcctcacacaggtggcgttcctccttctgtccgtttacgatactggtataatgataggtcgcctggtgcaatccgcatccctcgcacagcataggcccatcccctttctattccttgctattggtcaaacagcgtcaataccatggatttcatcacgctggcccgcacctgatctttaagcggatagggaaggcgcagcgccttatcgcttaccgccgcttcgatcaggcgggcacctttttcatctacgatctgctgctcgcgcatataggccaccagttgccgggccgtgttttcgctaatcgcctcgccgatgcgctgggtcagcagctgaaacaggtagtcattatcatcaatattaaggcggatcacgcgaatatacccgccgccgcccctgcggctctcgattttatagccccggtcaatggtaaagcgcgtggccagcacataattgatctggctgggcgcgcagcggaaatactccgccaattcattgcgctgcaggtccacctgcttttcttcctgaatcaaatcgcgtataaactgttcgatactgtcgctcaataccgacatcgtcctcaccccacatttggttttgacattctttgaccttgattctattataaccaaatgtgtcggaattgcaagcctttctccatggaaatgtaagggattccgccctgttctttgttttgtggggatggccgcgacacgcgccatccaaaaaagaagcaaccgccccggctgccccttcgcaaaatcatctatactttcccgctcataaacagtatgctgcacagtcattccgagctgcaggcgaggaatctcttgacgccttcttggctgcgcatgtcctttagtctacagatcaagcgctgccactctgccaacacaggggattcttcgctcggccttacggcctccctctgaatgacagggctatcgcccttttagccgctcccggctcttgagagtttccaaacttctgccgtccgtaagagtctttatttcgttttccggctccgctcccggactatcgcccgctcatccgctcctgacttcctatgtttccatacactctcgccctccatgaactagccaccctctgttctgaatgacaatgtagcgagtgctaaagtatacttttttatttcagctaccccttaaccgcctggccggtcaaatactcgccctggcgggaaatgattttgaccttggccagctcccccggggccgcgcctgtgcagcgcacatgtacatagctgggcgtatagcccgcggatgtgtccgccatcccctcgaccggcgtttcgaagagcacctcttgcactgtatccagcagcccttccatgtacgccgcttccagctgctctcccaggcgcagcatctcatgggtgcggcgcttcttttccgcccggggcacctgtaagggcatttgcgccgccggcgtgcccgcccggggcgaataggtaaagacgtggatgcggctaaacgccgcgcgttccacaaaggccagcgattcccggtgctcctgctccgtttcgcccgggaagccacacatcacatccgtggtgatggccacgcctgggaaagcggcgcgcagccgctcaagcgccgccaggtactcttccgggccgtaggtgcgccgcatacgtgacaatacgccggccgagccgctctgcagcgatacgtgccagtgggggcacagttttttgagaggacgcagcccttcaataaagcggctgtgcaacagctgcggctccaccgagcccatccgcacccgcgccaggccagggatcgcctccagcctgtccagcagttccagcagctgttcccccttaaagcgccccttttcctctccatccaggccataactggtcagatggatgcccgtcagcacgatctcccggtggccggctgctaccagcctttccgcctcctgcgccgcatcctccacagcccggctgcgcagcggcccccgcacgtaggggatgatgcagtaggtgcaaaactgcctgcacccctcctgtatcttcaggttagcccgggtatgcgcttggctctgggtcacgcgcagcccctcgtagggcagcccctttttctccagcgtatctaccgccaggcgcggcccccctttttgggcggcggcctgctctaccagctgggcgatcttcccccggtcctgcgtgcccagcaccagcccaacgcccgggatggccgctgcctcctccgccgcgcgctgggcatagcagcccgccaccacgatcagcgcttccgggttggtatggtgcgcccggccgatcatctgccgggatttctggtctcccgtagcggtcaccgtgcaggtgttgaccacatagacgtccgccttttcctcaaagggtacttctctgtagcccgcctgggccagcagctcccgcatggcttgggtatcgtattggtttaccttgcaacccagggtcgcaagcgccatcgttttctccattttaccttccttattccggcccgcttcagcgggcccgcatctcgccgcacaacgccatgatcacgctggccgccgccatccccgccgtttccgtgcgcaggatgcgtgggcccagtccaaccgccctggccccgccttggcatagcttagcgacctcgtcgcgcgccaagcccccttcggggccgatcagtatcgctatatcttttacgtgcttgaccggcgctaacgcctgcacgatatccagctgctcctcgttttcgtacagcaccagcgcggcctcgtgtgcctgccaccggggcagcatttcttcaaaatccagcggtaagctcacctgcggcacccgcgcccggccgctttgcttagccgcctccagggcgatgcgctgccagcgtgcctgctttttttgcgcgtccgcccccttttctatccgggccacacagttgcgcgtgcgcaccgggcaaaaggcgtaagcgccaagctccacgcccttttggatgatccactccatcttatccgctttgggcaacgcttgatagagggtcagacgcagctccggttcacagggcgagggcacaagcgggccgcaggcgcgaagcgccacctccttggcggtgatccctacgatctcatagggcgcctcccggccttccccgtccagcagcatgacctgttcccctggctgcatgcgcagcacgcggccgatatgccgtgcctcttccccggccagcgtaacgcagggttcccccgcctgccccgggcctgtaataaagcgccgcatgcccatccctccagcttcttaagttccggtttattatagcggaaatgggggtgggtttcaagcgccccggtccgttcaagctctgtttgcattttgccgcactttataggtttacaacttgtcaagcagcgcttagaatagagttgacccactgggataaaatgaatattgaaggaggacttgccatgaaatttaccgatggacaatggatggcccgcgccgggctgaccctgcaccggctagaggccatgggcgactatcatattgatgcaaacggcgtgaccctgtacgtgcccaccaaccgggtgcagacccggggcgataccttaaacgctaccatgatcaccctgcgctttaccgcgccgcgggaggagatcatccgcgtacagatcgcccattttgacgagagctacggtagcggcccgcactttacgatctatgagcaggaagggttcctgcccgttatcgaggatctggaggatcaaatcgtgttgcacagcggccagacccgggtggagatcgccaaatccggcaagctgcactatgcgttttaccatggcgcccggctgctgacggagtgcagtgccggcagcatggcctatatcatcggccccggcgaggcggagatcaatcgggtaaacggcaatttcgccgcctacgcgcccgattggcggcggccggaccgctttatccgcgagcagttctccctttcggtgggtgaaaatatctatggcctgggcgagcggttcactccgctggtgcgcaacggccaaagcgtggatatctggaataaagacggcggcacggggtcagagcagtcctacaaaaacatccccttctttctctccaaccgggggtacggcgtgttcgccaaccatccagagcaggtgagctatgaggtgggcagcgagctgaccaccaagacccaggtctccgtcccgggcgaggcgctggactatttcgtgctgggcggggccgatatgaagggcgccctctccaactatacggcgctgaccggccgggccagcctgccgccggcctggagctttgggctgtggctatccacctcctttaccacggattatgacgagcagactgtgacccgctttatcgacgggatggcccagcgggacattccccttagcgtattccattacgattgtttctggatgcgggagtaccagtggtgcgattttgagtgggacaagcgctttttcccggatcccgagggcatgctggcccgcctcaaggccaaggggcttaaaatctgcgtatggatcaacccttatatcggccaaaaatccaagctctttgccgagggcaaggcggccggctatctggtcaaacgcctggatggcagcgtttggcagtttgacatgtggcagcccggcatggcattggtggacttcaccaacccgcaggcctgcgcctggtacgcctcaaagcttgaggcgctactggagatgggggtggattgctttaagaccgattttggcgagcgcatccccgtagacgtgcagtattacgatggctcggatccggcaaaaatgcataactactatacccatctttacaacaaggtggtgttcgacctgctctgccgggtcaagggccgcgatgaggcggtggtcttcgcccgctcggccacggcgggcggacaggccttccccgtacactggggcggcgattgcacggccacctacccctctatggcggaatccctgcggggcggcttaagcttttgcatgagcggctttggcttttggagccacgatatcggcgggtttgagcagaccgcgccgccggacgtatacaagcgctgggcggcctttgggctgctctcctcccacagccggctgcatggcagcaactcctaccgggtgccctggaactttgacgacgaggccgtggatgtggtgcgttactttacccacttaaaatgcgccttgatgccttatctgtacggacaggccgttcagaccgcccagaccggcatccccatgatgcgggccatggtgctggaattcccgcaggatgcggcctgcgccgcgttagaacgccagtatatgctgggcgataacctgctggtggcgcccatctttagcgcggataaccaggtgacctactacctgcccgaggggcgctggacgcacctgctaaacggcaaggtgtacgagggcggccgcttctatacggagaaatacggctttttgagcctgccgctgttcgtgcggccgggcagcatcctgcccatcggcaaccagaccggccggccggattacgattttgccgaccatgcgacgcttcacctttatggctttgaggacggcatgcaggcctgctgcattgtccccgatcaaaagggcgcatgcgcccttgaggcgcaggctgcctgcagcggcggcgtgctcaccgtccacgtacgcacggataagccttattctctggtactgcacggcgccgtgccccaggcggtggaaggcgctgcctttgaagagacgcaagagggcgtcctgcttaccgggtgccagtctagcgtaaagatcactttataaaaataaagcctgtagaggcgggctataaatgattaaaaaagcagcgcacatgcgctgcttttttgttgcccagcttgaaacattttgccttgctgggttctgccgctaccggcagcaggctattgccgccttatccagcgtcagcgggcggttgctggccagccaggtgatccgctcttcatcgctctgcccaccgtggccgctgtccacgccgccatgatcagtggtgatcaggatcagccaatcctctctatcatagctgtcccgctgtgcgatcgcctccagcagtttggccgcccaggtatccacctcccggcaggcctgcacgtatgcaggattctggttgccatagcctgtggaatggcccgcgtggtcggtatgctcatagatcaaaaaagtcaggtccgcgtcctgcggtgcaatcttcccttctcccgcatccttacttacgctgcgaagggcagcagcctgcgagtgcgcatcgtcctgcgtaaaaaggtagcgtaccggcagctcttcccgctgggcctgcgcgatatcgccgccatacgtgccctggtggccctgccaggaaaagataaaggaaacttcatgccctttttgcgccagatcggtcaaaaaggttttgacttctgtgtttttcacctgcccgttgtccgatactccggtctcgtcctgccatttcccggtcaggatcgaggtccatcccggcgccgtttccgtcctttgctcgtctgcgccccttatgccgccggcataggtcaggtacagtccgcctgcttgactggtttgctctaccgcgcctccggtgcccaaaatcgtctgaagcccgtcggcacggtatccgtcgtagccgatgaccagcgccttcttcttcgttttgccctccggcagcggttcgttaaaaaaatcctctacggtttgatagactatggtctgcggcaacaggttttcctgcgtgttggcaaaggatgcttgcttttccaccctgtccaaatagccggctgggtctgccttttccactccgcctgcatcggcccgggcaaatgcggtgcagaccagcaaaatagctgtgcaaaatacggatatcgtcagcttttttctcatcctccagatcgtttttctgccaatatgcaatattttttctcctttccacgtattcttactcagccaacgtgcccaaccctagtttgccccgccgcgcgcaaaagccaggcaaggattgtttccatttcggattagcgccatgataggactttgagtaaactccatgtcaaggggattggttgaattttcacatccttccacattgtgttaaaaaaagcgccgcaaattgcggcgtttaagatgcggcataccctgtatctttacggcttttctaaaatgccatatttggttttgatccgctccaatttccggcgccagggctgccaggccagcagcagaaacagcagcgtcgaggcgatatggctcaggttaaatgccagccccgcggcatacgccgccagcgccccttctatggtaaagggttgcacataggatatgacgaaccagctatccaatatcgccccgtaaagtaagctagcgcatgcgccgaaaagatacacccgccaggcgcccttatgcgcaagcagcggcgccagcagcccggccagatagccggccaacccccaggcgtacatctgccagggcgtccaggggccctggcccagataaaagttagataccagggcggaaagcgccccggtcaaaaaaccgctttgcctgccgaataccaggccggcaacgatgacgatagccgtgaccggcataaagtttggcagcggcgcgcacagccatctccctaccactgccagcgcgctgagtaccaccacgggcatcacatcccgcgcgcgcaggcgtttaagctccatctgcataaaaaagggcagcagcgctcccagtgccgccagcgtggtcaaaagcgcggtattctccgcctgaaagtacgcgcacagggccaaagccgccggaaccaacgccagtgcgaggggttctgtccaccttaacgcccgttccataggatatcctcctccaccacgcagccctctaccagcccgcgagtcatgcgactaactgccgtggtataaaacatattccccaggaaaaacccatgggctgcctgcgtgcaaagcacctcgccgtcaaagagcatggcgcagcggtgggcgttggcggcggcgaactccaagtcatgggtcaccagcaaaatggccttgcccgccccggccaaatgccgcagcagggccgcaatctccgcttttgcaaaggcgtccaatcccttggtcggctcatccagcaacaggatatccggctcggtcagcagcagcttgcaaagcgccgccttttgcatctcgccgccgcttaagtcataaggatggtgggcgagcagacgggtaaggccaaaatacccggcctgtgccagcatcgctttttcatccgtcgcgcaggccatcaaatcttcgcgcagggtatcgcaggtaaaaagcgcccggggccgctgcaccagcagggccacccggctccccttcgcccttttgatcctcccccgcaccggcctttgcaacccgcacagtacggaaagcgccgtgctttttccgctgccgttgcctcccaccagggccaaaatctccccccggtgcagcgctaattccacgccgcgcagcacatagggctgtcctttgtcgtattgaaaccacagctctttggccgagagcacaggctcccctggcaccgggtcggtgacgctcttgcggcaagcgagcttacacgcattttcacctatccattcccgcccctgcgccactgtgatcagcggccggccgccaggcagccggcaggccgcgggcagcgcggggataaagggatggctgggggctgccagcacaaattccgcaaagccgcgtggcgtgccgcgaaatgctgcgcgccccgcctccagatacagcacgctgtccgccatgggcagtatctcctccatcctgtgctcgcacaggatcaccgtgacccccagttcccggtggatccttcctaacgcctgcaaaaactcgcctgcggcaatgggatccagctgggcggtcggctcgtccagcagcaaaatctccggctgcatggccatgattgacgccaggtttaagatctgcttttgcccgccgctcagttcgtgcacccgccggcggtaccagggcgcgatgccgaaaaaatgcgccgtttccgccacccgacggcggatgaccgccgtgggcagccccagattctccaagccaaaggccagctcgtgccataccgtatcggtcacgatcccgttatccgggtcctgcagcacaaagccgatccgtcccgccgcctccagcggttccagctgatcctgctctctaccgccaaacaggatcgtccccgatctttggccatgcggggccaattcccgcttcaggcagcgcagcagcgtgctcttgccgctgcccgtgctgccgcacagcagtaccatctctccccgctcgaccttgatgtccatttcccgcagggcctgctcttttgccccggcatattgaaatgagaagccctgcagcgttatcgccgggctgtgcgtatcttccatagcaggttttcctccccttgccataatagcggaaacagcagcaacgcgccataagccgccagccccaagcccgtccagccgtttagggccagcgcccccagccttggataaaaggcatactgcccgccggggcctaacagcgcccaaaacgccgcgcaagccaaaagcgctatagccgccagcaccgccgtatcccgcagcgtccaccgaaagagcgcatacgtgctgcgccgtttcacggtgccaaagccccgggcatgcatggcgtccgccgtttctatgctgtcctccatactccaggccatcaggaccgaaagtgaacgtaccgcctcgcgcaccctggcgcgcttgccagatgccgcgctgccaccggttagcgccagctgaccctggcggatgatccgcgcgcgcacgcgcgatagcggcacccatttgaggatcatcgaaagcatcaaccccgtatgcggcaggatgcggctaaaaacgtataacaatttatcgctgcgcataatctcgttaaagcacataaaccacaagatcaccgccgccagcatcccacccgagcatacgccgtaaacagtagcctccagcgttacaggattttcaaacagcgtaaagagtaccgtaagccccctatggttgaataaggggttagccagggcgatcaccagccacacgcaagcgatcccccccaacattttgcgcaccttgcgccaggaacaaagataaacagcgtacacggctgcgcaaagcagcgaaacgcacaaaaaggccgggctcagcgtcagcatcgccccggccattgtgcatataaaatagatcatcgccacgattgggtggacttcatcaaagcagtgccgcacttatcctacgccgcctccaatatccttgccgcggttgagcgtgtagcgccatttgaccacgtccccgtcattcagcttctgggccgaacagcccttcatcacatacgcaccgtttacgctgtacatccatccactctcgccgccgcaatcgccctcgccgatggagttgatggatataacataaaccttgctgccgctgccggtcttgcttacagggatcccacgctgccccgcagccttttgcagcagatcatataccgtcgcatccgcaggcatctctaccatcatggtgcccaaaatggttccagaactggagacctgcgctgccaaatcgtagcccgcgtcgtaagccgtcctgcaatcgatcgcgatcttacaggtaatggtctggggcgcctggggctgcggcgtttgcgccggggtctgggccgcgctttcctttgcagtgggctgcgccgtcacagcggcagcgcctgcgcccttatcctgcgctttgggttgtgcggcgctggttgtcgcctttggcaggggtgttgctttggccccaactacggggtcatcagccgtctgctgctccgcatcctgcgcctgaagcgttggcgtagcctggctctcctccggcgtggctgcaggtgtagccagtgcgcttggtatcggctcggaagctgaaggtgttggcgaaggctccggcccgccgcagcccgccgtggcaaacgccacggccagcagcagcgctaaggcgcccgcgcgccatcttttatagacgttgcttttcatctttttcccttaccctttgatctttttacgcagtgtcccggcgatcacgccggcggccaccaacaggcacagcgcgtaaaccatcagcggcgcgctgtcccccgtctgcggcgtaccagtcgtagtttgctcatccaccgtctgggcgccgtccgttccctcctccaggccgggcgccggttggagcgcctgaacgacattaaccttgatcgtcgccgttaccccgctatccagagccgtgaccgtaaccgatgcgttgcccggcgccaacgccaccagctctccgttttcgatcttaacgatatttacatcgctactggcaaagctcagccgctggtcaggcgcatttttcggctctaccgtgatgccgcaggccgtacgcgctccagcctccagcgtcatttcctgctgcggcgcatttaggctctccacgcgaatcggcgtattgcctatggcaaagagatagcccgcgtcattggtaaaatacaaggtgccgtttgcgtccagaatggggctggccgcgcagtagttatccgcatctccctgcggcaggaacaacgtgcgcgcatagggcgtgcccgccgggtcgtctacgatacaaatcaggccctttccaggctcgttgaccgtaacgtaaacataggtcactccatcatagccggtactggctacggccgagcctttgatctcgccgcccaaatccagcgtatacaagacttctaaagtttcggcgtccaatatcttaaatccttcttcgtcggttcccacatatacacgtccattggcgatgaccggcgtgcaggtggaagcgccgatcgctacggatttcgcctggccaaaggtaccgccgccatagggcagcgcatacagatacccatctttagtcgtaaaatacacctttccatcccagtagctcagtccggagcggatgctgccctgggcggagtaggtatccaaaaccacatcctgcgtcaagttatgcgctactaccacgccatcgtccccgccaaagaggatcgcgtctcccacaacgacgccgccgctccaataatatcccatcttcccggcggtgctggagcgatggatccactgaaagtccttgacctcatcgccgctcgccgggatttcgtcctcggccttcaggcagaaatacgcgccgtccgtactggtcacgctgccgccgcggaaggtgccgcagtacacgtacccctcatgatacacgacggggctgatcgcctgctgctccagcagcggctggctgatccacagggattgaagcgtatcggcattcagcgcctggatgcgcccgtcgctcaccggcacaaagagcatcccatccccataggccgcgtaggagaagtatccaacgccggtagccagcttgcccgtggcaagggtattgccctgctgatccagtttataaagcgtatcgcccgaggcgatatagatctttccatccacaatcagcggcgcgccgccgcccttattccaatcccctccatcaaaacggcgctgccaagccagcgtagcctcatcgctgctgcgggcgggctgggcctggcttacggcgttgttatctgccgatccccggtagctgggccattgggccgagtaatccggcagagccgcccgatcctttacaaaggtaaaggtataagtggtgctgtggccggcgccggtggccgtaaccgtcaccaccgtttccgtgtcgctcagcgttacctcaaagcggtcgttataggaattgtctactcccgtcgcctgtaaaagcgcggtcgggtcgcatcgcagggcggtaaacgtcagctcctgcgtatcctccggtacggacaggcggtattccgtctgcccctgggtcaagggtacaacggtaccgtcgtccagcgcaacgccctttaaaagatcgctgtacgcagggatggtaatgctgatctccttggtaacgtcatccaccatgcccttgtagcggatggaggagagcgtagccgtcagttttaccgggttatccgcctcaccatagctggggcgcgttacgtaaaaataggtatttacggcgctggaggaggactgccaggtgatctccgccccgttctcgccccggttggcggtgaggaaagtatagcctccgtcgccatccgcataaccgcggtagaccttttgcaggttctctaccaccgcgtccgcggccgtattgttctttttgatcacgtcaaaatccagcgcggcagcgatcgcctcaagataggccttttccgcatccagctccgcctgggtcagcgccagcacccgcacggggaaatgcacctgggcggtatggccatggttttctaccgtggcggtcaaaataacatcttcgtccgcctcgccaatggctggccgcgtcaccttgccacgcagcgtgttgaccttgatcacgccttcgttattgctgctccaggtcacatccgtatcccggtcagggccccaatccagctgcaggtcataggtgatcttttgcggatctactgcctcctgcgttcccatatccagtattttgaactgctcgttcagccagtctacggtatcctgcacggcctgctgcgccgcctcgtcctccgccttggtataggccggcaccgtcaagtcaaataccacctgtttaggttgggccgtccccggcgcgcccgcccaggcattgatcgaaaccgtagcggtcagctttacttgcgcatccggctggccgtagttggggcggttcacggaggcatagttcccggtgattttaatcgcgccatcttccggttcggctttccacttaatatccgtggagtacgagtcgccgtaagaggacagctgaaggtcagtcagaatatggtcctgatccacgttgtcctttttgatatcgtcaaaactaagggcagccgcgtcctcatccaccaattcctgcgccgtcttctggtgcggcggcacctgcacggagaccgtataggggaaatccgcccctgccaccgcgatattgatgtcaatatccgccttcacccggctatcgccataggtgatcgcaccgtccgcggcgatctggctgtgctttgaagtatcggtcagcgtcagcgtcgcgccaggctggatcgcatccgccaggttttgcatcgtcgttacaatattggtatccgtaccctctgttacgcgcagatagctataggatccggtttttagcccggcgcggatctgatctgccgcggcctgtgcctcctcctgggtgtagggaggtacggtgatggtaaagcgctgcgtgtcgctctggccgccaagcgacagggtggcctcaagggtcacggtttgggcgggctgtcccacgtccggccgcacgactttacccgtatccgatatcaccgcaggtttatcgctgcgccaagtaatagccgtgcgcccgctctccccgctttccggcagggtcagggccccggtcgcctcatcgggcagtgataaagccgccttatcctgggcgatcacctgtcgggccgtatccgcgtccaccggcgtcaccgttactgtggcataggggcgggcaatatcatatttaccatagaccgagttataccgcgcggcggagagcacataggtccccgcctcgtcaaaggtcagggtagcctgtccattcgcatcggttcgctttccgctgtccgtcagcgcaaacccgccattgctatcctgcgcatcgcacaggatagaggcgccatctatcggacttaagtccccagcggtaaaatcatagatcgactggccctccagcgtcacggtcaggggctggcccacctggcaggtcagcgcctgctgggtaaagcgggtgttgtaggtattgacgctcccccaaacccctccccacacgccgtagaccacgatctgatccccgggctgcacgggataatccgcaagcgtatatccatttatcccatcgggcttgatgggcgttttgccgttgacggtgaacatccagtaggtctgctcctgtccatccgcagagccggtggaacctaaaatggtgttgaggttgccgccgctttggccgatcaccgtatcgatcgtatcggcatccacgccataatcgtcaaaggcgtattgtcctaaaaagtgcatcggcgtcacatatccgggatcctcaatgtcgtcaaacccgtaattcgccagcgttttttgtccatccacggtatattccgtgggggtaagcagggtcgcctccgcatactcaatgcgcagcgtagccgttacgctgccgctttgcgcccccgcaacggtggtaaaagaactggtgatgaccagcgccagcgtcaacacccatagcagcaatttattggcccgtctcataaactccctctctttctaacagcacgaaatgaaaatccccgtccaaaatgtggacgggggtggcttttttgcgcatagcacaaccaaaagcagtccccctctccgaaagacgtcttgctttacgcctaaggcaggtcttccgactctgagttcatctgggtccctcggggcaccttcccagcccattaggccagtggccgcgcggcaatgcgcgtcgcccgtccatccctcaatacggcagcgggagctgtaccggattcgcaccggtttccctattaatccctttttcttcaaaaagcgaacctttaagcgtgtcgattattcagtttcagcatcagtatagcatggttttagccctgtcacaatgcccaaggtaataaaaagcccggagggcaagcctccgggcatcgtttgttcctgttattcctgctttagcgcatacgtcaccggcaggtcatatccctggcgcgagaggatgtcgatcagcatcaccccattggcgtcaactgccgagggcacgaactcataggccaccgtatcgcacagcttggtgtttttcgcctcgcccacatcgtacacatacagcgcgcaggggtaagcctcgtcgccgctgttatcggccaggtaatagagcttcgtgccgtcgctggaccacttgtaatccagcaccagtagcccctctacaatggtcttgatattgccgtcccgcaggtccatcagacggatatccactgcgcccgtactctcctcggccagcatatcgctcaccgccatcagcgtaccgtcgccgttgatccgcatggtgacccccgaggtcaatacctggcgcctgccgtcgcctgggttcatcttatagatggtattgctctcagggtctgaaaagtacaacatgccgcctctgtagtaaaccggcccgtcgccgcccggcagctcctccagcgcggaggcgcgctcgcccttgggcttgctaaagtcgatctgcttgagctggtaatgcccgctggtctccccaccgatatcgctcataccgtagatgcgggtggaactgtcgtcccaggcaaaatccgaagcaatcaggccaaagccctcttccgagcagttggtcagttcctgcgcctctatatcataaacgtaaagcacgttcatctcatccatcatatccacaaaggccacttttttcccatccggggaaaggttggcctgcaagatggaggtaaagcccgcgtcgatcagacgcgtctgctcgccattttgctcgatccacagctcatcgcacagggtcaactgcccatttttcaggctggtccgctcgcggggcttggcgtacaggctgatagcgccgtcgccgctttggtacaaaagccggccacgcgcggcgataacggaagcctttaccgcatctccctcgctgcgcaccacgctacgctcatttaaacgtgccagctctgcatcggtattatatgtgggcagcccgcccgcgccgatctccacggcttctatcgtcgttccggcaagggtctggctcagttccgtcgccacgctctgggcttgcgccattgtcgcataagagcggctgagcaatacccggttttcgtaatccgcgcagatcgtgggattcaggccgtattttgtcatggtttcctggccgatgtcattgccgtatccgtctaccgatacgtgatagctggtagtctgaggtacttcttctgctgggcgcaggcgaatgatgatctggtctcttttttcctgcacgcggaaggccataccctgagacaggttgaataccatggtccgctcctgctcatagaccgggcggttcaggatcatgctctgcaccagcgcccccgcctcgccggagatggactggctgttgtaaatatagttcactccgtcaaattccacacatagccggtccggatcctgcagataggaaaccacgtaatccggcacgccgcgcacctcgctgatctcctcgttatacaggtcgccgcccttgacaaagaagaaggtgatcaccgtatcttccccatcctgggtcacgtccacgctgctcagggtggtatcccgcgtcccgcgtccgccctggaactgctggtcataccggtaatatccgctcacggcggactggggcggatcgttgggtttggatggcatcatcccaccgatcagaatccaggcgaccgccgccagcagtaatacgatcgctccgccgatggaagccatcgtgataatttgctttttagtaaattttttgcgatgtttaggatgcattcttacctcccacaagtcttttcctgggatttaacgggcacgcaacgccagcgccgcctgattgaacgcctcaagcagggcgggcatgtccacatgcgggatgtgcccatcctccatcaggatgtggccctccaccatcgtcatcttcacatccgcggcatggcccgcgtagacgatgtggttgaccatttctccccgagggtaataccgcgggccctgcgtgtctaccaagatcaggtccgccttcttgcccacttccagtgagccggtctcgtcctccaggcccagcgccctggccccgtcgatggtggccatgcgcagcgcctttttcgctgggatcgccttggggtctcccgagaaccccttgtgcatcagggcgcaaagcgccatttcttcccacatatccaggttattgttgctggatgcgccatccgtccccaaagctacgtttacgcctccgcgcagcagcgccggcaccggggcaaagccgctggccagcttcatattgctgcccgggttgtgcgccacatgcgcaccccgcgcggcgagtgtctccagatccccgctgtcgatggccacgcaatgggctaaaaccgtcttatccgtaatcaggcccagcttgtcaaaataccggataggcgaaagtccgtcatggcgctccatgcactcgcgcacttccttggccgtttcgctggcgtgcacgtggatgcccacgcccagttcctgcgcagcatccctgcaggccagcaaaaattcctccgagcaggtgtactccgcgtgcggcgagatcatggtggtgatccgcccctgggccgcgccctgaaagcgttggcaaatctccttcgcctttgcgatcttttgcatattgccgccatcccccgccataccctggcagagcaccgcgcgcaggccgcttttttccaccgccacagcgatggtatcggcaaagtcgtacatatctaaaaagcaggtggtgccgctaagcagcatttctgccgcgcctaccattgcccctaagtatacatcttccgccgtaagtttgtcctccagcggaatgatattgccaaagagccaatcctgcaaattcaaatcgttagcatagccgcgaaacagggtcataggcagatgcgtgtgggcattgacaaagcccggcatcagcaggttgcccttcgcgtcgatggtgcgctcgggcgcaaagtcctgcggcacgccctccgccccgccgatataggcaatgcggccgtcttttacgcagagcgttgcgtcgcttaattcccgatcctccccgtccacagtcaggatggccgcgtggtcaaaacggatatccatattaagcctcccagcccgagatgtattcctgctgctccggggatagcgcgtcgatcccgcagcccagggcctgcagtttcagctgcgccacataccggtcgatctcctgaggcacctcgtacacccgcctctccttgagcgcgtcatggtgctgggccacatagcgggcgcaaagcgcctgcagggcaaagctcatatccatgatctctgccgggtgcccgtcccccgccgccaggttgaccaaacgcccctcggccagcaggttcaaaacccgcccgtcgggcgtgtggaagccttcgatgccgggtttgcgggcaaagccctccccacatagcgcgcgcaggtctcccttgttgatctccacgtcaaaatgtccggcgttggccagcagcacgccgcttttcatcacttccatatgctcccggcgtatcacgtcccggcagccggtaacggtgataaatacgtcgccaatcctggccgcctcggccatgggcatcacctcgtagccatccatcaccgcctcgatggccttgaccgggtctacttcgcagatcaccacccgcgcccccagccccttggccttaaaggatacgcctttgccgcaccagccataacccgctaccaccacggtcttgcctgcgacgatcaggttagtggtgcgcatgatgccatcccacaccgattggccggtgccgtagcggttatcaaaaaagtgcttgcactgcgcgtcgtttaccgagatcatgggaaaggccaaaagcccttcccgcacgcgggcctttaagcgcatcacgcccgtggtggtctcctcgcagccgccccaaatgccgccctgcagttccttgcgcgcaccgtgcagcaggtgcacaaaatcgcccccgtcatccacgatgacctgcggccggatatccagcgcggcgtttaggtgcccccaatactcctgctcgctggccccatgccaggcaaatacctccaccccgctttgcgccagcgccgcggccacatcgtcctgtgtggagagcgggttgcagcccgtagcggcaaccctggcgccgcctgcggccagcacctggcaaagataagccgttttggcctccatatggacggataccgctatgcgcatccccttaaagggctgctctttttcaaacgtttcccggatcgcacccaaaagcggcatataatccttgacccaatcgatcttggcctgtccgctgggggcgagcgccgcgtcccgaatcatactcatttcgtttctccctttacctttcgcttaaagtacaaaaactggtatcctttaattgtacatgaaagggcggccaacttcaaggagccctctatttcgcaatatcccccacgccgtttaggatgtagcgcggccggtaggggaagcgctccatgctctggcggctggtcacgccgctgagcaccagcaccgtctccatattggattcgatacccgccacgatatcggtatccattcggtccccgatgatggccgtctgcgagcgggaaacgcccagccgatcccgggcgatgcgcatcatcagcgggtttggcttgccgatgtaataggccgtgcgccccgtggccagctcgataggcgccatcagcgcccggcaggccgggataatgccgttttcagaggggcccgttagatccgtattggtgccgatcagcttggccccgccaaacaccagctgcaccgccttttcgatcttttcatatccataagagcgcgtttcgcccaccaccacgtaatcgggattcacatcgttcatcgaaaggccggcctcgtacagggcgttgatcagccccgcctcgccgatggcgtacaccgtcccgcccgggcactgctgcgccagaaatgcggccgtggccagggcgctggtgtaaaagtggctttcatccacctccagccccatgcggcccagcttttgctgcaattctctgggggcgcgctcggagctattggtcaaaaagatgaactgcttatggttttcttccagccagccgataaactcatgtacgccgggcagtagattatttccatgatagattacgccgtccatgtcacaaataaaggcctgtttttgtttcaattctgttaaatccatcattttttcctccaagtattacaagttttaattctatacaaattaagtaaccctatctcacggccacgcattgtcattcagagcggaggcaaagccgaagcgaagaatctcaggcgtttctctctttcgttactcctgacccaagcgtttgtggtcaaatccaagaggctagcaatcgccacgagattcctcgcccacggctcggaatgacagggtgaaaacactcaatcaaagccaagcatctgccccttggggccgggtatccaaaccctgtactgcatactgtccgggcatcacgccgctatcgctataaattgcgatggggcgttgcgccagcggggtcccttctttttctatctccttgagcgcttgcaccgtctgcaccggcaggcgcagtgctacgcaggcacaatcccggtgggcggccagccgcgcggcagcggcgcaggcccgctccagcagccaggcgtgcgcgtcgatctgccctgtgccgccgcaagctgaacatttctgccccagcgcctcatccaggccatagcccagccgctggcggcgcagttccaccaaccccagccgggtaaagcccagcacctgtacccggttccgatcctccgcaaaggcctcccgcaatgcagcaagcacttgctcctgcgcagactcccgggccatatcgataaaatcgatcaccaccataccgcccacatcccgcagccgcagctggcgggccgcctcagcggctgcctcaagattggtccgcagaatcgtatcctcaaaatcgccctttccggtaaacttgccggtattgacatcgatcaccgtcatggcctgggtgcgctcgatcagcaaaaacccaccgcttttaagccacacccggcggtgccgcagctcccgcaggggcttatccagccccctggcttccatcaggctgcccggctcgtcaaagtgctgcacctgcggccagcattccggcaacaagcggcggataaacgccagcgctgccgcaaggccgccgccctgcccctgcaccgtcaagtgcgcgccggcttccatatggtctcgtatgacccgcaggggcagcgcattttccccacccagcaggccgggcacactgcgctctgcctgcctggccagaatctcgttccactgtgccagcagcgcctcgcactcgcggcgcagctgcgccttggtgcagtccgcagccgccgtccgcaggatagcccctatcccttcaggtagcatatcgcgaaccatggccttaagcgcttcgcgccgctcctccccgccaatacgccgggagacccctactgcactatccatgggcgtgagcaccagcgccacgcccgggagggtgatccgctcggtcagccgcagtcccttatccccgccggggcagctttccacctgcaccagcacccgctggccggcgcgcaagcgcttttgtatcggcgtgcgcacatgccccgccagctgctggacatgtaaaaaagccttttgcggcaggccgatgtccacaaaggccgcctgcaacccgctcagcacgttttccacgcggccgctatagatctccccaacgcgtccggcggttttgctgttctctgcatagaccgccgccagcttgccctcctctaaaaccaccgcccgggtcataaaacggccctgctcgatcaggatctccctcatgcttcctccaacgccagtaggctgatcggctgatccccccgacaggcccaaagcgcctggcggtggacgggataatcctcaatacggtatggcgcgccggcctgtgcacacagggcctgcatcacggtctccggctttaggttagcggccgaaccggtcttaagccgcatattcaaggcctgttgctccgcgttaaactgaaggctgaccaccatcggccggatatccagctcctttttgcccttcttggtctctcgccaagccatcacctgctcccgcgccaaaagcgcctgggcctgcgtcgcccaatccaaggggctttcctgcggcagctccacgcgataatcggacagggcgacctgcgccatcagcgccggataggtatcctctactttgatgccgcccaatatctccagccccgctggcgcggcggcgcgcagcgcctccacaaaggcctgtgcatccagtgcctcgctgccctcagccagtcccacgtccatatactcatcggcactggtgttacccaccgccacggcggaagcaaaactaagaaccatatgcgggttaaagcccgccgaataggccaccggcacgccactgcggcgcagtgcccgctgcatggcccgcatcaggtccaaatggccgatatagcgcactttctcgcccttagcaaagcgcacgatcatcctcattttaccgcacctccgcacaccttttgcagcccgcagccgtggcagccgctccgacaatccggcgtggtctgcgcggcgatcgccctttcccgctcgcgcttaaaaaagtcatcgcttaccccgcaggagaggtgggcccagggcatcacctcgtccaaagcgcgcggccttgcggcataaaagtccacattaacgccgcaggcctcaaaggcctgcatccacccctcgtagttgaactggtccgaccacccgtcaaagatgcagcccaggcgataagccttctccagcgcgtcggccagcctgcgatcaccccgggcgaagacggcctccagcacgctaagccgcgaatcgtgccagctgaactccaccccgcgtatggggcgcagagcgtctttcagcagggcgcgcttgcggtcaaactctgccatggtattttgcccctcccactggaaaggggtaaagggcttgggcacaaagttggatacgctgaccgtcacccgcagccccttggcccgtttctccttggggacggcgtaataggcgtttttcaccttttgcgccagctctacaatgcccatcaggtcctcgtcggtctcggtgggcagcccgcacataaagtacagcttgaccgcgttccacccgccgttaaatgccttttccaccgtgcccatcaggtcctgctcggtgatgtttttgttgatcacatcccgcagccgctgggttccggcctcgggcgcaaaggtcaatccgctcttgcgcaccttttggatctcctgcataaactgctcctcaaacgagtccagccgcagcgagggcagggagagggagacccgcttgtccgcaaaggcgtcgttcaattctttggccaacttgggcaggcgtgaataatcccccgtgctcagcgaagtcagggagatctcctcatagcccgtggaagcctccagcgcacaggcctgctcggtcaacacctcggggctcttctcgcgcaccgggcggtagatcatccccgcctggcaaaagcggcagccccgggtgcagccccggaaaacctccagcatgatccggtcgtgcaccggctcaagataggggacgatccccttttccggaaagggcgccttgtccatatccattaaaaagcgcttttcgaccttttgggggataccagcctccttgggcattatgcagcggatgcgcccatccgcttcatattccacggcataaaacgccggcacatatacccccgcaagtccggctgcctggcgcaaaaaggtgcttcgcgcctgccctgaagccttccaagcctcataaacgtccagcagttcgtcaagcacttcttccccctcgcccaataccacgatgtccgcaaagggggctatgggctccgggttataggtgcagggcccgcccagcaccacaaagggggcgccctccccccggtcgcaagcgcgaagcgggatgccgcccagatccaacatcagcaatacgttggtatagctcagctcatactgcagggaaaatcccaccatatcaaattcgccaagcggcgtgcccgtctccagcgtgcaaagcgggatatggttttcccgcatcttttgcagcatgtccacccagggcgcaaaggcccgctcgcaataggcgctctcacgccggttgatagcgtcgtacaatatccgcatccccaggtgggacatgcccacctcgtacgtatccggaaagcagaaagcaaacctcgtcttgatcccctccaggggtttgacgacctcgttcagttccccgccggtataccggccgggccgcgatacctgcggcaaaatttcagacaattctttttgcaaagcgctgcccctatctatcgtaattttgctttaaaagcatcttaagattatcacgtttagggcctgcgggtcaattcttggcgtacatctggtagatccgcgccacggcgatatgccccatcccctcggatagcgcaaggccgatctcccgctcccccaacacaccccgcgcggcattttgccggtctaaaatcaatatttggtaatagcggctgggcgccatgcgattgagtacatcctgcaaagggatatctccccggacggcaatggtctgcaccggcaaaaagccctgctgctgcagcgccagttctttataattcatatcccgcatccaaagatagggcgtcgccttcccctcggccagcgcgcataaaaagatatagggtgcggccagcaggtagcttaagcccgcagcttgcccgccttgaagcagcacgatccccatggcccccaatccaagggagagcaccttgcccaggctgaccaccaggtgggtggcctttttcagccccagcgcccgggagagcagggcgcgcatggcccggccgccatccagcggcatggcagggatcaggttgataaaggctatagagaggttcacattagccaaaaactgcagctggggaccataacgccctaacccgtaaaaaagggccacacaggtaaaggccagcgccaaactacacaccggccccgccagggcgatagtggcttccgcctgcggtcgcaccggcaggttggcctccagacgcgctacgccgcccatgggcatcaactcgatctccgccacccggcagtggaaggccagcgccaccgccacatggctgagttcgtgcagcgtcagcatggtaaacagcgccaacacaagcccgccctgccccagcaaaacggtggggatcagccagaggatgaaaaaggggcttatcagcaagtcgatattgccgatacgccccagccggatcttgcctcgtttcagcatggttataccccgcccgcgtcctgcgtcttctccgtatcgtcgatatggggcagcgggtcaaaggcacggccctgatagcgcaattcaaagtgcagcacagcctgctcccctgtttttgcaatggtagcgatcttctggtgctgggtcaccgcgtccccttctgcaaccgctatgtctttgagctggtaatacacggtctccaactcgtcaccatggtcgatcttgacatacgcgccccgggtagcgtcctgccccagctcggtcaccgtgccatcggcagcggccagcacatccccggtatcctgtcccgcgatgtcgatgccctcgttgcgcccctcgataaagcgcgccgtgatcttgcccgccgccggcgcggccagggtgggtacatcctcgggtagggctgcgctctccatccccgagaataccgaaacggcgtccgggaagatattctccacaaaccgcagttggccaatggtttcatccagtttgagcggcgcctcgatggtctgcttaaaggtgctcatggcctggcggctccaaggctggtcgatggccttggccaccagcaccaccagcaccacagccgcgcatacgcccaccttgatcatgatcttattgagctggcggtcctcctcgctcttttcgccaccccgcgggctgccgcgccgggcggagggcgccgctgcccggccacgcgccggcccttttttccctctgcgagcactcgagcgggtatagccccggtaatcccgccgctgcgcgccgtaatatccgctcacccctgtgtagtgcatccgcggccgttctatcttctgggctggctgcggctcttgtggctccgcagtctcttccggcgcctcgtctaccttggctggcgccaaccagtccggcagtgcgccatcctctaccgtgatcccccgcatggcgatagccttgggcggcgcctcgtcgggcccctccccctcatcgatcgtcatttcctgcgggtcccccgtgcgctccaaaaagcggtcgatctcgctttgcacgtcctctccctccgggctgggatcgctctgtaatggatatacctcaaaagcggtggtgttcaaccgcgtcaggttgcccttcccctcttgcatatgctcttcctccttattacctgggttcacttcatcctatgtgcgcccaggggggaacatgcaaaagaaaaggccgttgttccccgcaaagagaacaaacggcctgtagccttgcgttatggttttgtatgcccctaaagctgggtaaagggcgattccatgggcggattcaccagctcccgccaatccaggtccccccgctccagcgccatgagcatggcctcggccgaggccatattggtagccagcgggatatcgtgcacgtcgcacagccgcaaaagggccgaaacatccggctcgtggggctgggccgtcaacgggtcgcgcagaaagataatcagatccagccgattataggccaccagcgaaccgatctgttggtcgccccccatagggccggataaaaagcagtgcaccggaaggccggtcgcctcagataccaggctgcccgtagtgcccgtggcgcaaagcgcgtgctttttaaggatgtcacaataggcgatggcgaaattcaccatgtcaggcttcttcttgtcgtgcgctatcaatgcgatgttcatggttctcccccccaatttcaggcggccggtttcgccgcagccaaacattcatcactaatcctaataatatcataattgaaaacacactggaacccccataactcattaaaggtaaaggaattccggttatgggcatcacgcccagggtcatccctatgttttcgaagatgtggaagaacagcatggacaccacgcccactacgatcagcgaacaaaaacggtcctgcaatttataggccatatagagcaggcggaagatcagcaaaaagtaaagccccagcagcaccatggcccctacaaagccaaaggtctcgcataccaccgaaaagataaagtccgtatgcttttccggcacgtagttgagctggctcagcgccccggtgttgaacatccccttgccaaacatctgccctgagccgatggcgattttggactgggtcacgtgataggcgctggagccggtatccgaggccagccccaggtagaccagcacccgctgcttttgcacatcgtttaaaataaacatccataacaccggcaccgccgcaatgccgctgccggcgataatggcgatcagcctcccccgcagcccgcccaggaacatcattcccgcgaagatcgacaggaacaccagcgccgtaccgaagtccggctgggccaggatcaggacaaacggcagcagaaaatagcccagtatgggcagcagctgtttaaaggagtggatcccgccgtcgcaggcggcgatctttttggctaaaaagatgatgatggcgatcttggcgatctcggaaggttggaacatccggctgcccagcttgaaccaggataccgcgccccggctggctgtagagaagataaacagcgctgccagcagcgccacgttggcccaataaatccaatcggcaaagcgcttgtacaccttatagtcgatggtcatggtcaagatcagcagcacaaagcccaatacgaaccacagcagctgcagccgcacgtaatagacgttcatcatcttgagccactcccaaaaatttaccccgtccggcgggatggtgggcgtggccgtagcgctggcaatgccgatgaggctgtatatccccagcgccacgatgagcagcggcagcatccaatcgatatttctgtaccaggccctgctgggccgcttgggcaatttaaatctcaatgttccttatctccttcagatcatacgctttttgcggcaggcgcattggcccccgccaaatggagcttgagcaccggcacgctggcctgcagcgtgctcatcacaagctcgccgtcccggtctcgcttcagttccaagcggaactgttcttcgtccacatccatatacttttgcagcgcagccaccacgtccatccgcacggagcccaaaaaggcctccgaattatcgcagcggtcttgcgcgaccacggccatcagccgctcgcgcgccacattgccgctttttttatcgcgccgcaggaatgcaaataaattcataagcgcgccccctatcttgcctggcgcagccgcccgggccagaaacgccgccagccctgggggccttccaggttcatcatggggacctgcgccccgccgatgcgccgcacgatattgcggtaagcctgcccggcaggggcgtgcttgtccagcaccaccggctggcccatattggtcgagcggatgatctgctcgtcatccggcaccagccccaaaagcggcacgcccagcacgtctaacacgtcgtccgcgcgcatcatctcgccccggcgcaccatctccgggcggatgcggttgattaccaactcctgcgaggtaataccgttggcgttgagcaggccgatgatccggtccgcatcccggatagaggatacctccggcatggtcaccaccacggccttgtccgccccggcgatggcgttgtaaaacccctgctcgatgccagctgggcaatcgatcagcacataatcgttctgttcgcgcagcgcctcgatcacctttttcatctgctccggggtgacggcggtcttgtcccgggtctgcgccgcgggcagcagctgcaggttttgaaatcgcctgtcccggatcaacgcctgctccagtttacaggtttggtacaccacatccaccaggtcgaaaatgatgcggttttcaagccccatcaccacatccaggtttcgaaggccgatatccgtgtccaccaaagcgacgctgtgaccttcccgcgccaggccggtgccgatattggccaccgcagtcgtcttgcctacgccgcccttgcccgacgtcaccaccagtactttccccatttgaagttcccccttcatcttttgtcttatctctttatatctatctaatccgttaagggttcgatcacgatctttccggccagtaacctggccttttccggatagccggctttttccagtccctcctccggcggcaggttgaccactttggcaatggccagcagcgtaggctgcaggctcagcgcagcaatcaccgcgcgctcatctccggcatagcccgcatgggccttgccgcgcagcgcgcccatgaccacgatgctgccatcggcaatcagctctgcccctgggtttacatcccctacgatcaccacatgcccgttggcccgtatgcgctggccgctgcggatcagtccgtggataaactgggtcttgtcggtaggcaccggcaaaattttgatgccgctattccccggggaatccgccatctgcgccgcgcttggctcgggttcctccgtcttgtccgccggcgggggttgctggcttggcggctcctcctggcatgcagcttctttttcatcctcaaaggatagggataaaatgccaaactcccgatacatccaggccgccagactttccctttgggcctcgtccattgccgcgccgcacagggccacgccctggccgcccttataaaaggcggggtggcgggccatgcgcgccttgatggcctggcgtatctcctcaaacccggcttccctggccactgtgatgcgcagcacttcgccccgcccctgccaggaatggatgatctcgtccatcgccgcctccttactgccccatgctgcccggcgtgggcaaattctcttcagactgggcctctttgctctccatgtagtaggtgacgatctccttcatcgtataagaactcagcgcgcccgaaagaccgttggggataaataccaccacggcgatctccggttcgtcatagggagcaaagccgacgaaccaggagttgttctcaatatccaacgtagagacctgcgccgtaccggtcttgccgccgatctggtcgcggtacttatagccatcaaagtattttgccgcagtaccctgatcctcgggcgagaccacctctctcatgccctctttgatcgcttccagatactgtgcgggaatctccagatcctccaccagtttaggctgcatctcttctaccgtgcgcccctcgctgtcctcgattcgcttgatcagcgaggcgtcatacaccttgccaccgtttaccagcgcggaaacataccgcaccaccgcaataggggtcagcgtggtcatactctggccgatgcccgccacaatggtctggttgggcgtccactgcagctccgtcatcaggttgagcagttccagatccatgctgttggcgcggatcacttcctccgggaagtgcagattgtcccgcagcatggtcttgatctgggagacttggttgtccgccttggtggctaccaggtccatcatactcttcaaattggcctgaaggttgttctcctccagttcgatgccgttttcctcggcaatattggtgacaaaagccttgatctgccggttgaccagaatagggatggaactttgctgctcgtccagcggctttgaagcgtcgtacaataccgtctggttggcgacctgacctgtggcctcgccgggcagttcgatattggtcttgctggtcagccccagcttgtccgcccacttattgatcccgtcgatctccagacgggaggccgtttcaaagaagtaatagttgcacgagtccctcagggccgtggtaatgttctcgttctggtgctggctgaagttaggtttgacccagcaggccggcgccttaccggtaacggtgtatttatcgtaggggcccaggtcgtccatggtctcggtcagggtgatcttaccctccatcaggccggccaggccagtcaccatcttaaaaattgaacccggcgtgctcttggcgttgatggccttgttgaaaagcgggttgcccgtctgctcctgcagggccttatagtcctccgagctgatgccgccgataaacgcgttcgggtcataagagggataattggccagggctaggatgcgcccggtggacacttccattacaatagccgtgcccatttctgcgtattgcagcggcgaaccgcgctctgccaccacctcgtcgtatttcgtgggattagcctcgtatttggccttttgctgggccacgacctcctcgatattggccttaagcgcatcctccacctttttctgcagggcagcgtcgatggtcagcaccacattgttgccatcggtgggcgcttcataatccagctcccgggtgaccttgccctggctgttgacctccacaacccgctggccctggtgctctgcactgctgccggtcaggtaggtctccatgctggattctacccccgtgatgcccacctggtcctcggtgccgtatttctgctcggcatattgttctagcaaagtatcggtgatcttgcccgtgtagcctaatacgttgcccgccatctccccgcgggggtagacccgtaccgtgctctcgctggtggagataccctccagctcgatggcgcgcgcctctatctgtgagaccgtcgccagattcacgttggaggcgatcttcaccggtacatagcttaggtaactggtcagctgcgcttcctgccagatggagagtagcttgcgcgcctcctcatagggcatctcttccgggatctggtagcgctggcgcaggtagttgtagatctcctccgccgtcttttttgaatcgggtatatacatgttgctgcgccagtttttctcgcgcttttgcgcggcctcctcggaaatatccccccactggaaggcaaagcccccctctggcgtatactgaatggcaaaggtatcgatcacttcatatccgttttgctcgataatatcaatggccgccatcagcgaattggtataggccaggttatccgccgccttgttgcgggtggggtctcgcataaactctacatcatagctcttttggttataggccaaaggcagcccattggtatctaaaatcttgccgcgctccccctttagggtgatggtgcgctgcttaccgctctgggattgggcgtagtactcctcgccctggcgcagttgcaggtccgccatggagccgcccagcacgcagaataacagcgccagggccacggcaaagattgtaaaacgtattttcgcattcatcgtattcgcgtttcaagcctccttaaacccaagtatgcgtgtcagccgcgcttgcggccataaaaccgcgtggcctgccaggtatgctttttatgggtgcgcatctttttaaaccaaaagatcgtaaaccagaccaggcttacggctgcatggtacagcgtgcccggcagaacagcctgggtaaagacccgcgccatgggtacgcctacgcccgaaaaataagccaccaccaatgtgaatacctggcgtaggaaatagcacagcacactgacccccgcggctttcaggatggccgcaaacccgccctccatccggttatgaaacccaccggcgaggatcgccaccgccgtataaagcagcgcataaggcccgatggacccggtcagcagcgcgtccagcatcagtccacctaccgcgccgcacaccaccgcctcaaaccagccgtactgcagtgcgataaatacggtcaccagcaaaaacgcatccggctgtgcgcctgatatttgcagctgtggaaacagcatcgcctgcagggcgatgcccagcagcgtcaggcagatcagtttaacgtatctcaaatcccaaggtcctccaacatcaggctattcgtcgatggtgatccccgcggactccggccgggtgagcaccaccagtacatcttccgcccggctgatatccgcactgggtttgaccagcgcgtatcgctcgtccccctccgtacgggctacctctaccacctcgccgaccaccaggccccggggcagcagcccgtccagctgggtggtcacgatgcggtcgcccggcaccaggtcgctgtcgtcctgcaagtacagcagcctgcaataactctcctcactgcccagcagcatctgccctttcagcacgccgttatcccgggtgcgctccaccatcacgctcagggcactgcgcccatccagtatggtcaacacctgcgaatgggtatcgcttaccgagatcacgcgccccagcaaaccatcgcccgtgatcaccgccatgttcttttccacaccatcctggctgccccggttgatcaccaccgtagcgtaccagctctccggcgacttggcgataatagtggcctgcataaactccatattatcaatgctatcggccgcccgctccaaaccgcgcaggcgctggttctcctgtttaagctcctcaagctgctggcgcagggtagcgatctcgtcgttttcagccttcatcctctggttctcccgcagcagggtattgttctcatccatcatggtgaaccagtcccgcacctggccttccacataggcgtaggcctcctgcagcggggcgatcgtccgccccaccacctggccgatggggccgttacgtatcccaggtaccgccattgcgccgatcagggccacgaagatgcccgccgtgaccaaccagggccattttttgcgtttgcgcacaggcccgtttgctctagtttttctctgccgcatagcgccctccccgctcggccccgcacgctttggcccagtccttcaaccaatcccgcagcagcgccagcggcagccctacgacattgtcataatttccttcgatttgggcgatatagagcgaacccagcccctggatgccgtaagcccccgccttatccatcggctcgcccgtagccacgtaagatgcaatctcgtcctgcgtcatcggtgcaaaccacacctttgtgcaggcagcgcccgtctttttccaacccgtagccgtatcgatcaggcacatgccggtataaaccctgtgggcctgcccctgcaggcgtaaaagcatctgcgcggcctcttgggtatcgcgcggcttgcccagcacctgatcccctaatacgacgatggtatccgcgcccagtaccagcgcgcccttttccacccgggcggcgatgtcaaacgccttgtccgccgccagctttgcggcaccctgccctgcgggcagcgaggcgtcgatcttcccttccgcatcgcttggcagcaccccaaattcgggcaccaaacgccccagcagctccctgcgccgcggcgaggccgaagccagcacccagcgcctatttaaatgctcttgcatttctctttcaaacccctttgataatgagccgtatacagccggcccctatgtatattccataatacggattattataccataaactgctaggttaaggtattgcgcattttgtcttgttttgtcacccaggcattccgtgcgatattcgccgtaacgcccaagccgcggcacattgaaaggggccggctatgtttagccggccccgcgtttggcggtttgccgccaaaagtttacgaaaagttttcttttatccccactagaccagtttgatggcctttttggggcatttgcttacgcaaacgccgcaccccttgcactcagagggaatgaccacatgcttttgcttgacctcgccctcgatggcgccaaaggcgcagttacgcttacagatggtacagccgatgcacttatccgcatcgatcctggcctgcctgcgcttttcaatgttcgcgctgatggcgtgcgtggggcatacctcgcggcagaccatgcagctggtgcacttggcgtaatcgatcaccggcaggttgttttcaatatggatggcatcaaacttacagtttttctcgcacttgccgcaggcgatgcagccgatcatacagttttcccgcaccgcgcggcccttttcgatggccctgcaggccaccatggtcagtttggaggcggggatcagctggatgatgtccttcgggcaggccgcaacacagttgccgcaggccacgcacttttcttcatccacctgggcgatcccgccctcgccgatatggatcgcgtcaaaggggcaggcctttacgcagctgcccagccccaggcatccgtatttgcaggccttgtcgcccccggagaccagcgccgcagcgttacaatcggccaagccttcatataagtacttctttttcgccttgtcaaaggtgccttggcaagccacgcgggccaccatccgttcggtctcttccacctcaacgcccatcacctgggagatgacctgtgccacctttgcgccgcccaccgggcagccgtttaccggcgccctgccctcggccactgccgcggcatacgcatcacagccggcaaagccgcacccgccgcagttcgccccaggcaggctctcgcggatctgctcagccgccgggttgacctcaacggcaaactttttggaggcgaccgccagcccagcgccaaacaacaagcccagcgcgcccaaaaccagcgccggcatcaaaatttccattaccataaagccgcgcctccttacttaatcagtccctggaagcccaggaaagcgatcgacatcagccccgccgtcaccagcgctacagggaaaccctgaaagggcttggggatggcggaaagctccagccgctcccggatgcccgcaaacagcacgatggccagcgtaaacccgagggccccgcccacgccgttaatcagcgtctcaaacaggttatacccttcggtaatgttgatgatagccacgcccagcaccgcacagttggtggtgatcagcggcaggtatacccccagggatttatacagcgtggggctgaccttctggatcaccatctccaccagctgtaccagcgccgcaataaccaggataaaggcgatagtctgcatgtattcgatctgggccgggaccaggatgcagtactgcaccaggtaagtgatcaccgaggccatggccataacaaaggtaaccgccaggcccatgcccaccgccgtttccacctttttggagacccccaggaaggggcagcaccccaaaaagcgggagagcacaaagttctgtaccagaatggagcttagcagcatcaggaatattttcgcaacataatccatcgcttacacacgctcctttctctgctcgagcttggcggtgatcttattgatcagcgccaggatcagccccagggtgataaatccgcccggagccagaatcatgatcagctccggctcgtatcccgcgcccatgatcgtcagcccaaacagggtgccgttgccgatgagctcgcggatcgaggccaccagcgtcagcgcaagagtaaacccaaggccaatgcccaaaccatccaaaatcgaatccaccggcgtattctttgaggcaaaggcctctgcccgggccaggatgatgcagttgaccacgatcagcgggataaagatgcccagcgcctcataaaggctggggataaacgccttcatcaccatctctacgatggatacgaacgtggcgatgatcaccacgtaggccggaatacgcaccttggaagggataaaatccttgagcagggcgaccacaaagtttgagcagatcaatacaaaggtggccgccaggcccatgcccacgccgtttaccgccgccgtggtcaccgccagcgtggggcacatgcccagcaccaggcggaaggtggggttctcgttaaagattccgttgaggaggatcttttttgccttgcccatttatttcccctccttgctcaaaaactgctggtaaaagctcatcgcatcgttcacgcccgtggcaacagccctggaggtgatggtcgccccggtcagcgcctggatctcattgtcgccgctggccgatttgctgacctccagcgggaactgatccttatccacaaacaggtttctaaactcctccttcgtggcgttggcgcccaggcccggggtctcgctattggtccctacggtcagcccggtcaccttcccttcaaaggatatgcccaccgtcagctcgatctcgccgccatagcccttgggggcgatcttaaaggtatagcccatctgttcatcgccctgataagcggcgtagatttccaggggctttagcgtttcgatctgcgcgccccccattgcctcgtccacatccaccggttcaaaccggtcgcacgcttcaaacaccgcctggcgcgccttgtcgtttttctcccggtcctgctgggcgatggggtcctttgtcacataattggtcacgcccagcgccagcgccgccaccaaagtgatcgccagtagccgccaggccagtttccagatatcacgcacgtttggccacctccccgaagatatgcggccgcgtatatttatcgatcagcggcgccgccacgttcatcagcaggattgcaaaggataccccttccgggtagcctccccatagccggatcaccgccgtaagcaagccgcaccccagggcgtagatgacctgccccttgggcgtgaccggcgaggaagcgtaatccgtagccatgaaaaatgcgcccaggatcaggccgcccccgaagatctggtagagcacggggccggtaaaccagccctccggccagaagatccaggtaaagatcgcggtcgtggcaatatagatgatgggaatgcgccaggagatcacccgccggcaaagcaggtagaccgcgccgatcaaaagagccagggcggaggtctctccaaggcacccggggatgttgccgataaacatatcccataccgaaggcagcgcaccttctgcgccctttaagatggccagcggcgtagcgccggtaaacgcgtccaccgacataaaggccgtcggcgtccaggtcgtcatatgcgccgtgcgggagaccagcaaaaatgcacgccccgccagcgccgggttcataaagttatggcccagcccgccaaagagctgcttgacgatgccgatggcgaacaccgacccgatcaccgccatccacagcggcgcgcccgagggcaggttgaacgccagcaggatgccggtcaccaccgcgctccagtcgttcaccgtcacctttttgccggatagtttctggatcagcgcctccgtgcctacggcgcttaggaccgatacgatgatcagcgccagcgcgttccagccaaaaaaccagcaggccgcgaccattgccggcatcagggcgatgaccacgtcgaacatcaccccggagatcgacgcgcggtcccgcacatggggtgaagaagttgcccgtaaaagattcatgctatcctctccccccttccgcctttttgcggtttgcgatgatctgccgcttggccgtgcggatggcctgtaccaaatagcgcttggaggggcatacatagctgcagctgccgcactccatgcagtccagcgcatggtagctttcgcacatgtcgatattgcccgcctgctgataagcgctgagcatcagcggcatcaaatggatggggcaggcctccacacaccgcccgcagcggatacaggggccttcctcgccgtccgtcttttcctccggtagcaccaggatgcccgaagtgcccttgaccaccggcacccccaggtcgtactgggcgatgcccatcatcggcccgccggagatcaccttgcccggctcgccggtaaaaccgccgcagtgctcaattaaaaactcaaaagatgttccgatgcggcaagagaggttgcgcggctccttcaccccatagcccgtgatggagaccacccgctccaccagcggcatcccgtcggaaagcatccgtccaatagcgccggcgctgcccacgttctgcaccacaacgcccgcctccatcggcagccctcccgaaggcacttcgcgccctaaaatagcgctgatcagctgcttttcgccgccctgggggtatttgaccttcagcggggtcacctccacgcccggcacgtcccgcaccgctttttgcatggtatcgatggcgtcgggcttgttgacctcgatgccgatataggcccgcgtgacctgcagcgccttcatcagcgcgcgcacgcccagcaccacttccatgggccgctccaccatcagccggtgatccgccgtcaaaaacggctcgcactccgcgccgttgatcagcagcgtatccacatgcttgccctcgggtaccttcagctttacatgggtgggaaaggccgcgccccccatcccgacgatgcccgcctccatgatgcgctggcagatctgctcaggctccagctcgtccaggctgacgggcccgggaaggcccgcaaagcgggtatccagcccgtcgttttcaatcactacgcacatcgccttggccccactggcgcagggcctgggctcgatagccgccacccgtcccgatacgctggcgtgtactggcacgctgacaaaaccgcccgcctcgccgatcttctgccccatggccacaacatcccccacctgcacgcagaccttggccggcgcgccgatgttctgcgccatcgggatcaccaccacgcccgggaccggcgctgcctcaatgggcttgtggtccgtcaggtttttaccgtggtgctgatgatgtagcggatggatgccgccgcgaaaggtcttcgccgcaatccccattttaaatccctccaagcaatctttcaaaaccgctttctctcactaaagcacgagatttattataacatactacaaaatccgtcacaattgccaattgaatataaagatgctataaagctcctttttatacgctcatcctatggtatataccggcggtttattcgatgacgacgccctttgtcaggataatattggcatacagggccccctcccccgtagaaatgacggcatacgcatcccgtgcccgggcgtaaaaatcaaagcgctccacctgctcaaaagcggtctcgccctcccgcctggcgatgatctgctggtactctttccagatcggcgcgtcctccccgtccgccgtggccataacggccaccggcttttccacataggtgtccagcgggaaaaaggtcatgatcgcgtccagcagctccgccgcgccgtgcccgtcgcagcgcaccaggcgcttggcgcaggccgcggcgggaaagttgccatccccgatcaccagcgtatccccatgtcccatttccatcatgatcttgagcagatccggattcaagatcgaaggtatcccctttaacattacatgccaccctttctatttcattcctcttcagccttccaggcccagtatgcccatcgcttcagcgatatgctcaatgcgatgatcggcagcggaaatatcctggttacccgaatgagggttataaaagccaatgcagtgcatgcccgcggctttagccgccgtcacgccgttataggaatcctcgattacccaacacgcctcgggcttgcagcataggcgctgggcggccagcaaaaagatatccggtgcgggtttggaggcgggtacctcgtcgccggttgcgatcagcgtaaaatactctcgcagcgccagtttgtccagcaccttgtcgatgatcgacaaactggaagaggacgccaccgccatagggatcccctttgccttaagcgcacgcaccaaaggcaggatgccctcgataggcactgccaagggcgaggtatccattaacttgaacaatgcatccaactggtatgcccgcacctgttcctgttcccaggcgatgggataaagctcccgcagccgctgccacacctccgcgttgcctctgcccgtggtccatcccaatgcctgcggcgtaagctctaccccgctggaagccttgatcgcctcgatcagcgcctgcatttgcagcggctcgctgtcgatgataaccccgtccatgtcgaaaattaccgcctcaaccattttcaaacccctatctgtctatttttgtcgaaattttacgcattgcaaaacgttgctattaaaccaccgcattccatctgtcgttcaccgcggggctgcaggttctgcgaagaatgataaagaggattcccgcctgcacctgcataccttccaccgcgcagggaattagtaccccagcatcttttgcaggcgcatgtagtcctcctgcgccaattccacttccatgacaaaaccttgctcctgggcttcgtctttgagcacccggccctgccggtgcaaaaaggcgtgcacatcgcccttcgtgtagggcagcaacccttcccaaaccttatagcggctgcgcagcgccgcgtcgatcttttgcagcagttcgtcaatccccatatcggttttggcggagatcatcgcatccaccggttcgcgtaggtccagttcctgctgaagctcggccttgttgaccacggtcagcgtcggccggccaagcgcccccagctcccgcagtacctgcccgacgacctcgtagtgtttttgcgcctccccgctcgccccgtccaccacgtgcaccagcaggtccgccttgcgcacctcctccagcgttgagcggaacgcatccaccagatcgtgaggcagtttatcgataaaacctacggtatccaccagcagcgcctcccggccgctgggtaactcgatccgccgggaaagcgggtccaacgtggcaaacagcttatcctccacaaaggcctcgctgccggaaaggcggtttagcagcgtggatttacccgcattggtgtaccccaccagcgctacaaccggaacgctgttttgttcgcggcgcgcccggcgcagttcccgctgccgggccactttttcgatctcctgctccagctcgaagatcctgcggcggatgcgccgccgatccacttccagcttggtctcgcccgggcctcgggtaccgatgccgccacccagccgcgagagcacctggcccatgcccatcagccggggcagcaggtatttcatctgcgccagctccacctgcagcttgccctcccgggaattggcccgctgggcaaatatatccaatatcaaccccgtccggtcgatcacctttacgccccaggcctgctccagattgcgggtctgcgcgccggtcaattcttcgtcaaagatcacgatatcgatcttcagcgcctggatctgcaacgccagttcgctgactttgccggagcccaaaaatgtggcgctatccggtgtctcccggttttgtaccgccgcggcgatcacctttgcgcccgccgtatccgccaggcgcgccagctcttctaaaggctgcccgccgtttccggcctccagccccaccaacagcgcccgctccgcctcatcggctaccgccccggtctggcgctcctgatccatgcagcgctccgcctcgccgatcagctccaaaagctcgccatggggcaggtgatgcgcccgcagcggcccttctatcatgcacttgtccctgcccgcaaggtaggccacgcacatcgtcagcggcacgtccccccggtccggcacggccaaggcggccatggcgtccaggcgcaggctctgcaggctgcttaaatccaccgcagaaaggtgcgggtctccgcccggatgggtatggatgcaacgcacgccgctaaggcgctgctccccccggcgggtctgcagctgcggcagggtcaccctgtcgttatcgcccagcgaaatatcggctaccatcccccgacgggtaataaaaaccgatacctcccggttcagcttccgggtcacttctgccattttatccacgatttcccggggaataaacagatcccgccggggttccagttcatataacgcttccagttcgtccaggatgctttggcgcaccccgctaatgttacctgcgatcataaatgtttttcaattccgtccttttaaaaaaatagtatatccggcgcgcgcaccgtgcccgtgcgggtgtaagcgtccgcaaagccgaagggctggccgttcatatcccggaaattggcccgctgcgcctcctccagcgttttaaagcgtacctccatacggcagggcgaggggcaggtcaacgtcttcatctccgccaggcgcgcgtatgcgcgctgcacgcctttatagattgcctcacaagcccgctttggatgcaggctgacggcacgatggtacgccatggcttttttggtggccacgctttcgatccagggcatccattcttcggcctggcgcacacccgcctcgtcgctggaaacgaagatcaccggcacgcccacctgtccggccagcatcgcgtcgatctgcatctcccccaccagccgcccgtcaatcgtcacggcctggtaaagtgtggaagcatacgtgtgggcgatggcggccgcgggggtagaatccatggcatggtaaccgaccaacagcaccccgtcatagctttcatccagcatgggccagcgccccgccacacaaacgccaagggcgatgtcacaccgctcgtcgatggcgtcgtaatccaggttcacgccctcgccgtgattgtcccagatcaccacctgatctgcgcccgcgtcaaataatgcccgcgcggcagcattggcctcccgcaccgcctgtttacaggcaaacgcataattgggtgaagtgctcagcgtatcgcccactgtgctgacggcacaggcaacgccctccaaatccaccgcgatcataaatttcatcgctgttcccccgctttcttttctcttttatatgaataaaggcctgcacaaggcaagcctgttattcggatctgtttacgcctgcatatcgcccaccgaataggcgatgttggtgccgtggtcggccacgcgctctaagttggtgatcacatccataaacagcatgccgctttgcggggtgcaaagggatttattcagccgctggatgtggcgctctttcaattcatcctcttcttcgtcgatgatctcctcgatatgggccacctggctggtcagcgtcgtatcgtggtcgttaaaaattctaagggcgatgcgcagcagctcctgcacgtggttgttcatggtttccagctcgtccagcgcggcgtcagatatcttgatatccccttcgatacggctggtggcatactcggtcaggttctctgcgtggtcgccgatgcgctccaagtcattaatggtatggaacaggataccgttgagcttcatatccgcttccggcaggtccagctggttggccttgaccagatagtgggtaatctcatgatttaaatagttgatcacctgctcgtgctgttgcacgtaattgacctgttcggcgttcttgtgcaagaacgcgtccatggcgcgattaatattatctatcgccagatccgccatgcggttgacctctttgaggatctggggcaccaccagcgccggcgtggtcaggatacggtcatccaggtatttaagccggcgctcctccatctgcgggtcttcgcccgggacgatcttcatggagagtttgaccagcagattgctcatgggcaggaagatgatcacgcccagcacgttaaacagcgtatgcgcgttggcgatctggcgggaaacatctcccggagagagcgcctgtatcccgtcgatgatcgccgggaagcactggatcagcgcaaatacgatgacgctggagaatacgttgaacatcagatggatgatcgcagcgcggtgcgcggtcttgctggtgcccacgctggccagcatggccgttacgcaggtaccaatattctgccctaggatgatcagataggccgcgtccaggtcgattagcccctgcatggccagcgcctgcaagataccaacggaggcggaagagctctgaatgatggccgtaaaagcgataccggctaaaatgcccagaacggggtttttaaaggccaccagcatgtttacaaattccggcacatccttaagcggctccatggaagtgctcatcatatccaggccgataaacaggataccaaagcccgcgatcacttcgccgatatgcctggtaaaattctttttggtgaacatcacgatggccacgcccgcgaagatcgctaccggcgccagcgccgtcagtttaaaagcaataatctgtcccgtaatggtcgtaccgatgttcgcgcccaggatcacgcccgtggcttggaacaggttcatcagccccgcgttaacaaagccaacggtcatgaccgttgtcgcgctggaactttggatcagcatggtgaacaccatacctaccagcatgcccaaaaaacggttggtcgtcaatacgttgagcatgttgcgcaggcggttccccgccgcgcgctccaggccgtcggacatcatcttcatgccgtacaggaagaggccgaggcccccggcgagcgtagcgatattccaaaaatccatcgttttcctcccgtgtatcgcttttttaaatttttctacacatctctagccaaaatccattgtaaaggatttttaatgcaaaatcaatttaaaatgacgctttaacgggcaaatttaccaagattcgacaagcctgagaaatgattttgtcgcatcgcctcgtaaacgacgatggccacggagttggacaggttgagcgagcgcgccgcctccaccatggggatgcggatgcaatcctccagatgctggcacaaaagcgcctctggaagcccccgggtctccttaccaaaaaccagaaaatccccatctcggtactgcacatccgcataggtctggtgggatttggtactggcgtaataaagccgttgtggccggcaggaagctaccagctcctccaggctctcccaacggtgcacctgggtcaggggccagtaatccagccccgcgcgtttcagataacggtcctccagcgagaagcccagcttgcccaccagatgcagctcgctgcccgtagccgcacaggtgcgagcgatattgccggtattctgtgggatctccggctccactaagacgatatgaaatgccatttttatactcccatctcttttgaaacctaatgcggtaaatacattatctgtccggctacgatagcggcacccgccagcacagccatgcccgcgatcactgcgatgcggcgggctttgggcacgcgctcaccgtataggcccagggccaatgcagccaaaaagccgcccagcaggccgccgatatgcgcaaagttatcgataccggtgcggatgaacccatagaacaggttaaagccgatgatcagcagcacctgcatgccgaacatcgcgttaaaggcgatcttatcctttttacgaaagtacagcagtgcgccgaacagtccaaagatcgccccggaagcgcctaccgcaagatagggcgaaaacacgtagctgcacaggttgccgaacacccccgcgatcagatagatcgcaaggtatttcgcccgcccatacatcgcctcgagcaccctgccccataccaccagcgcatacaggttgaaagccagatgatccagcccgccgtgcaaaaaaaccggcgaaagcagccgccaatattcccccgcagcgatccatgggttcaccttagcccccatcagggccaaaataaaggtgttgctgtccgcccccatgagcatctccagcaggtagacggcggcacagattgcagccagggtatatgtaacgaccggcttgcgccgggaaaccgccggccaggccggtgtgtttacttcatccatacccaataaaatccttatagattattttactttaaaagcggcgctacaaagtcctcaatgcggcgcagcgcctctttgagttgctccatggaggtggcatagctgcagcggataaagccctcgccctgggcgccaaaggcgctacccggtaccgcggccacctttttctctcgcagcaggcgctcacaaaattcatcgctgctcagccctgtccctttgatggaggggaacgcgtagaaggcgccctccggctcataacaaggcaggcccatatcgttaaaaccgttgaccactacgcgccggcgcaggtcgtaggcgtcgtgcatgcgcttaacatccgcataatccgtggcgcggccctgctttaaggcctctaccccggccgcctgggccatggtgctggcgcaaaggatggagtactggtggatcttgcacatggccgccaccaggtcccggtgcccgcaaaggtagcccagacgccacccggtcatggcaaaggcctttgaaaagccgttgatcacgatggtacgctcatacatggagggaagctgcgcaatgctgacgtgcttgcccgaataggtcagctccgcatagatctcatcggagatcaccgcgatattcgtcccttccagcgcgccggccagcgcctccagactttgccggtccatgatcccgccagtagggttggacgggaagggaagaatcagcgctttggtccgctgggtaatccggggcaggatcagctccggcgtgagcttaaagccgttatccgcactcatggggattgataccggcacggcattggcaaagaccacgcccggggcataggatacataacccggatccgggatcaacacctcgtcccccgggtccagcagggcgcgcagcgcaaggtcgatggcctcgctggcgccgatggtcaccaatatctggtcggccgggtcgtacgtcaggccaaatcgcccctccaaataccgggcgatctccctgcgcagctccagcgtgccccagttagaggtatagcccgtcatccccttttccagcgagcgcatgcccgcctggcggatattccagggggtgacaaagtccggctcgcccacgcccagagagatggcgtccttcatctcggcgacgatatcaaaaaacttacggatgccgcttttgggcactgtagccatccgctttgcgatcaaatcgttcggattcacggggagaccaccagcctttgatcgtccatctccggctccatcgccacatcctccaccttatactttttcagcacaaagtgcgttgcggtcgaaagcaccccttccatggtggccaggcgctcgtttacaaactgcgccacctcccggagagacttgccctccacctgcaccagcaggtcgtatccgccggagaccaggtagagcgagcgcacctccggatagtgataaatgcgctcggccagcgtatcaaaacccaccccgtcgtgcagcgtgaccttgatctcaatcagcgcatccacgcggttgctgtcaaacttctcccagttgatcagcgttgaatatttaacgatgatgccctctttttccatgcgcgcaatggcgctgcgcacctgctcgggctcatggtgcaaaagtttggcgatctcctcggccgtcatgcgggaatcgttggccaacagggccaggatatcgctgttcatctgttccgtcgtcatctatcaatcaccctttcttgatgctgtttggctaaacgctttttgctattctagcacttcccattcccccgcgtcaaacctccatgccggggacctggtcagcctgcgggccaaaggcggcgcgcagccggtcaagcgaggggacgtaccccaaaagcccgttcacctttcccttaacggtataagcgccaaggtccgccgggatatacaccgtttcccccacttccagatccatctcgccctcttcaaagcagagcttgccggttccttctaacagggtcagggcgtaaaaacgcgttccgtcagtctccatctccagcgcgctctccacctccagcttctccagtgcaaaggccttgcaggccgcaagcagcgtgcgggtggcgccttccgtctggagcgtgggcccgcccgtccctacacggggcgcggcgccggttttgaccgattgcagcgcttgggagatatgcagctcccgcgagctcccgtccggatttttacggtcccaatcatatacccggtagaccgtatccgagctttgctggatctcatataccaaaatcccttcgcccagcgcatgcaccaatcctgccggtacgaacaacacgtcgcccggcttaacggggagccattccagtacttcctgcacctgtccccgctcgatggcccggcgcaaatcctctgccccggtgccgggctttagcccgtagaccagctgcgcatccggattgcagtctactacataccacgcctcggtcttagccgcgccgcccagcgccctggccgccgcctcgtccgggtgcacctgcaccgagagcttgccctgagcatccagaaacttcaccaacagcggcagttccacgcccttttgggctgcctcgctgcccactgcttttttgccaaaccgggtgagcaccgcccccaggcgcataccggtaaactccccctcgctgacccgggaagggccctgctccagcgtggacaactcccagctctcgccgatcttttccccctcaggcaggggtttgttcagtttttcgcgcagcgcctggccgccccagggcgccgcctttaacgacgctgccacttttaacggtcgattcatcattagcctcctgcaaatcccctattcgatggaaaacgggctatacgatgaaatacgatagcccgtttacgcgttcatatttgtctgttagcctcagccagttattcctgcccctcgccctcagccggttgctcaggcgtcggcgtttctggttcaggatcagccgagggcgtcggctgggccggtgtactgggagagggctcggctgactgcgaaggcgtaggcgttgccgcaggggcgttgggccccacgcggtactcgccctgtacggccggataccggtccgtatgcagtagcacggtatcgaccttattgccgtccttatcgtagtacactttgtagcccttggcgatggtgcccgtgcggcgctggatgacctgtacgcgctcgccgggtttaagcgaattatcaaccgtcgtcttatcggccggcggatcgatcgagcccaccacttcgcccacggtcttaatggttacgccatcggccagcggtgcgccataaatgtaaatggtcaactgctggttggcaaaactgtaggccaggtagaccggcgtatccttgttgttcttaaatttaaagtccgcaccgccgtagtttacggtggcatccagtccagccggtacgtatgtggatttgatcgaatggtgataccgctcggtcacctccaggtccgccattaatacggcgttatacagggtactggagacctggcagacgccgccgcccggctcatctacaaactggttgccatttttaatggccggcgcagccttgtagcccttggcggtagaacgctcgcccgtagaattattaaaggaaaactcctcgcccggctgcagcacgcgcccctggaaagaatcgcaggccaggcggatattggtgttgcggttgctgttagaggtcgtcgtggtctggtatttgctgaccagctgcgtctgctctttcagctgggccacggtcaccgcgggctgtacatcctgcagcgtcactgcaatgctgccctctttttgctcctggctcagcatggtcttgagctgagaagcgatctcctcccggttgggctccttgcctggggtgccttcctggtactcaaacttcacttcctgatccgggtggaaggccgtcaccttggcatcctgcgccgcaacgccgatgccatttaaagcctcgtccagcattgcgtccagctgcgcctcatcgctcagttccatcggcacggtaatgtcataccccttggccagctcttcgatcttttgcaggcgcgcttcccgctccccatccttgcccagggaaaccgcctcgtccagggccgaggccgtatcaaaggtcagccccgccttggtaaagtctaaggctatatcctgcccgtcatggttgagcttgatcgcaatatccgccaatgtctgggtgttggcctgatcgaccttggcctgtgcttcctcgcgggtcagcccgcccacgtccacgccgttgatgcggatgcccgggtaaatcgtcgtctgggccagcagctcatcctggcgcgccgcctgctggctgctccaccaggcataaacgcccaccgcagcggcgatcaccaccaccgcagcgacgatgatcgcaatcaatctgacgtttgactttttctttttcggcggctggccgccggctttggggcgcacctcaaaaagctcgggctcttcccggctctctgcgcgctgggccggcctgcgggcctcctgctcgggctgctcaaatacctcttctggcaacacgccgcccacatcgtccccatcttgctgcgcatagtccccgccggcagggatatccgtctcctgctccggctgcgcagcgtagggttctccggccggattcaagatccggtcttcctcatttctatcacggttcattaatggtactcctccccgtaaacctcaattcccacactagatatgcctatcataccctattggtataattcggtaaaccaaggacagacaaatttaaccaaaacgtaaaaactttttacaccctgcttacaaatgcgtcccgcacttacgcctgctcgtccaactggttcataaaataggaaagggcataaaggctgtcgcttaagcttacgttctccactaccacgttattcggcgccgccacatcgataggggcaaaattccaaatagcgcgcacgccgcacgcggtcagccggtcggccgtttgctgggcaaattcccccggcgtggctaccaccgcgatatttaccttttccaccgcaaggtagctctctaactcttgaatatcgctgacctgcaggcgccccaccgtctttccgatcaggcgcgggttattatcaaagatggcatgcacataaaatccctcccgcgggaacccttcgtagcacgccagcgcctggccgatattgcccgcgccgataatgatcatatgcttttgctggcccagctccaaaatatcggcaatcgcgcttttcagccccttgaccgagtacccgtagccctgttggccaaaaccgccaaagcagttcaggtcgtgccggatctgcgaggccgtaaggctcatcagccggctgagctggccggaggatatccgcagcaccccctcccgctccagctgcgagagctggcggtaatagcgcggcaggcggcggattacggcgtctgaaaccctttgcttttccatatataccacctaaattgataaacttttaacatactttacaattatagcatctcatttctgcttcggcaagtctgccgcgtcttgatatttgcaaatagcaggcgctttgggtacaataatagaggttgtctgtaatagggatcggggaggttctatgattctattatccgcacaaaatatagataaggcctttggcgcgcaggcgatattaaagggcgcctctctggtggtgcaggaccgccagatcatcggcctggtcggccccaacggcgcgggtaaatcgacgctgctgcgcattttggcgggcgaatctcaggctgatagcggtgaaatcttttataaaaaggagctgcgcctgggctacctgccccaaaacagcgttccgccccaggggggcacggtctggtcgattctggagagcgtgtttgacccggtaaaggaaatggaagggcgcctgcgcgctatggagcagcagatgggggcgctgcacggggacgaaaaggcttttgcgcagttgagcgagcaatataacgcactgctccagcgttttgagcaagccgatggttaccgctaccccagcctgatccaaggggtgctcatcggcctggggttcgatccggagcggtttgaccaaaatgccgccaccctttccggcggccagctcacgcgtctggctctggcgcgcgttcttttgcaaaaatatgagttgctgattctggatgagcccacaaaccatctggacctggcggctacgacctggctggaggattatctaaagggctacggcggcgcgcttttgatcgtttcgcacgaccgctacctgttggacgccctatgtaccggcattgccgaaatgcaaaatggcgctatccgccaatacgagggcaactacagccaatatgcggccaagagcgaggcgctgcaccgccagcaggaaaaggaatatgaaatgcagcagcgcgagatcgcccgccagaaggcgatcatcgagcgctaccgccagtttaaccgcgaaaaaagcatccgcgcggccgaaagccgggagcggctgctcaaccgtatcgaattgatcgaaaagcccaccaatgatgatgagatccacttttccttcgacatccgcaaaaagccgggcaacgatattttgctggcggagggcttggccaagggctttgatcatcctctgttcagcgatgtcaacctccacatccgctctggagaccggatcgccctgatcggccccaacggcgccgggaaatctacgctgtttaagatcctcatcgggcaattacagccggatcagggccattttcgtttgggatctggcgtagagatcggttattacgaccagcagcaggcggatctgaacctgcaaaagactgcgatcgaagagatatgggacgctttccccaagcttaacgaaacgcagatccgaaacgccctggctgcctttctctttcgtggggacgaggtcttccaaaccatcgataccctctccggcggcgagcgcgcccgcttggccctgctcaagctgatgctgcataaggataactttctgctgctggacgaacccaccaaccatctggatatggcctcccgcgaggtgttggagcaggccctgctggattatcccggtacgatcctggccgtttcgcacgaccggtactttgtcaatcacatcgccaccaaggtctgggcgctggaagagggcggccttcgggaaacgctgggcaactatcaggactatctggcgcaaaaggccaaggagacacagccgcagccggaacaggcccctgccgttaccaagaccgaacagcagaatcagcgccgccgggagcgggctgagcgggaggcacgcaaaaagcggcaggcggctatccgggagatcgagcgagagatcgaagaaatggagacggaactgacccagctggaagaggaaatggcccagcccggcgctttcgcagatggcgaggcggcaaaggtgctttcgcttcgctacaatgccctgaaagaaaagattgagcaccgctatctggattgggaggctgcccaagcaaaagatgcgtgacccttcatagcgttttagcgccgcaaacggttgtttgcggcgcttctccatcctctccctagtccacatctgtaagcgttaggttccgctattatatcgccagcctcattatcctatcgccgctcattatttaacggctgctgcggtaaagaagcccgctttgtttttgcgggtcaccaaggatagaaatttacacaaccacatcaaaagggatggacgcatgcgtccatccctttcacacttttattaagcgcctttgccgtacaggccgctttttactttcctgtgcgcgccttgcgaccaacgacgaccacagccatagccgatacagccatcaaacccagcagcagtgccgcgctgaaattatcccccgtcttggggctgcccgccgtattggtgggcgcctcagccggagcgtcagcgatgaactccgcgctcagctccactccgccgccttccggcatcacaaagctgtacacgccatccttgcccgtcagctcctcaccattaagcagcaccttgcccagcgtatagcccgccttgggcagtgccgttaccgtcacggtttcgccggccttggcggtctctttatcgcttaccagcataccgccttcgctctctacgatcttaacgatgtagttggtgtccagccccagtaaagaggcaataaactcaccttgtacaccgccgaacatggctgcgtcatcgccgcccttgacttcccaaaccgtcacctcaggcagtgtcagctccacatcatatacggccatgatcttctctttgatcagcgcattataatcgtctgcaacactctgcttgagcgtctgcatctgttcgtcgctcaggttctgcaatacctcatcatcctgcgcgctgcctgtatattcatgtccaagcagatcggcgatcttcgtaaacaccttgttcgccatgaagtcagctaaaatctcagccatttcctgctgcgtatagccatagccatccagcacaggaagcatcttacccatcatcaagcccgtcataaaatccgcaaaggttcccgcaggaatctcagtgatatacacttcttccgccgtcagccattcttcctcaggaatctcgctatagggatccccaaagtacacgccattgccatcttttccgctctccagcaatgcgcttccgccttcaacggtgcccattaccaccagcttcccgggctctgcatcctcattatccggatctgctttatccagcgagtagacgattgcaccctggccggctatgccggttgctccatcggtattgccaccctttacatctccgccaaccgtaacatcggccttgggcgacatttcaatgccgctgcccgcatatccgttgccgccagcgctgtcaccaccggtcacattgccggtcacttctactttggattgatcccccgcgatcataccatatccgccatcagaatacgaatcgtcatccgaaaccgtatcgcccagcgaagccgcgctgccattaccgccggtcacgttgccatctactttaacgttgctattctcttgtgcaataacgcccgtcccgccttttaaatcagcgctttgcccatcggccgaatcagctacgttgccgccagtcacattccccgttacattaacggtcgcttcgccatcagcatacacaccagcaccctgcacttggtcaatttcaggttccgttacctggccgccggccacattgccggtcacttcggtcttggactgctccgaccctacaaccgcagcgcttccgcccgtcacatcacctttgacagtcacgctggcagaaccttccgcacttgtgccaatctggccaccggatatattaccggtaacctcaacctggctgctttctccagccacaacacccgcgccattcgcgcttacatcgccattgatctgtacggaggactcaccttcggaaaccgtgccgaccatagtgccactcacatcgcctttgacttcgacagatgccttatcgcccgaaacaacgccaatatctccgccgtcaaccgtgccgttgatgctcgtcttggaatttccatcggctatgacaccggcgcccatgctaccctcagattttacatccccgttgaccgttacctgcacatcgtccgttacgcgcagcgcctgggcctgcccatccctttgaacctccgcgttaatctcaacctcgccttcgcctaccaagcgtacatccttcaggatatactcctcgccgttgatcacgtaggtttgtcccttgcctgtttgcaaggctcccaacgtggtgatattacccgtcaggatgatggtcacatccgcatccgtatcggcaaaagccgcctggagtttgtcccacgtgtccacgtcttcgtgcgtggccgcaaacgccgtcgccgggatgagcatcgtcatcaatacagcgatggccagcgccactagtttgcgccttttcatctcttgatccccccacctcatttgttcacattgtgcatggttactttcttattatagcggcaaatgccacatttaataattcctgtttgaatatgctatgaatacgtctagccgttgtatagaacccaatctttaactatttatacgaaatagatgcgaccccttcagctgcagtttataggtattgcttagcgttattgtttaagaaaatagggtgagaaattaattcactaacagtataaaacaaaaacccttggcagacaagctattcatcttaatttagtcatttttcgccatttttattcaatattcaagataaactaaaaaggcccctttcggggccttgcacacacgaggtcataataccgcgtagatcaatatgcctgccgcggcgctgatgacgatcatgatcaccgggtcgaccttgaacttgaccatggcgatcagcgaaaccacgcaaagcgcaaccgccttccagtccaccgattggaggacattttgtagggtaagcgtcacctctgggataaagagcgccgtctgagcgatggtcacgatggaggtggcgatcagcgccatgacgaccgggcgaatgccgtagagtacatagcgcacacccggtacatgttggaagttgaaaaagaacttggcgatgatcagtacgataatgaccgaaggcaacgttacgcccaccgtacagcagatagcgcctaccacgccggaaacgcgcatccccacaaatgtggccgcgttgatggcaaaggggccgggcgtcatctgcgagatggccaccacgtccgccacttcctgcaccgtcagccatccgttggctacgatcagcttttggatcagcgggatcatggcataaccgccgccgatgctgaacgcgccgatctggaaaaagttccaaattaagagcagcaatgtcattttttcgcctccccttcagcctttttacctctgcgggcccgcaccgtgccggcgataaatccgaccacaccgcctacgaggatcaggtagatcgcattgatatccagccagagcacggccacacaggtgaccaacgccagcgcccagcacagccaatccaccaaagccggcttgcccagcttgatcacggcggagatcatcatcgctaccacgcaggcgcgtatgccctgcatcgccgcggcgacgtaggtattggcgataaaagcctgataaaaaagagagatgatcgccaggatgatcagcgaaggcagggacgcccccaaggtggaaagcagcgcccccggcacccccgctaaacggtagccgataaagatcgaggcattgaccgcaatggcccccggaacggactgggagatcgccacgatatcgatcatctcgttttcgttgatccaatgccgcttttccacgtattccttttgcatcatcgggacgatcgcatagccgccgccaaaggtaaacgcacccagcttgaacatcgccaggaaaagcgtccagagcagctttttatcccgctttggcaactggttttccattcctttttccaaactcccatctcccaacgtttaattattcatccactcgcagccacttgcccaggaagtcgtaactttttgcgccgctgatggaatgtcctgcgtcgaaaatatcgatgtccagcttatcccgcgcgcccaaaaggctgtaggcgcgcgccagctgatcaaagcaggtctgtaccccttccagagggaatagatcatcctgccgcccggcctccagcatcagcggacggggggccaacagacccaggatatcatacatctccccgcgggtatataaatccggcacaaaattgtcgatgcagtggtacacgcttaaaatcgaatgacggaacgtgcagcccgagcagctgatcacgttggcgcgcagccgtccgtcgatggccgcggcatacatcagcgtggttccgccgccggatatccccatagagccaatacgcgccgcatccacaaagggcagcgtttccagataatccaggctgcgcatcacatcccgcgcccgcaggcccgccatggtcttgcccatcattaaaaggttggtgctcatccggtagcagctacattcgtcagggcccttttcgatgtccgctttgagcctgcgcagtccaaagcccaacatctccggaaccagcaccacaaagcctcttttgcatagcgccacggcaaaatccttttggtacccctcgccgatggcgcgcggctccccttccggcgtcaggccggcgatctcggtcatccccgcgccatgcccggccacacagaccaccgcaggcatctgctcctgggccgaatccggcaccagcaggtaggcgggtatacgcatgccatcctccccagagtagctgaccaggatctggcggtagccatcccgctgcgcctcgtcatgcgtctggctctccagcgggccgtattgctggggaaagccccgcagatcccccagcaaggtacggataaaatccgcccgccaggagatccagtgcgccttattgcccagcggcatggcgaatgggtgcggccgccgctcatagcatgtttcaaagtaacgatccatttccagatccatcatatgctttgcctccttaatcgctgttcggtccgcttagtatttcgaccctgtaaccgccgcatacatcggcgatccagacggccggtaaagcatcctgccgctgctgcgccttcatcaccagctgcagcggcacatagggtttgccgaccaggcgcaatgcgcacccgagtatttccagccgccccgtgctatccagcatgccgatgccccaaccgtccaccagcggcagttcaggcaccaggttcgtctcctgggcaaagccctccaggcccgcgatctcgtaacgcagcaggtctaccgtccacaccccgtctttcaagacggattcgatgcgcacgcgcggctgctgatccggcagcgggtctgcaccctgcccgtgatggatgcaaaagcccgcgcccagggcccacaacctgcggcgcaccacgtgcaacgaaaaggcgttgcaatccatccccaaaaagcggcggcccagcctgtgcgccacagccagcgccgtgccggagcccgcgaacagatcgcaaacgatgtcccccggctgggtcgtaacggcgatcagccgctcgatcaaagcctcgggcttttgggtgtcatagcccgtgcgctcggggtctttttgctgcagcgcggcgatatcctcccatacgtcatccgggtaaaccggctcatcttcataataaatgtacttttttccgccggatttgatggagtaaaacacccggccctgctcatccacctctttgcgcatatggttgcgccgctgccgccctcgcggcgtgcccagaggctggatatcgaaaaaatgttgtagaccttttcggtaaaaaaggatattatcatgtttgcgggagaaaaagtttttggcacggccgccgcttttgtagtgccagatgatctcgtttaaaaagtgatccgcgccaaaaatctcatcgagcatcatccgcaacggtacgcccacctggccatccgtatgcaaaaagatgacgcccgtatcgctcaaaagttcataggccagctccagcgcccgacgcatcagtgccaaaaacgcctcccggtcctccaggctctcccgatccaccggatagtttaaagtaaaggcccggtcgcccttccagcctctggagccgatgcgctgagtatactccgcacgctggggcgccggcaggggcgggtccaggtagatcgcctgcaccttgccccggtattgttcaaggatatgcggcggcaacccgcattgcaggtcgccaaagacgaaatcgccatccgccccccggccgatctgttcgattttaagtttgccctgcgcgtttgtcgccaaatcccttcgcctcctaatgataaaaccgacccataaaggagccatgatctcatgaccaagcccaatcttgaaacgctaaaacaagcccgccagctggtgcaggccgttacgcccctgcagggggattgcggccttgtctgcggcgggcgctgctgccagcccggcggcgaggatgcgccgcttggcatggtgctctttcctggggaggagcagctgctttccgcctgcccggggtacgaattttcgcaggccaactggcgcctgggcgatgcgctggccacccttgtcgcctgctctgggcattgccgccgggaaatgcgcccgcttgcctgccgcatctttcccctggcgatttatttagatgaagcaatgcacttaaagctcatactggaccccgccgccaggttcatctgcccgctgtgcgccagcggccttggcgggctgcaaacggcctttcgccaggcggtggccgcctgcgccaagcgcctggtgcaggaccccgtgcaacgggattttatctatgccctgtcccgcaggatggaccagctacgccaggaccccttttaccgtttggccccttgaaggggcctgccgctcttgcccattattatactgcatcaaacgttttttttcaccttttttctgcaacctatccttcacggttgcaatccggttctatcgccgctataataaaggctactatcccagagagggggactaacacgtgaagttgtggatcatcttccgaaaaaagcataaaatcgcccgggattatattttggagagcgataaaagcgacgcccaatggaaggaagttttaggcaaatttctttcagaaaacgattatgcgcgcccggtgtttctcagcaaacacgataatgaaatggcgcagtttttccgcacggtttttaataaaaacgattttattgaatcttttgattacgacgcgatggaagtggaattcgtccgggataaaaagaaagaggacgaacggtaaaaccagccattgccccagcggtacataaccttttatcggcctggatataatagtttcaaatcgataaaaggagtgaaagcaatggattttgtatcgctgctcttggtcatcattggtgcgataaactggctgctgatcggtttattccaatttgacctggttgcgttcctattcggcgggcagggagccctcgtcagccggatcatctattcgctggtcggcctggccgggctttggagcatcagcttctttttccgccaccgccaccatgtggactgatcacagatcgcaaaaatcccttaagcaatatcgcacaacgagtaacaaaagcgcacgaaattcgtgcgcttttgtagtacatgcgacctattttgattaaaaattgtttattgcacaatatatttattgcatagcaaaaaatgcaagtgtataatgtttctgtacagtatgtctgactttttcaacaacatttccgtatctccaagtcttctattgtgttgatttctgttagactgctgtaacaaaaattgaggggattgacaacttatgcaacgaggcaaactattagcgctccttgtcgctctggtattgctcgttctcatgcccaccacggcctttgcggctacgcatgagaatgtggatacctgggaaaagctgcaggccgcattcgcggacacagacgcagatgtgactatcatcctgacgggtgatattacggctttaagcgatctggaggcgaagcttggtcaaactttcgtgatcaacgggcaggcctatacccttaaggatgtttccctgtacggcgccggttcggtggagatcaacgccgcgttatccaacgagaataatgacgatgctttaaaggctggtgggcaggtccaggtcaccgtcaacggcgatgttacttctgactatgacggtatcagcgctaacggagaggccggggtgaccgtcaacggcaatatcacggtagaggaagacggcattgaagcccaggagagttcgaatgttacagtgaacggtaacatcgcgggcgaaagcgatggcgtacgtgcttttgacgaaagtaccgtaaccgttacgggcgacgtgactggtaaagaagatcaaggtattgaagctggtgacaaggctaatgtgactgttaccggaaatgtttccgctggcgatggcggtgttgaagcggaggatcaaagcaccgtaaaggtcgacggcaatgtcaccggcggagtagtggcgtctaatgattccaaggtgcatgtgacgggcgacgttgccggtgccagcggcaatcctgacgaagtagacatggctcatcctaccgattattccgacggcgaaactggcgtgaccgccaaaaacaatgcgcaggttacggtggacggcaacgtcaccggtggcgacgcttttggcacctatggctatgcgggtgacggtgttgaggcccgcgatcaatccaacgttacggtaggcggcaacgtttccggcggcaacgttacggctgacccttctgtggacgcctacgagtatgatgaaggagaatatgataacagcatcgcaggcaacggcgtggtgatggacgcaactgccaacgttacggtcggcggcgatgtgactggcggcgccaccaatggcgatcatggtcaggccggcgagggcgtggtcatcctgtccctgaacaaaaatcatgtatctggtgatgagcaagatcctgataatatgcaagaagaggcaaagcccggcaagttggtggtatacggtacggtcagcggcggcaatgcgctggccgagaacgggcaggacggctcgggcatttattggagctttagcgaagacaatgatgggccaagcgatggagactttaatctccccaccgatatttgggaaaatactcctgttgcggtggttatcgatgcagtgcgcaacaactttgaaggcttttattatacctatggctttacctttgagcagttccaggcagcccttgatgctttcgagcaggatacgctgctgcctttgatcaacgcggctaccggcggccaggccgataacctggaagatgcgttgactgcagtggaaaacctggatgcggaggcggccgccgcattgaagctgcagttggtcaacgcctacaatgcgtatcttgatgatgtagcggccaagcagattggcgacaatatggtattgcccgaggtcactgtttggcaggtcaaatccggcgacgagcaggcgcctctgttcgcttccagctttagcgatgagatgaccgacctgctgggcgcggataccaactatatcgtgcgcgtgttggattgcgaaaacggccagttgatcgccgataaggctaccgccaaggctggcgagacggttaccctgatccccaaggcaaatgatggttatgtactcgatcaggtcctggtcagcggcgtggcgctggaggcggtggacggcgtgtactccttcatcatgccggagggcggcgggatcgaggtatcggctacctttgtggccgaagcaccagcggaggcccccaccaatacggccggcagccctcagaccggggatggcttccaggcagcgctgctgctgggtctgatggctgtttccgcagccgcgatcctggtagtccgccgcaaggcgcagaccaaataatcgtaacggtttgcaaagcggggcgcaataagcgccccgctttttattgtactacaggcatttactttatcccgccaacgcgtctataatggagccaacaggaggtggcaaaaatggaggttttcaagcgcgcgggcgatgtggaccggtacctgatccgcctggatcagggagatgacgtactggggagcatcaatcaggtgatccgcgaaaacggtattcgggatggcgccgtggtatcgggcatcggcacggtatcccatgcggttttgcacatggtcacgactacgggttacccgccggtggaaaaatatcccgtttgggaggatacggcgctggaagtgtgcgccatccaaggtatgatcgccgatggcgtcccccatctgcacgcggttttttcggatgcggaaaaggcggtcggcggtcatttagagccgggctgcatcaccctttacctgtgtgaaatcgtgctggaggcctggaaaagcccgtcgcttacccggcttaaaaacgataagggaatcaatgaattgcacgaaaagccttaatcatttgataataaacaagagcgcctgtacttaaagcaggcgcccttgttttatcctttgtacttatccggcagtattttttcacatagtaggataccgatgctttacgcttcccactaaaaacatattctcttgcctggcctcacttttccgccacgatggctacccactcgtctttgaccagttgttctttaaccgttagcccagctgcgcggatggcctcgcacacctccaccgcccggtccttaatgatgcccgaggcgatcaggcagccacccggggccagcttatccggcacgatcttggtcagcccgataatcacatccgcaatgatattggccaccacgatggggtagccctcccctacctcttggatcagcgctttatcctgcaaaatgttcccgatcttgaccgtataccggtccttgccgatcccgttcatcgccgcattctcgtaggcgatgtcctccgcaatagggtcgatatccacggcggtggcgtgcccagcccccagcagcagcgcggcgatggagagaataccgctgccgcagcccaggtccagtatctgcatgccgggcttcacccgcttttccagggccattaggcaaagctgggtggtctggtgcgtgccggtgccaaagaccatgcccgggttcatctccaaaacgatgcgtccctcgtcatccgccaccctttcccactcgggcttgatcagcaggcgcttgccgatgggcaggggcttataatactttttccagttattggcccaatcttcctcgtgcaccttttgtacttccaccatcagttcacctaagtccacgcccacatcctgcccctgcagccaggccatgcggctgcgcaccttttgcagcgtctgctccccatccgcgctatccggcgcgtagatgcgcacgcagggccttccgtccccctgctgcaaagccctggggtcggcaaaatcccactgttcggatacctcctgcaaaaattcgccgatctgctcagccccttccagcaactctacctggtcgatccctacggcgctaagcgccgcgcagaccagatccatgccctgcgcggtggtaaaaacagatattctaagccaatccatcaccgtttcctcctctttagcgattcctatctattctatcatatgcaagctgcaaatggggttaaaaaccatctgctctgcctgtgccctccatttcagcgcttaatcccgcttcatatacaaaatcgggtacggattgccctgttcatcctgctccgtcctgtcgtaaacgtaaaagcccatgtgctcataaaatccctttgcctgcggattttgttcgttgaccgtcaacgtgtggatcgcatggtgcgcaatgccgtattggagcagccttttcccaatgcccttgcccctttcttccggcgagacgaacaacatctccagtttttctttttccagccccataaatgcgaccggtctgcccgcctcccgctctgcgatgaacagatgcgcgatgccgttcaacgcctggggcacaaattctcttatagccactatctcaccctctgataagaataaatgtgttgcccggaccgaattttcccacacttgcaataattgctctatcaataatggctttctctctctgacctccaggatcctcaccatgtatttttcctcctttacccacttccaccgattttgattataacatagcgccctgccaattgtccgctctccaggggcaggtttcgcttatgcgctctttccaactgctcgcttttcgtattttcataaaaaggtgtgcggcagatgtatattttgccaatctttacaaaagcttgacattgtcaagaaacgttcttgacagaaaacctttattgtaaaaaccgtgaaacagagataggaggaaaaacaaatgagcatgaaaaaaattgcggcgcttgtggccgccgcggcaatgttcgccaccttgggactgacgggttgcgcttccaataacgatacatcttccagcgcttccccctcttcttctgctgccggctccgcttcttccggtgcatcgagcaacgttaccttgaatgtgatcggttccacctcggtcgagccgctgatgaccgccattggcgataagtacaccaatgaaaccggcgttaaagtgcaggtacagggcaatggctcctccgccggcatcaaagcggcgcaggacggctctgcggacatcggcatgagctcgcgcgagctgaagcaggaggagctggattccggcctcgaaccccagaccctggcccttgacggcatcgcggtgatcgtcaacaccaaaaacccggtcaagaacctgacggtcgaccagatctccaagatcttcaaaggcgagatcaccaactggaaggacgtaggcggcaacgatcaggagatcctgctggccatccgcgaggcgggcagcggcacgcgcgacgcctttgaagagctttgcagtctgaccgagaagcagggcgacaaaaccgtatccgtggtggacgagagcaaggccatcgtttcggattctaccaacgccctggcgcagaacgtttcctctaaagaaaacgccatcggctacatctccttgggttcgctggacgccagcgccgtaacggctctggaagtggacggcgtggcctgcactgaggagaacgtacaggcaggcacctacaagatctcccgcccgctgctgctggtcaccaagggtgcgcccagcgcggatgcccaggccctgatcgactacgccatgagtgaagaaggccagaaggtcgtaactgacaagggcttcatcctggcaaaataagcctcaagaaaggtacgaaaaatatgcgcggccgaaagtttaatcaaaaagcggtaccggcggtggcggaaggtttcttccgcctttgcgcatggatatccctcattgcgctagccgtcatcgtcatcttcctcatcatccaggggttgcccgcgttccaggagctgggccttggtcccatcctctttggcgatacctggaaacccagcgccgatctattcggcatcgcccccatgatcgtggcctccttcctatgcaccgctggcgcggtgctgatcggcagcctgatcggcatcttcaccgccatgtttctggcccaggtagccccggcccggctggccaagctcgtccgcccgctgaccaacctgctggccggcatcccctcggtggtcttcggctttttcggcatggtcgtgctggtgcccctgatcagccaggtctttggcggcacgggtaacagcgccctggccgttatcatcatcctggccgttatgatccttcctacggtcatcagcattggcgaaacggcgctgcgtgccgtccccaaggagtaccaggagggcagcctggcccttggcgcctcccccatgcaaacgctgatgcgggtcacccttccggcggccaaaagcggtattttgaccgctatcgtgctggcggtgggcagggccatcggcgagaccatggccgttatcctggtggcgggcaaccgagcctttttccccacctcgttgctggaccccgtccggccgatgacggcgaatatcgccttggagctgagctacgcctccgggctgcacgagcaggcgctgtacgccaccggccttgtgcttttagccttcatcgtcatcatcaaccttgtcgcccatcggctggcgcacggaaagaaggataaatcatgagcacgcaagtcaaagaccgcttggtcaagtttatcatctgggcctgcgccatcatcacgatcttatttctggtgctgctgctggtctacgtcatctcccggggcctgcccgccatcaactgggaatttttaagtacggattacaagcccggtctggacttaaacggcatcgcccccatcatcggcggctcgctgctgctgatcggcctgacgctgctgtttgcggtgcccatcggcgtgtttgccgccatctacatggcggaatacgccaagggtgggcggggccttaccaccatccgctttggcgtcgagagcctggcgggcatcccctcgattttgtacggactgttcggctatacctttttcgtcaccttcctgggctttaagatgtccctgctttccggcgcgctgaccttaagcatcatgatcttaccgctgatcatccgcaccacagaggagagcctgcgcaccgtacccatcagttaccgggagggcagcttggcgctgggggccaataagctgagcactcttttcaaggtggtgctgccctcagccatccccggcattttggccgcggtgatcctggccatggggcgggtgatgggcgaatctgccgccgtttactacacggccggtacggtggcccaggtgcccaccggtttgggcgagtccacccggtccatggccgtacacctttacctgctggctaaagaggggctctctcaggatgaagcttttgccacagccacggtgctggtcgtggtcatcgccctgctcaacgccctggcctcctttgtggcctcggcactgcgcaagcggctgaccggcgagccggtgttccgtcgccgcaagaaacaagtttaaggaggcatcgccatgaacgagcaaatcggcagcaacgttgccatcatggaagctacaaatctggatttttattacgggcaggtgcatgcgctgaaaaacgtgaacctggccatccgcgcccacgaggtcactgcgctgatcggcccttcgggctgcggcaaatccacctttttaaaaaccctcaaccgcatgaacgatctgatcgaggatgtgcgcatccagggcaaggtcacctttgagggcgaggatatttacgccaagggcacggacgtggccctgctgcgcaagcgcgtgggcatggtgttccaaaagcccaaccccttccccatgtccatttacgacaatatcgcctacggcccgcgcatccacggcattaaggatcgcaagcgtctggatgctatcgtggaaaagagtttaaagggcgccgccctgtgggacgaggtgcacgaccgccttcgcaaaaacgcgctctccctttccggcgggcagcagcagcgcctgtgcatcgcccgcgtgctggccgtggagcccgaagtgctgctgatggatgagcccaccagtgccctggatcccatctcgacccagaaaatcgaggatttgatcgtagagctcaaggagaaatataccatcgttatcgtgacccataacatgcagcaggccggccgcatcagcgataagaccgcgttcttcctcaagggtgagatcatcgagtccggcgaaacggacgcgatcttccagaccccgcgggatcagcgcaccgaagattacatcaccggccgttttggctgatttttcagcgattttgtagaataaagaaggagtttaaccatggtccgtttaactttaacccatgatttagatcagctccaccaggacttggtggaaatggccacccgtgcggaaaccgctattgaggaatccatccaggcgttaaaccggcaggacgcggcgctggcccgctccgtcatcgccggggacgacgtggtggatgaactggagcgcgccatcgagcaccggtgcctgaacattctggcccggcaccagccgctggcgcgggatctgcgcgccgtcagcgccgcgcttaaggtgatcaccgatttagagcgcatctcagacggggctacggatattggcgagatcgtgctgcgcttggccgggcaggcatatatcaagccgctggtggatattccccgcatggcggagctggccacctccatggtgcgggattccatctctgcgtatatccaaaaggaccagcacctggccatggcggttaccctgcgggacgacgagatggacgccgcctttgagcggatcttaatggaactgacccacatgatgcgcgagcatcccgagagcgtggcccaggcggtggattttctgtttatcgccaaatatttagagcgcatgggcgaccatgccaccaacatcgccgagtgggtgatctacctggtcaccggcgtgcacccccaggataaggagctgcatgagacggcacagcaggagctgcccacgcaggaacagtaaaccgggcttaaaggagcgttgctatgaaagaatggatcgccgtggtggaagatgagggcgctatcgcccggcttttgcagatcaacctggaagcggcgggttacgaggtcgccgtttttcaaagcggcgaggattttctcccccgcctcaaggcggattggccggatctgttggtgctagactggatgctgccgggcatggatggcctttcggtctgccgccgcgtccgggagatacccgcctgcagcacgctgcccattttgatgctgaccgctaagagcgaagagttcgaccgggtgctggggctagagatcggcgcggacgactatatgaccaagccctttagcctgcgcgagttgctggcgcgcatcaaggcgctgctacgccgggcgcacatgcagcccgcctctacagaccagtggctgacatacgggacgctctcggtcaacctctcccagcatcaggcctactgctcggatacgcagctggagctttcccccaaggagtttgacctgctgcgccagtttttggagcatcccacctgggcccagtcccgggatcagttgctggaaaaaatctggggatttgactttacgggcggcacccgcacggtagatatgcatatcgccaacctgcgcaaaaagatcgtagaggcctgcggggaggattgcatccagaccgtgcgcggggtaggttaccggctgcgcggcgaataaaggcgtaaaaaagagggatcaccatgcgcaaaaaactgtttatcatgacgatggccatcgtgctcatcgtcaccttattttccggaatcttcatctcccttagcgtgatgcggctggaccgggacgctgccgccacccgcatgaccgatcaggcgcgcctgatcgcctacgaggccggaagccttgatgcggccgcgctgccggaaaaaattgaaagttgggcagcccagctcaatgcggcggacggcaatccggatatcccctatcgcatcacggtcatcgaccggtccggcgccgtactggccgattctgacgcggtggccggagagatggaaaaccatttgacccggcccgaggtgcagcaggccctacagaccggccagggggccgacctgcgctttagcgagactgtgcgccatacctttttgtacgtggccaccgccacgccggacggttcgcgcatcgtgcgtctagcgatcctgatggatgagctgcgccgcacggaaaacgctattctgctttggacggcgctcagctgcgtgctgggtctggtggtagcggtgctgctgagcatccccttaggctcgcactttatcgcccccatcgcccggctgcgcaaggctacccgcgccatagccgacggggaatacgaccatcgcgccccagcggaggcggacgagattggcctgctggcgcaggattttaacgggatggccgcgcagctgcagcgggtgattgagcacgagcggctgcaaaacgcccagttggactcgatcctgcaaagcacgcccgccggcatcatcgccatcgaccaagccggcggcatcctactgatcaaccgggaggcacagcgcatctttgctcttcatcagctgccgccccttcacgccccgttaaatgattgggtgcgccgtcccgaggtggcccagatgatgcacgagaccctctcccagggccgcccggattcacgggaatatgagatcggcgaaaaggcattggcgctttacaccgcccccatctttacccaggagggcgcccccgccaccggcgccgtgctggtatgcgaggatatcaccgctctcaagaagctggagcagatgcgcacggaattcgtatccaacgttacccacgagctcaagaccccgcttacctctatccgcggaaccattgagaccttgcgcaccatccgccccatggacgagcaactgcaagaggagatgttggagatcatggacctgcaaagcgagcggcttcaggcgctgatcgacgatctgctctccctggccgagatcgagcacgataaggagatcggtgaggaaacctgcgacctgggcgagcaggcttctcaggccgtttccctactgcgcagccaggcggaaagccgcaaggtttccctctccctcacccttgaagggcaggcaaccgttcaggcccctgccggccgtatccggcggctggtgatcaacctggtggataacgccattaagtacaaccgtgaaggcggctctgtaaaggtacaggtcagtcccttgggcaaccgggcgcgccttatcgtcagcgatacgggcatcggcatcgctcccgagcatcagagccgcattttcgagcggttctaccgggtggataagggccgttcccgcgagatggggggcaccgggctgggcctttccatcgtcaagcatctggtatcgctgtacggcggggacatttactttaacagcatccagggcgaggggacgacctttacggtggagttgccactggttggcaaccggtaaatacacccgtcatatctgttttacttagaacaaaaggctgggcgaaatattcgcccggccttttgcgatctatattgcgttttagatctatattgcgttttacttcgggtcgtaacagccgtggtccttggcgcgatggtcgttcattacgctgtcatacagccgccagccgcccgagagattatagcagtcataccccatcccggcaagcatccggcaggcgatatagctgcgcagtccactgtggcagtgcacgtatacgggcttggacggatccaattcagcctgcgcccgctcccgcagctcatccaccgggatgtgcataaatccttcaataaagccgcgcttgcgctcggaggccgtgcgcacgtctagcagctgcacgctgccgtcccgcggcaggttctttacatcgtgccagaagaagtttttcaccttgccggtcagggtattctcgatcacataacccacaaagttcaccgggtccttggccgagccaaagggcggcgcgtagcaaagctccagctctgtcaagtcataggccgtcatccccgcgcggatggcggtggccagcacgtcgcaccgcttatctaccccgtcaaagcctacgatctgcgcgcccagaatgcgccctgtacccttttcatacagcgtcttgatgctcatgccgtgcccgccgggatagtaagcggcatgggaggccgaaaaagtgtaaaccttatcgtaattcagccctgcggcctgggccgatttttcgttgaccccggtcatcgccacggtcatgtcgaacaacttgagcaccgaagaaccctgcgtgcccttatagcggctctccagtccacagatattgtccgccgcgatgcggccctgcttgttagctgggccagccaggggcacgtagcccttttccccggtaacgaagttgacgatctcgatagcatcgcccacggcgtaaatatcctcaatgctggtgcgcatcctgtcgtccaccaaaatggcgccccgggcattgcaggccaggcccgcttccttggctagcgccgtatccggcctcacccccacagagaggatgaccatctccgcctccacggtgccgccggtaagggctacctcaaggccgccctgcgctttgggggcaatcccctccacgcccgcgcccaggatcaggtttagtccctttttacgggcgtaggtgtgcacatcgcaggccatatcgtaatccaatggggcgatcacgtggtccgccatttccgctaccgtcacctgcagccccagcgccatcaggttctcggccaattccaggccgatatagcctgcgcccacgatgcaggcggtcttgggctgatgctgttctacatactccttgatcttttcagtatccgggatgttgcgcagcgtaaatacaccctcaaggtcggtccccgggataggcggcaccgctggcgccgcgccaggagagaggatgagtttgtcatattcctcctcgtaatctccctgggcggtgcgcacgcttacctttttctgcaccgggtggacggcgatcacctcgctgtttacccgcacatccacgttaaagcgggccttaaagctggcaggggtctgcagcgtcaaatcgcccttttccgcgatctccccaccgatatagtaaggcaggccgcaattggcaaaggagacgtactctccccgctcaaatacgatgatctgcgccttttcatccagcctgcgcagccgcgcggcagcggaagcccctccggccacaccgcctacgattaatactttcatcacatgactctccttcctattctcaagcggaaaaccgctgttgtgctcatagttggggcgcgcgccaggcaaagtgcaacgcgggcgatagcggatcctcccccggcgctaccgttttatatgcggcggcaatgcccttttcaaagaagatattgtcaaaaaagtccagcatcacgcccgcatcctgcgcggtaaacccatggccaccctcccggtagtggatggcgtttttaccgcccgcacccaaaaagcggtagacctcctcggccgcgcgccaggtaacatacgtaccgtaggggttggcgtaaatatcgtccagcgcctcggtggtgatggcgggccggggcgccaccagcgcccgggcgatatgcaggtcaaagggcaggtagtcctcccggcccagggcgcgcgtcccctgctggtcgccataggctgcgcccagatcctccaggaaccagaaccagaatttcgacgggcggatcatatcccccaggctctcgtacaggcccgtaccctcgcccatacgcccgcccataaagcggaagcatccaccgcctccgcagcccgaggcgctgatggcgcagatggcaaagcgctcgtcattggccgcggcgcacagcgccaccttgcccgcccgggagcagcccgtggtcaccagcttttgcgcatctacataatcggtggtgcaaaggtaatccgccacccggctctgcccccaggcccacatggcgatggccttccaggtgtagcccggatatgcctttgccagggggcaggcggcaaacgcctccttcgtgatggcccggttttccatcccgctgtccggcgccaggtcaaaacagctgtactcagccagcacatagccccgtgcgatggccttctcctcatcgggaaagggcgtctgccggtcaaatgccgtgcggatgaccgccggaaaacgccctggccggttgggccgcaggatcttggcctgcagcgcgatctccccttgggggccgcaggtgatgcgcaccgtctgccgcagggccgcgccgccaaaagctgcctgcgtttccaccacctcgcccttcgtattgcccggcggcggcggtatggtcccatagagcatatcctgcagcatctttttccagtatgcccgctgggccggccactcctccggccggttcaggcgggtgccgtctggccggataaagggatccggcagctgcgcgcagggcgcttttagcgcatattgcgccatccatctttcttccatcctcattccccctccgtttatcctgctgggcttatatggccctggcaaagggccggccctaatctgttactaagattataacactttttgccgattatgcaatcgtcctttcaaattgcaaagacataatttgccaattaatatggcgccagcatggcgatgccttatggcgttcaaattcacctgcgacaccgttagattctttctgcatgaatacgatatgcatcttgcttttctcccttatccttggatataatgaaacggaaaggtttggtgataacatgagtcagaatcctctcatcctgatctgtgacgatgatcccgtggtacatgaatccctgggtatctacatggatgcagaagggtattcgcatatttccgcctacgacggcgaagaaggcctgcgcatggtacacgaggagcatccggacctgatggttctggatctgatgatgcccaagcgcagcggcatcgacgtatgccgcgagatccgcacctccagccagctgcccatcatcatgctgacggcgcgcagcgaagaggtcgaccggatcctagggttggagttgggcgcggatgattacatcgtcaagccctttagcccccgcgaagtactggcccgcattaaggcagtgctgcggcgcatcggcgaaaacggcaagcgggccgctaccgagattttgacctttgggccgctggagatcaacctgcagcagtatcagatcaagctaaacgatcaggtcatccccagcacgcccaaagaggtggaaatcctccatctgttggcctcgcagcccgggcgggtgttctcgcgcgagcagatcctctcccaggtttgggggtacgattacttcggcgatacccgcacggtggatacccatatcaagcgcatccgccaaaagctgccccagaacaacgtctttagcattttgacggtgtacggcgtgggctataaatttgaggttctcgcatgatacgcagcgtttttttaaaacgaatcttaggtctggtgctggcgacgatactcgtttcctttacattgacagcttcgttttatttcttcgccgcaggaaacatatttacacaaattaaagcgcgggagtttaaaccccgcgctcaaattattgcccaaatgacggtggaatacctggacgggcagttcagctatacggtgtttgaccggatgctgcgctcaaacgatgcgggctgggatgcgcgtatctgggtggtggacagcagcggacagctgatcatctcctcccagccggacctaagccaggtctttgccgagcgatttctgtcggccatgtcctccgaggtggagcagaccctctcgggagaggacatcctctttaccggcaaccccgccggcttttcagagagcatgctggccatcggtattcccgtgcgggatgggagcgaccaggtgatcggcgcagtgctgctggccaagtccatggacgagatccagtccgccatgggggacttaagcaaggcgctgatcatgagcacgctgctggtgctgtttttcatggtgccggtcacttaccttttctcgcttcacctggccaaacccatctatcaaatgcgggatgtggccttggccatggcggggggcgatttttccgcccgggcggataccgttaaaaagggcgagctgggcgagctaggcgcctcgctcaaccatatggccaccgagcttggcaataatctacgcgccatgacggtagagcgcaaccggctgatgcagattttaaacggcctggtggaaggcatcgtcgccgtggacaacaccggcagggtaacccattccaacgccgcgctgctggggctgttccataacgaacggcgtaccacccccatcccccgccatctgctgattccgctggactcagtatggcgggatatcaccgccgtgatccgggataaccagaccattgagcgcaatatcacctatcaggatatcatcatccactttagcgcctctcccttggccgacgagggcaaccgggtggccggcgcggtgggcgtttttcgggatgtgaccgcccacgaacgcctggagcagacccgacgggattacgtggccaacgtttcccacgagctgcgaacgccgctgacctccctgcgcgggctggtagagccgctcaaagaggggctggtcaaaaacgaggcggataagcagcgctacctggatattatcctgcgcgaaacgctgcgtttgaaccggctggtcaatgacttattggagttgagccgcctgcagtcgggcacggcggccatgagccggaatatttttgatccttataacgccattgcggatgctaccgagcagtttatcagccaggccgaagataagcagatcgccctggagctgcagctgcccgaccccatgcccaaggtttttggcaatccggaccgggtcgaacagattttggtcattcttatcgacaacgccatgaagtacacccccaccggcggtaccgtctgcgtgcgggcggtagaaaagccggaatggctggaggtttccgttagcgataccggcgtgggcatcagcacgcaggatctgccccacgtgttcgagcggttttataaggtcaataaggcccggggcaagaccggaaccgggctgggcctggccatcgcctacgaggttatgagcgggctgggcgaaaagatatgggccgatagcgagccgggaaagggcagccgttttgcctttaccctgcactatacgcaagagcagcccccggaagcagaataaggaggctaagcaaaagcacccgccgggaatttccggcgggtgctttttgctcctcgattgtttgtgctaacctccatgattttttagcgcaatcttaatgcaccagccatatttccttcaccttctccccttatgataggtgcaaataagaggagaaagaagggcccatcgtgttttcagattcacaccgacaggttctggtttttgttaccgatcagttttgttgcgaggcgttgatccaccgcgggcaccagctcgccctgaaaaaccacaccagcctggccgtcgtatctatccagccgaaaagccgtcccgccaagggcaatgcgcaggctctgcgttacctgcgccaggtttctaaaggctaccggaccgatatggcgatctgctaccatgacgaccccattgcctgcgcctgtgcctatgtggaccgggccgatacgctggtgatcgtgaccggcgcgcccaggggctcgcgctttactcaggcgcttgcggcccggtatcccgccgtcccgctgatagccgtgcaggcgccgccgctgtcgcgcgcgttcgcgcagcgtccctttgcccaccagcgcttgggccaggtcgttcgcgccctgtcctaaagcgttctaccctctctaacaagggccgttcctctgcggggacggcccttgttttcatgtttgcaatatggtacgatacccccgtggcgcgtctttccggccacaaaaccgtaaaaagggggatacgctatgcggcggaacgattggctgctggccggggcgacggtgctgaccgcccttggccttatgctcgccttttttctctatccccagccaaccggtcaatgggtaaccgtcgccgcagaagggcgcattttcgcccagtatcctctggcgcaggacgccacctatcgcattgaaaccgcgcaagggtataatctgttgcagatcgaaaaccgccaggtaaaaatcgtacaggccgactgcccggatggctcctgcacccaccagcagcccttgggcgaaaacaggggcggcagcatcgtctgcctgccacaccatctggtggtgaccttagatacgcaagaggagggcgggatcgatgcgctggtccagtaaaaagggcgccccgccccgcccctattttaccgcccggcggatcgccacgctctcgctgctgctctccctctccctcattttggggtatgtggaacggctctttccactggatgccgccattccggggatcaagctgggacttggaaacctggcggtcgtgctggcgctgtacctgctggatgcgcccagcgctgcgctgctctccctgctgcgggtggggcttggcgggctgctgtttggcaatatcgcctccctggccttcagcttctcgggcgcggtgctcagcctgatctgcatgctggcgctcaagcgtacggactggttcagcctggcgggcgtttccatggcgggcggggtctgccacaacgtcgggcagctggggacggcggcgtttttcacccaggtgccgcaggtctggtattatctgccggttttaatgctgaccggccttgccacgggtttgctcaacgggctgatcggcctgggcatccaaaaacgtctatcccgcatcacgctgagttagcggccgccccaaggggcggctttttttatggccctgtgggcgttaatttgagaattcgcccaaaagccgctataataaagacattcaagcgaaagttggggagttttgtcatgttgattgcagatctgcacatccactcaaaatactcccgggccaccagccgggattgcacgccggaatttttggacctgtgggcgcagcgcaaaggcatcggcctgctcggcacgggggattttacccatcccgcctggcggcagacgttaaaggaaaagctggtcgccgccgaagaggggttttaccgcctgcgggatgaactgatccagcccgatgccacgccgggcgccgtccaaccccgctttgtagtgaccggtgagatcagctcgatttataaaaagaacgggaagacacgcaaggtgcacaacgtcatcatccttcccggtctggaggaggccgaactactcagtcaaaaactggaggccatcggcaacatccattcggacgggcggccgatcctgggcctggacagccgcgaccttttggagatcactttggaatcctgtccacgggccatcttcatccccgcccatatctggacaccgcacttttccctgttcggcgccttctccggttttgatacgattgaagaatgctttgaggatctgaccggccatattcacgcgctggagaccggcctttcctccgatccggccatgaacgcgcgggtgggcgcgctggatcgctttgcattggtatccaattcggatgcccactcccccgccaagctggggcgcgaggccaatctgctaaatatcgatatgacttacagcgccctgtacgccgcgcttcagggcgagaatcccgggggattgtgcggcaccatcgaattcttccccgaggaggggaagtatcatctggatgggcaccgggcctgcaagctctgtctcaccccggcggaaacccagcgctacggcgggcgctgccccgtctgcggtaaaaagctgaccatcggcgtgcagcaccgggtggagcagctggccgaccggccagaaggttattgccgccccgacgcccgccactatgaaagcctcgtgcccctgccggaggtgatcgctgcctccaccggcctttccgccggttcagtgaaggtcgcccggcagtatcaggccatcttgcaggcactgggaccggagttctacatcctgcgcgaagctacgatcgagcagatcgcccggaccgccggcccctgcgtggcggagggtatccgtcggctgcgccgcggcgaggtacgccgcaaggcgggctatgatggcgaatacggcgtgatcgggctgctggacccctccgagatcgagaccttaaacggccagctcacgctactggagggctgggcgctcccggcggcacagcccgcccaaaaggcgccgcttccccctgtcccgccggcggagcgggccgcgccagttgagcgcgaagcccctttggcggacgctgcccttggcgacggggacccgctgctggcagggctgaatcccgagcagcaggaggccgtcacctccaccgtgccagcccttgcggtcatcgccgggccgggtacgggcaagaccaaaaccctggtctcccgcatcgcctatctaatctcagaacgcaaggtcaaaccctcggagatcacggccgttacctttaccaacaaggctgccgccgagatgcgccagcgcctggaacaggccctgggcggtaagcgtgccctgcgcggcatgtccatcggtacctttcacgcgctgtgcctggaatatctgcgcgagaccggcggggtcaccctgctagatgaggaaggcgcgcgccgccacgccgtggcggtcattcaggcgcgcaacctgcgcctgacgccagaggcctttttgcgcgcggtttccatccgcaaaaacggcggcgaggacgatggcatttccgatgaggcctttgccctatattgcgaccgtctgaaaaagagcggcgctgcggattttgacgatctgctggccgataccctggctgcctgggtggaaggccgggtcgatgcccgctggcgccgtcggttcaattatctgctggtagacgaatttcaggatatcaaccccatccagtaccgcctgatccgcgcctgggcgcaggagggcgaaagcctgtttgctatcggcgatccggatcagtccatctatggtttccgcggcgcggacgccgcctgctttgaacgcctgcaggaagattggcccgcactttgcaccatccacctgcggcaaaattaccgctccaccccgcaggtgctgcgcgtggcactgccgcttatctcccacaatcccggccaggcaagagagcttttgccccaccggccggatggcgcgccggtaggccgcgtggcggttaagacggaccttagcgagggcatctttatcgccaagcagatcggccagatggtcggcggactggatatgctggaatccggcgcccttgccgccccggcgaaccgggcgcagggctatggtttttcggatttcgccatcctttaccgcacgcaccgtcaggcggaaatgctggaaaaatgcctgcgccaagagggcataccctatgtggtttccggccgggaggacgacctatctagcgaggatgtttgcggcgtgctgggctttttccgcttcctagccgatccgcaggataccctctccctcactcgggcgctcaaggtcctttttggctgcccggaggcattatccgagagctttgccgcgctatgggagggcgccgggcaccagatgctcacccctacgctgttggaggagcgggccgcagcctacctgggcgcggcccacgtcggcccattgatcgaggcggcaggcgcctttttaccccgtatgaaaaaggagaagccccgtaagctgatcgaagcgctgtgcaccgcctgtgggctgaagctgacgcccgcgctggagcacctgttagggcgggcggttttccatacggatatggcggcgtttctggataatctggccttgggacaggaggcggacctggagcgcagtacggggcatgcctattccgccggtgctgtgcggctgatgacgctgcacggtgccaaggggctggaattccccgtggtctttctgtgcggtgttaaaaagggcatgattccgctggagacgccctataggcccgcggatatggaagaggaacgccgtctgttttacgtgggcatcacccgcgcgaaagacagcctgtacctttgcaccggcccggaggcttccacctttatgcaggagatccccgcggttgacctgaagcccatccgcgccaaccccaacgccgcgcagggcgcgcagctcagtctgtttggaaaggtctagcagataagataaaaggatggctagcgttagctatgtcatcctttagtattttgcaatccctttagtaagcagcaaaactacaaaactatactttagcactcgctacgttttcattcagaacagaggacagctagtttatggcggataagtgcttaaggaagtatagggagccaggagcggctaaagtggtgatagttctgtcattcagagggaggccgccaggccgagcgaagaatctcctgctttggcagagtagcagcgcttgatctataggactagaggacgtacgcagccaagaaggcgtcaagagattcctcgcttgcgctcggaatgacatcacagcatactgtttatgcatgggaaagtatgctattccccgcgcccactggcgcttttactcctgccggtaccgttgcatcagcgcggaactccaagatagcagctgcccatagcactctgaccagcgccctggttccagctggtttcgatgcttgtacgccgcaaatatctgcgcacgcgccccgcttacccgttcctccatctgcgcggcattgcggggatagaaacccgtttccagataaagttcggcttgcagaataaaaaaggccgctttacacagtccgggcagcgcctggcctgggtcctcgtggacaaaggcgtgcgctaaagcgtgataaagggcagccgcgccgttttgtatggcagtggccacgtccgcccggccgattgggggcagcagcggctccaactcgccgtaaatggggcgggtatcctggaagaactgaaaaagatcatatcgcggccaggctaaaagctctgcgtggccggcgataaacccacagctccgctctcgcagcggcatctcctccagcagcgcccggtatcgctccaggtcctcaaggactacggcatccagaatcaccacaaggtcaatatcgctatccggccccgcctctccccgggcaaagctgccctgcagcccgataaaggccacccgctccccaaaggtctgcaaaatccgcgcctgcatctgcgctaaccagctgcttatttccatttcgtctcactcctttcatgatcgcgttttgccagcataccataccgccgccccttcgcgcaagtccacataaaacaagccgccggatcgaattccggcggttgtttctgctcaattcagctatttaaaccgcatcccctaaaagagacataaattcatcgcccgtaatggtctcgtgctgataaagatactcggccagcgcctccaacttatccatattcgcccgcaatagcgcctctgccttatcgtactgggcccccacaagctcaatcaccttttggtcgatcctggcagccatttccggagagcaggccaactgggtatccccacccaggtacgcattgccactggtttccagcgcaaccataccgatctcatcgctcatgccaaaacgcgtaatcatggcgcgggccagcttagtggcctgctcaatatcgtttgaagcgccggtggtaatggcgtggaagaccaactgctcggctgcccgaccgccggtaaaggtagcgatcttgttttcgatctcctcccgggtcatcaaattatgctcatcctgctctacctgcatggtatatcccagcgcgccggatgtgcgaggaacgatggtgatcttagaaactggggcagagtgggtctgcagcgccgcgaccagagcgtgccccacctcgtggtaggccaccacgcgtttttcgtgatccgaaaggatgttgttcttcttctgatacccggcgatgacgacctctacgctctcctccaggtcggcctggacgacggtatcccgtccatcccgcaccgcgcgcagtgccgcctcgttcaccatattggccaactccgcgccggaagcgccagcagccatccgggcaatagcggtaaagtctacctggggcgccatcttcaccttgcgggcatgtaccttgaggatagcctcccgtcccttcaagtccggcagctccacggggatgcgccggtcgaaccggccggggcgcaacagcgccgggtccagcgattcgggccggttggtagccgcaaggatgatcacgccccgcttgccgtcaaacccgtccatttcggtgagcagctggttcagggtctgttcccgctcatcattgccgcccatggggccgctatcccgctttttaccgatggtatcgatctcgtcgataaacacgatgcagggcgccttttcaccggcttgtttgaacagatcccgcacctttgccgcgcccatgccaacaaacatctccacaaattcggagccggagatggaaaaaaacggcacctgcgcctcccctgccacagccttagccagcaaggtcttgcccgtacccggagggcccaccagcagcgcaccctttggaatcgttgcgccgatggcggcatatttttgaggattatgcaaaaaatctacgatctcgttgagcaactctttcgcctcgtcttcccccgccacgtcgctaaagcgaataccgtcggtggattgcacgtagatcttggcgttgctcttgccaaaggacatggcattgcccatgccaccgcccgcgcgggccagcatctttttcataaagaactgccccagggcgatcatcaagatcgtgggaaggatccacgtcagcaaaatactcatcaatggggacatctgctgcacgatgggcgtaccaaaagaggtcaccccagcctcatataaccggtcgatcaagcccgggtcgttcatattccccgtcttatacagcttggccggctcccccttatcggaaaagacgatttcgttatcctcgatctgcacctcgccgatattctgctcgtcgatcatcgttaaaaaggtaccgtaatccacctcttctacacgggtcgccagcagctgcggaaataaaaaggtgttaagcagcagcaggaccagcagcgcaatcgtataataatagatcagtggttttttagggttctttttttcatctcgtatcataaagtcacactcctttattctggcgcggcggccagcattatatcgctttattcaaaacctcccggggtgcaggctggcaggctatgcttacgcgcagtttgtgttaccgcaatacgtctgctcacttccctttggctacaaccttgccccggccggattgtttgcgatattgcagaggtgtcaagcccgtgtgcttttgaaaaatcttgataaaatagctttgggaggcgaagttgagaaatcggctgatctcggcaaagctgtagctggaaaagcgcagcagctttttggcctcttccacccgctccagctggatataatccacaaccgaaatgcccacttcctctttaaagatatgtgacaggtagcgcggacttaaatggacataggccgccagatcctttagtgtaatatcaaagtgcaggtggtggtagatataccgctgggcccgggctacctgctgggagagcgcgcgcccttttttacggccggccacgcactcggcaaaatccagcgccatcttatcggccagcgctaccagttcctgtatctcctcgcagctctcggcccggtgtacgtagcgcttgctgatcggcgttacctcttccatatctaatccgctggccaccgcagcacgcgtaaagactacgctagcggcaatcaccagatttttggcccgcctcagtgggtcctcccaagggtaatccggcgggtccagcgcggtgaccgccgcgccatttccgctgtcgatcaaagcttttagccgctggatatccccgtcccggatgcactcttcaatgtgcatcacgttaatcaggtacgtccgccccatctgcctttccgtatctggtaaaacggctagctcctgcaaatcctcccgccccggcaccaaccattcctgctcgtctttctggatctcatccagtttgagcggctgctcaaaaatagcaaaataaactgcccgcaccagataggtaaaggccgttacatccacctgcggcatctggctgagcagttcaaataacaggcgtacatcctccccgccaaaaacgggttcaatatccgccagatcggccaggtttgtgcggctgagcaggcccgggccgataaacacataatatgtcttttccagttcaaaagccatgcaggcgtaaagcagctgggcgttaaaagcccccatcaccggcccgcgggccacccgttctaccagcttttgctgcagggatggggaaagtttcaagttctgcatcaggctcgttcgtggataggccatgaccagctgatcaggcccttccatgatgtggatgggcacgcgactgattccgtaaagcagcttgcacgcctccgaaattgcctcccattgctttgcagccctcaatcgttatcctcctcctttttacctacggacagtatagcatattttcctggcaaaatcgccatctgtacccggcttttattcaattctcccgggataaaatagcgcctttggctgcaaactatcatcatagcaaaatatgtaaggaggcaccaccgatgaacccatttgagcttaaaccccgttcgctcgaatcctgcattcgagactggaacggtatgtatcccaagccctacgacaaacgccaaaccgacccctataccaaaacccgcatcattctgatgaacggcaccgaatttgaggctgtgtatttctcccataacttttcgcgcaaatgccccaataatgaccttcgccgggaattggccctgctgcggcgcatcgagcagcagcagcaaaagaccatcagcatgctcaagcccgcggacgagaccattttggagcagaccattggctacgagcagctggctgtagacctgacggcccgcatggcgcagtgcgaaaaggataaaaatgtgcgcgccgcgctggattttgccctgctggaggattttgaccacctttaccgctacgcggacctgatggatatggagaccggagaaaaagcggaaaacctggtgggccgctataccgagatcatgcccggcaggcccaccatcgcccaccaccgccacccttatgatgagatcaagccctatatccacgatgccacggccgacccgttgaccaaactgcacgcctccatcatcaccgcggccgagcagcagaccatgaactattacatgaacgtaggctgcttttaccccaccgagatgggccgtaagctgtatatggagatcggcatggtggaagagcagcacgtatcccaatacggcagcctgatcgataccacgaccaccctattggagtgcctggtcatgcacgaatataccgaatgttatctttattattcctgctaccaggatgaaacggacccagccgtcaaggccatctgggagcagttctttgagatggaggtcgcccatctgcataaggccgcggagcttttggccaagtatgagaacaaagaggcctgccagctgatccctcaaggcgagttccctgaattgctgagcctgggcagcaatatcaattacgtgcgccatgtgctctccaccgtgaatatgacggcggataaagagggttattgcccggtagataagctgccctccaattcggactttatgcgttaccagcagctcatgaatgagaacgtagcggatgtgcccagccatcaggtgatcgagcagtacattgccctaaagggagaggattaccggtttgaaaccgcgcccaatcccatcgacgctttgcaggaccgcacccaggacgacattaccgtggggcgcaaatagcgcgccaaaacccataaaccgcatctttaggttacaagcaagggacagcgaaatcgcgtttgtcccttgcttttttattgtggcggataacctcaaaacgcttgtattttaaccgcctatcgtccatctcttctgccatatttcttatcgtcatccccaaaaacggcctttgcccgttcggggcttttctttattctgcgcgaaatcgcgcagcctgaattgtataaacgagcaattcgcaaacaatttaccccttaacttgcgtccgcgtttggctttcgctacaataaaggcaaatccatacgtttataaagatagacaatgtaaaagggggatacccactatgcagatcgtcgatctggctaccaaccacctgaccaatccgcttggctatgcgctgggtaggtcgccacgcttttcctggatggtggagggcgccaagggtcgagcgcaaaagagcgcgcgcatcgaagtcgccctggatgaggcatttacaacgctgctttacgataccggctttgatccttcgctgagcagtatctgcaccccgttatcccagcttacgctggccccgcgcacccggtactactggcgggtaagcgtacttagcgatgcggacgagcgggcgaccagcgcaccggcctggtttgaaactgccaagctggatgagccctggcaggcccgctggatatcccccgcccaacaggaaaagcgccatcccatcctatttcgggattttaaagtggaaaagcctatccgccaagcccgggcctacgtatgcgggctggggctttataccctgaccttaagcggcgtgcccgccagcgaggattgcctgactccaggcctttgcgcctacgataaatggctgccctaccagagctatgacgtgaccggactgatcgttccgggcgaaaaccgcatccagatccagctgggcaacggctggtacaaggggcgctatgggctggacatcacgcgggagtaccattacggcgaggattttgccgccatctgcgagctgatcctgacctttgaggacggcaccgagcaggtaatcgccagcgatacgcactggcaaagcctgcgctcctgcatcttggattccagcattttcgacggtgagcggcgggacgatacccttttgcccggggaggcctgcgccgtgcgcgaaatagcgctggataaggggttgctccagccccggcgcaacccgccggtgcgcatcatgcaaacgctctccccagtggccgttatccacacccccgccggggaaaccgtgctggatatggggcaaaacatggtgggctggctggagtttacctgccgggcgcctaagggcagcgaattctacctgcagttcggcgaggtattgcaggatggtaatttttaccgggataacatgcgcaccgccctttgcgaataccattatgtatccgacgggaagccaaaggccgtgcggcccaccttcaccttttacggcttccgctatgtcaagctgacaaagtggccccaggatgtggccctttcggacttccgtggcctggtgctgtataccaccctgcccgctacgggtagcctgcttaccgcaaacgagaaggtgaaccagctcatccaaaacaccctatggggccagcgcggcaattttgtggataacccttccgattgcccccagcgggatgagcgcatgggctggaccggggacgcgcagatcttttttgataccgcggcctacaacatggacgtctacccgttttacagcaaatactgctacgacctggcccgggaacaggcggcgctggagggctgcgtgcccgtggtcatccccaagcacgacgtgacccagaaaggggcctgcgcctggggagatgcggccaccatcatcccctggcggttgtacgtgcgctatggcgacgtacagcttttgcaagagcagtaccccagtatgaaggcctgggtggattatatccgctcccgcgaccgggagaccggcgatacccggctttggcggggggacttccattacggcgactggctctccttagacgtggaagacccggtggaagaacgatttggcggcacggatcacgtgtatctggccagctgctactattactactccgccacgctggtctccaaagccgcgcaggtgttgggccttaccgcgcaatcccaaagttacgccgccctggcagaggaggtacgcgccgctatattgaacgcgtactgtacccccaccggtcgcctggccgtcaacacccagaccgcctatgtgctggcgctgtatatggatatcctcccgcccgaatggcgcgagcaggccgcccatgacttgacgcaaaagcttaaacaggccgattaccacctgcgtaccggctttatcggcaccccctacctttgcagggtgctgaccgatatcggccggaacgatatcgcctatcgtctgttgctgcaggaggattttcccagctggctgtatcaggtcaacatgggggccaccaccatttgggagcgttggaactccattctccctgacggcagcatcagcgataccggcatgaactcgctcaaccattattcctatggctctatcgtacagtggctgtatcaatacgccgccggcatcgtccccctggaggaggcccccggcatggggcgttttgccattgcccctcatccagaccccgctattggctggatacaggcccgttataaggccccttcgggggagatcactgtagcctgggcctatgacgaggccggccagtttagcctggaggtaagcgtgccctttggggcgcaggcaacgctcaccctgccggagggggcggacagcacgccgaaggtgttgtatgccgggcactatcgctggcagtatcccgctctaagcgcccaaaagctgccgctggacctggatacgccggttttggagatctaccgccatccccgcgccgtcaaggtgttggaggcggccttcccggagctgacgggcatgatgctctttgacatgtttgcaggccaacgcagtttaaacgatcttattcgcgatcagttcatcgcgccggacgattcgcggctaaacggcctgcctcaggcgctctccgcggtggcggatgagaaggaggcccggcaaaagcgtacacgctaagatcaaatggcggccagttttatttcataggataaggagaagttatggagaaaatcattcaaacgccccggctgaccctgcgccctatacgcgaaacggatattgaaacgacttacgcctatacaggcgaccttgagggtacaagatacatggtctttttgccccacaataccccggatgaggcgcgcaagttccttcgggaagcagcgcaggaatgggcaaaaccccaccccgggtattttgagtttgccgtgctgctgcagggcaaacacatcggcggggtcgccctcaccccttgcgaggaagacggcaccggcgagctgggatggatcctccagcgggcgcattggggcaagggctacgccaccgaggcggcgcaggcgctggtaggctttgcccgggaggtcgggcttcaaaagctgatcgcccactgcgaccaccgcaataccggctcctaccgggtgatggagcacctgggcatggcgctggaaaagaccggcgtacgcccttatcaggaagccggggcgcccgtgcccgaatatcagtatgccttaacgctctaagtgtatggctaaaaagccctgccggttttccgacagggcttttttactcccttctgccgcctagcagccaatcaggaaggtatgcacactatgtggcttaatcacggcgctaaaactgcgtgcgccatctcggtagttaaatgtccgctcccgcgccatgttgctggccaccaccaatacgacggacccatctggattttggaaggcaatggtattgcccgcgaagtgcccctttaccggcatataatatgcccctgctttgacgaaatgggacaggtgcttcatcaggtaaaactccggctgcaacgtcaacgttctcttttccgggtctaccgtgcaaagagaattctgcctccatccccaggttgatataccgccgttttgcaacgccaggttccaatacgtgtaacgctccgccccatggcggaagtagaaccacatctgctgaaagatatactccatatgctcccagctgttttctccatccccacactcgctctcggtattcatataccgcatctccggatagctggcgcgtatctgttccaccacatgtttgccgccccactgcacgcccacgcccgttagatactccctggccctttcatccgaaagcaccgtaccggcgaactgatcaaaatgctcggaaaagggagccgatcccggcatcataaaatctacaaaggggccgttgatagtgcccaaccaaatctcagtatccagttccgcctgctggaaggccggccccaggtaatcggcgataaagcggcgcatatcctctcctttccacaggcaagagggaaatttctgatctgccatcggctcgttttgcacatgcacctgctctactcgtacaccctctgccgcgtaagcctgcacaaatttgacaaagtactgcgcatacgccttaagcaccgactcctccatacgcaaggttccatagttgtacgcacgcttggtcttcatccaggtaggcgggctccaaggcgaagcaaatagcgtaagcccggcctggcgcttttgcgcctcccgcacaaagggcaaggtatacacccgatcccgatcgatattaaaatgctccagcgtataatcgctagcgacctcgtcacagctgtaccattccaaactaaaatcgtttgcgccaatgggtacacgcccgtagttaaaaccgcagttttcctctaaaaataactcatccaaaaaacgctctcgggtcttggtatccaccaaacccagagcctcccaccctagttcgttaaagcaaccgccaaagcccagtatcctctggccctgctcaccggtcagcaccacatcgtcgcccgctggcgtagcaggtcccactgtctcttgtacccagtagttagcttcatagctagcgatgtgttttacattcatcttttatcgcgtcctttccgtattttcaagggccacacccatggtacattcatcttcatttcaattttagctatccccttcacggcagtcaagttcctattccaggcgattcgcatggatttgtctgatctcatcaaatttacttgacttagagtgcacttcaagtgttatgataacggtctaacatgatgtaaggggagagaaacatgatttatcgcgaactgggccgtaccggccttaaagtcagccagatcgggttaggatgtgaagggttcgccggcaaggacgaggcacaggctagggcgatgttcgacctggcgctggcccacggggtcaactgcatggatctttacagcccggacccggaactgcgcagcctgatcggccggctgttgaggggccgccgcgacaaatttgtgatgcaggcccatctttgcacgatatgggagaatggacaataccgcgccacgcgtcagctggacgaggtgcgcgcctcgtttgaggacttgctcgcccgcctggagaccgaccgggtcgagatcggcatgatccactatgtcgattccatggctacctggcaggcgcttgcggatggcgggatcatggcctatgcacaggcgcaaaagcaggccgggcgcatcgggcatatcggcatcagcagccacaaccctgcggtagcgctggaggccgtgcgcagcgggctgatcgaggtgctgatgttcagcatcaatccctgttacgatctgctgcccgcggatgaggactgcgagcggctgtgggcggaggaaagctatcagggcgagctgatcaacatcgacccggagcgcgcccagctttacgagacctgtcagcgcctgggcgtgggcatcaccgtcatgaaggcctttggcggcggcgatcttttgggggcggattctcccgccggcagggcgctgaccgtcaaccaatgcatccattacgccctgacccgcccgggcgtatccagcgtgatggcgggcgtacacagcacagaggagttgaccgcaagcctggcctatgaaagcgccccggaaagcgcgcgggattacgccacggccttggccagcttccctaagatcagctggcaggggcactgtatgtactgcggccactgcgcgccctgccccaagggcatcgatgtggccagcgtcaccaagttcttccatctggcgcgggcacagggcgccatccccgaaacggtgcgcgagcactacgccgccctgtcccataccgcgggcgaatgcatccgctgcggcgcctgcgaggctcgctgcccctttggagtgcccatccgcgaaaacatggcccaggcccaagcactgtttggcgcataagggtataaacagcaaagccctcccctaaaccaggggagggctttttcggggctttgtcctcgtttaaaggtcgtccgcatcctgaacgggcttgaccagcggctctacaggccggccggtatacatgcccagcgggtcgctcttagccgaataggcggggctcatggcctcgaccacgctcgccactttggggcttaaacggtttttctcccttttcacgcgtgcatcacctcatgctacattatgcccgggccacagcaatgcttattccctctgtctgtttgatccaactgccaatttttatccgccgcgcctgcagcgcaaaatcgcatcggttgctttcgcttctcctaccagtcgattcattcgcaaaaatatactgatttacgccacttgccgccatatggttgacaggcccggcttacgcggcatataattagaatgctaatagttgtatttctaattatttgaaagctaattccaaaggagtattatgaaaacgccgttttatctgttgctgcttaaaacccataacgcccagcgtatgcgcatccgtccccatatggaggagctgggtctctcgcccgggcagcccaaaatgctcagctttttacgcatgcacccggactgcatgcagcgcgagctggccgaagggtgcgatattgaaccggccaccgtatcccgtctgctggaaaatatggagcgtgccggactgatcacccgccagccttctccggatagcaaacgcgcggtctgcgtttccatcacggaaaagggcattgccgcacagcaggccatggccaccggctggcgtaaagttgagcgtgaggccctgtcgggctttaccccggaggaaaaggaacagtttacccaatacctttgccggatgtacggcaacctcaccggcaaggacatcgaataaaggagcgtgagattatggaaaataccaatgcccaacaggcgcagtttatcaagatgacccagacgcccatcccccgactgatcgccgggctggcggtgcccaccatcatcagcatgctggtcacctccatctacaatatggccgatacctttttcgtctcccagctgggtaccagcgcggctggcgcggtgggcatcgtcttttccatcatggccatcatccaggcggtgggctttaccctggggatgggcgccggcgctacctccagccggcttttagggcagcggcaaaacgcgcgcgccaatacggttgcctctacagcctttttcaccgcactggcttttggcctgctgcttacgatctttggcctgctctttatcgatgggttgatgcgcctgctgggggccaccggtaccattctgccctacgcgcgggattacgcgcgctatatcctgctgggggcgccggtcatggcctgctcttttgtgcttaacaacgtgctgcgcgcccagggccgcgccacgctggccatggtgggcattggcttagggggcgtgctcaatatcgggctggatcccttcttcatctatacgctcaatctgggcatctccggcgcggccatcgccacgctgatcagccagtgcgtcagctttggcatcctgtttagcttctacctgcgcggaaagtcgatcatcaagatctccgcccgcgccatcgcacgtgatgcgggcacctacggcctgatcctcaaaacgggcatgccctctttctgccggcaggggctggccagcatgtccaccgtagcgctcaatgtcaacgccgcggtgtacggggatgcggccgtggccgccatgagcgtggtcggccgcattttcatgttcatcctctccgctatgatcggctttggccagggctttcagccggtggtgggctataattacggcgccaaggaatatgggcgcgtgcgccaggccttctggtttacctttaaggtggggatggtcctgctgggcgtgatggcagtggccggctttttcgtggcccctcaggcgatggccctattccgtcgggacgatatggaagtcatcgccatcggcgcgtttgccatgcaggcccagtgcctggtcctgccgctgcagccgctgatcgtatgctgcaatatgacctttcaatccgtgggcaagtcctggcaggctaccttcctggccgcagcgcgccaggggatcttcttcctgccgctgatcgtactgctgccccaatttatgggattgaccggcgtacagctcacccagccctttgcggatgtcctgagctttggcgtggccgccgtgttggccgtgcgcttctttaaagagttgaaggtgctggaaggcgacgtgggggccagccatggcgcgcacgcgctgcaatcccgctaagtgcaataccgatacttaaagggcagaccctttgcgggtctgccctctttttctataccacagccgttctttacgcctcccgcgccatgccctccagcagtaccgccaggctctccatcgataaaaatccctcatcccagctcgcgtccgcaaagcgctgcaggttctcctcgcagtactcgatctccttggagtagcgcttggcgaggcgcacctgatccgccttacaaaaggcgtgcgcggcatgccaatgcgcaatatccagccaggcgatcagcaaaacgcttgccgccatcagcttgatcttgcctaaaacgtcgccgtcgtaaacggatttaagcatatagcggtatacaaaatagaccgccaggtgttcgtattccgtcgcgcaggcccggtgtacctgcaaaaatccctttcgctccgccagcagtgcggaaaggccagcgcgcagccgtcccagctgatccggccaacctgaatcgatcggctcaagcgtctggtaaaatgcaagcagttctccaaggatgcggcgctccgttccctctgctgccggccgcgtttggccttgcgccttatccataaaaccccctggggcctcctggcgcgcttccacccacgcacggattcgctccggggccgcttcctcctccagatgcgcctgcagctgctccgcaaatacgagcgcggccgccagtctatcccaaatagaaaaacggcaatcctgcaacagcgcaaagagcatatcccgcgccgcaagcagcgcgtttagcagcggctcatcttcaaaatccgggtctgccggctcgtcggtttccgtttggataaaggttgttggcccgtcgctttgaaggatcagtttcgccgcctcttcacagcaaagccctacgccgctctcctttatatcgccaaaccactcgtggaagcggggatgttgggtgcatatctcacaaagggcgctctcccccaggttcaagataatatcgcaaagattttgttcgtttaaaaaagggcagcgctcctcctggagcaaaaagtgcggcgcttcgccttgggcaatgctgccgcgtagccgctgtccaaacaccccaccccgtgccatatagtccgcataggctcgttcgtcaatgtcgatctcccacccaatgcagcaattgtcctcgcacccagacgcgctgcaccggaatgctagataataatcgggataagttagtttcatgcccttatttcacatcctgatattttgtcctgtccgtaggctcataaaaataaaatatcgcaacccacaatggttaggttgcgatattcttgcggccattcgccgctggcggagtattaccttttgaactcccatgttttatctggattttcaagtatagggttctcctgctctatttcatttcgtttacacgctcaccgcatccagtgtatattcttgcatatccattataccaagagaaatggcttgtgccaatacacagcccatttctctcgttatcactttgtttcttttctttcccaccgctcaatctgcttttgccacgtcttttcagtctgcccgcgcaggtattcacaaagcggttccagctcctggtttttatcccattcttccagggcttcataataccctcttcgatcttcctcgtgtatcgtaacaggcgggtgattcaacagcaccaataaatagttcatggccagccgtccggttcggccattgccgtctgcaaagggatgtatattttcaaacttcgcatgaaaatatgcggcagccgtcaacgcgttttgaggcttgatattttgcagttcggacatcagctccgacatctcttcctcaacgtcttccggcgaagcgccaatttcttctttaccggttacaaagtcgtggcgcttatattcccccggccgttctcccaactgccatctgcgcgtatcataggtgttcaccgtcaggcattgctggaactccattaaaagcccttcatctaatgggcgcctggtattgaacgaatcgagaaacagctcgtatgccgccttctcgttcctgatttcaaaaagcgtcctcaaatctcccgtataggaggtaacaccgtcgtgctcaaaaatttctcttgtatcgtggtacgtcgtatgctcattttctatcttattggaatgatacgcaaaggcaatgctatgaccgttaagagcttcggccaattcagcatctgttattatccttttggcttgccaaagcgcaaccgctttttcataatttgtcatggcctcccctcccttatatagattataccacactccaaatcgaagtaaacgaacaaccttccggcagcccatgatggtcacctgtcatacatcttcttttttgcttcctttttccttccgtccatcattcgtatcggtacagatacttccattcctccatctattcgtatcaactgtattgttgtggccattcgcatactcgcaacggtcttccatccgccttttgactgactaccttgtactacattaaccatccgcagcttcaacgctttgtacttccatgtttttactgaactatttcttcaatatgttggagaacacaatccatcagatagcgaacagccagttttttatcctcttctgtcaggcttgttgtcggctgtatcattgcaatatgcaaaactgaagtagcccgccccaagtccgtcactgcaaaagcaactctgctcgtatttccaagtatcgttacttctgccctgatatctcccacatggacttgttcatacgtagcattcatccgatccaaaacatcaaaaatggcatagactaccgtacgacgcggataattcaaattttgtttgaggtttggcataggctcctccttttttctcaacttgaagctctcataagcgaaacacgatatttatgagagcggccgcactgtggaaagtacatccgcaaaaagagtacgagcgttggattcgtttgcctggtctgtgttcatacctacgatatagggttgaccattgatatccgcagtagcaatggcaacgccgtacgaattgtaactgatttcctgaatctgccatatgacgcctccgatggtttcttgtctttcctcaccaatcgtagcgttaggattccctttccaaatcccgcacaaataagccatgcactcactggcgttgtttcctgcggcagaacctttttccacttcgatatactgattggaatcggaattgaaatacaacagcatagcggttccgctatttccgttaggcaaggtaaatgaactgctcttcgttcccgtaatagagccggtgtcgcatattgcctttaccccagccgccgaatcggacactacgccataggaaatatcgatcgggcctttgcagcggaaggaagagacagcctcataaatttctgtttgcccttgggcatcgcctgaggcataacagccgagcaagaaataacatccgaagccgttctgcccttcgatcgcctcgacaaggagctccatcactgtgccatcttccgtaatggtaaaatagatctggtaagcgtcctggtttccgatggtatcaggacccgccgtaatgatcgaataagtttcgctcaattcgagtctatcaagcagttcctccacgattttttcgtgattgctttccacatcggaaagggaatagaccggcccgccaagctgccaagcataatccaccagggcaaccattcgctgattctcgttatctaggaaggtataggagttattctgttgtacatagttttggggtacactcataccagcggaatagattcccaggtcatactctactgcgccggcagctggagcagtcggctggctggatggaatggttgacggtgtactttgggaggatggaatagtagcagcgggaactttttctccggacgaaagagcaatcgggagaataatgcacagggcaaccaccgcagccaggccgccgccaagtacccaggcgatcatggggtttgttttcaagtaagccataaagcgtgaaacggcagatcggggttgtgcggccgcttcttttccaacgaaactggttcgtctcatagacatagcctgcgttttttggctaacgctggccgtaattttatcttgaaccgaaactctccccgttagcgcttggatgaactcagacatattggtaaaacgattttctgtttttagagccaatgctttgacaatagcgttttccacgtttacgggcagccggatacccagctccgaaggctttttgagtgtatctccgtgaacccgctcaatggaatccggtggaagaacacccgtgatacaccggtacaacgtggcgcccatggcgtacacatccgtccatggtccctgattgccatggctggaatactgctcctccggcgcatagccatgcttaaggataacagatacgctcttgccgtcgcccaccgcaaaccgagccgcgccaaaatccagcagacggctctccccgttagaggtgatgtagatattgtccgggctgatatcgcggtgcagcaagttgagggcatgcacctgctctaacgcctccatgatgggttcaaggatcgtcatcgcctgcgcataaggaatcttgtctccctgggaagccagatactccttcaggctcatgccatcaatatactccatcacaaaataggcggtattgttttccttaaaatagttttgtacagagacgatatgcggtgtattctggagttttgcaagaatgcgtgcttcatcgaggaaacgttccataccgtatcggtaatccgtttccacgcgtccagtcagtacaacgctatattgatctgcatgacgtgtggccaaggcagagggcatatactccttgatggccaccttgatctccaacgtcaggtcatagcccagataagtgataccaaaaccgccaatccccaatacctttcctaccatataccgcccgttcaaaatacttcccagcggcagtgccagataaggtttttcttcattctcattaaagccgcagtaagggcagacggcgcccggctctttttcctgaaaacaaccatagcaaatgcgttctggattcatacgctcacctctttgatctcagccagtacgcagaggtcctccgccacctgccgtacccgttctgtatgccgcaatatcagtgcttccagccaatgttccacactggccgctttgacaaactcaatttgtatctccagcggttctacgtagagctctcctgtatacatcagcattccttctccatcggacaaggccggaagctgagtaacctgctctatcccgccgtctgcatccagatggaagatggccgccggttcaaaaccggcggacgcttcctcatagacttcgtgtatctttctgtcttttagccctaaaatgccaaacacaaggccgacaagcccaatcagcagcaacagaattgcgactatctgcttaccggatattttatttgcttccatctacttgttcctcccctttaccatgatacttcaaaacaatcgccgtaaaattatcctggtttggtctcccaacatccaggatggccttttcaagctgctcgcaacatgcttgcggcggcaaggccaacatatcccgaatctgcctaagcgtcagggtatcgctgacgccatcggaacagagcagcagcacatcctccgcttggagaaggaaaggaatacgggtataatcgcaccgcacattctctttgcctatgtattcggagagtgcgcctgcttgaacgtctacaaacgcttcttccacagggaacgcgccctctatagcccgtagaacaagctcatttttaaattcctgcctcaaattcagcgagtagaggctgccgccacgaagtaagaacagatcgctgtcgcccacacaccaaaaagaaagtgcgttttcccgaagaagggcggctaccagcgttgtccctccatgcccgcgaaattgttgatatacttttccgcttcgctggcgaatccaagccggaatatccttgtcgttctcccaggggaatgcatccatgagttctgaagcggtatccgcggctatttttcggccttccgccataccccccatgccatcgcaaaggattaccagcaatccatcttcctcataacgatcaaatcgcgagatgccgaaggaatcctgctgttcctgacgactcccgataccctgcagattcgccagctccagcgttggcatctgctgcggacgttcggtagttggcgccttacgcggtgtgccacgcggggctttctttttccttcggcgtataagcggcagtgcgatcacgagcatcagcagcacaaaccccgcgattcccatccagatatggagaaagctgcccggaaataggggctggttgagccatgacagtacgctctccatcctttattcctcattccattggaaccgttctccacacaatggtaaaaagagtaactggcttttcccaacctcaatcacatcataagcttgcagtggacgtaccatctccacctgttcctcgttgcagtacgtgataccgcgaccttgcccgggagatagggagaatttgttatgtttggcatcgtcggtgaccagcgcgtgactttctcgggatacagtgtcgtcgtccgccagtgaaacatccattgctgccgcacgaccgataaaatttcgtccggcgaccagcttgtaatctgcgccgcgatgggggccggatatacaaaccaggaagcctactgccggatcaattccgatttttttctgaatgatacccactgtttttccacgttcagcctctgcaccgatgccgccgggcacagccgctacggtctttcccactgagctcgcagccatggttttacctatcccatttccttcttggcaataggggcaactatcaaaccttgcttcgtcgtaaaaatgtccattgtcgcactgtttcattttgttttcctccttgagatgtataagcggatacgtgtacttttattatccccactctatctgttccaacggtgtttgtgcagatcgttagcgcgccaagatataaaaattacagtggcgcacctgtgccaagcggcatttttatcggttaatatagaaaaagccgtgtaagacaaagtcttacacggctttcgttgatcaccattatacttttataccatcaggagcatgcattgatctctccctcggcgatatgcgaagccagattccaaaacgcagtttcattggatgtagtatacaatttcccatcctccgcctcaaaattacggtcattaaaataaaaactgtactttgtttcgttttccatcataaaaacaaaaatattgtcgttatccgtgctgtatcgttcggtcgaggattctatttggatctcactcaatgtctgcgccaatgcacaaattgtttccgcatccattatcgtaaagcggttggatgtttcccagttttgatagtatatggcaaaaactggtttttctgtttccaagcgatccagaaattccacctgtgtttctgaacaatagtatctaatttccgatggtttagctgagcaagatgctaagcataaagttgccagcaacagcgatataatttgaagcatatgctttacacttttcataagatatctaaagcagatctttcccctctataaaaacctggtatagtcccattctggatttaactcctaccttttcataaattgctgtaatatggcgctggcaagtacggcgggaaatatataggctttccgcaatttcctgtatgctgttctcggtattaaccagccggtcaaacacttctatttctctaggagtaaaagagtatctttcagaaaataactggagtttatccttttgcattaggtcaattgctgcgttatgttccaattcttccactgctgctttcctattaacaatatacgcagccattacaacactaaccattacaaacaggaacaacacaacaataatcttcatcatattattatcagagctcatcagcgtcagcgaaccgcccgttatgagtacagcacttatattatttgccgttcgtcccatgcctgcccataattccgggatccgcatatagcacgaaagctccataaaactggtagtaaaaaagacaacgaagaagccggaggaaaggtaaaatacggccaatcctattaaaaatgaaccgcctagttgcagtattgccacgcagatagtcgataatatcatcacacaatacataatcatattcatcaacgctctgcgcttgatatcaaagacaaaaccggccactaatccgctgcacgccaacaaaagtctcggccactggccgatatccattttccccgaggcgtgttccaacgttactgcattatccaacgtgctaaaaatacaagtcataagtgctataagcaaaatcagcaaaatacccgttatcgtctcttttgatttgcaaaccgcaaacttttcgctttctaccgcaccgcttccaacaggtgtatctatcaatcgtgctgcttgtggttcaactgtatgttccgtttgcaacaagaatgccacaaggcccagcaaaaaaagcgaaagaatgattatctccgccaaatctgattggattagattgttattcgcaaattgcagcaaaatactcaaagcataagcaattcctacttggcgagccaaatattggtttgtttccaatatacacatagagagatgatatgtcgcgctgccaaacaggccgagaattagaaatatagccatcccaaggaacaaaatcagctcatatgagaattgctgctccataagaaaaatgcaaaaaactgccgctatcgccaataagacggtacaagtctgctttgttctttttttcaagtggcgattaaaaaacgggtatgagagaaatcccatagcgttgacacctagcgcataattctgtacggtaacagcgctattcccgcctgccataacagcaatcaaattgacatagtgatattctaggcccaagaatacaaacgtaaaaatccccatcattaggattgcatttatggatggccgtttatttatctccaattccatacgagcccgatttgcacctccttacctgtagtaggatatttattataccatatggaaaagcgaacatcctgttttaataaaaaatattgtgtgaacggaagtataataacaggctccccaagctgatgccggtgatgatatccccgataccgctgacaatgctgccaataaatagaccaaaaaagcataaaaataggccgataaaggtaacaatacaaagaataacgatgatcgaatcccgttgaaaaagcagcatgaatttgactgctaccaacacaacgcccgctattgcagtgatggctccaataagagaaataacgggaatagcaactcccatcatttggaacaacgccatcaacagaagtactccataaccacctcccgcaagaaaaccaccggtttttatcatcgtatcttttgaggttgtagctgtgcaaaagaaatagattagcacgagacaagttgagagcatagaaaaaacagagatcgcggcggtgctcacataatatgaattcactagtaccaggctgagcatggtcagaagtgccgacaacagatatccgatcgctccaatcaaatgaagctggtttgaccttaacgacatagataatccctcccgctttaagacaccattttcttaacagtatcccagctatttttaattgttttgattataacaattccatcatcgtttttacagttcgcatgagcgtcaaactcaccagataggatggcgcacccgcgccatcctcaaatagtctaaccttaggatattccaccaaatattttgcttgatttctctcagctattttacacctcttttatcatctctcttctttataaatggaaaaacaattgcaaaggtataaaagccaaaaaacttcattgtttgattcttgctttcacaacatatttctgcggtgcatccccgctgtatcgaaagggataacaagtcgtcagaatcaggggttgcccttctatcacttcgaaacgcagcgccgcatcgctgttcacaatctcaatttcttccacgatatatgtcagtttttcgccacttagcaacagaatttgtatctcctcccccttgtttaccttttctaatattcgtagatgtgtccggtccggtgtccataaatgatacaggttccttcctctcctgggtacacggacgatggcagccaccccgggccagcgtctccctgtccaccttatcccatacttcaagcctctttccttgaatcaatagggaaaaagcttccttccttttcgccggggggctcgctttttgcgggctttcttttgccggttgagatgtgccggaaaccgttggggctgcgaacgcttcagattctgctgtagctgccgaataaaccggcgagagggatggcattttgccatcctcctcatttcctggatgtcttgtacacaaggccattcccagcaacacaaccaacagtgccgtgcctatggttttccatactctctttttcatatccgtcactctcccaaaaagatggccgggcggcgaatatacttaaaccctgtggatttcgcttccgttaccactacattatttttaccgctagagcagtgagcaaccataatcgttccccctgtattgcttaccacgattcctacatggttggtcttttgcctcctggggcgcaaaaaacgccagatcccccggcatcgcctgttcccaggctaccccttgggttttcggccactgatttgccgttccgtgtccaatcgccggaacaatatccgctgtacccgcagcctggacaaagcaccaggtcacatatccggagcagtccaggccgaacggtcttgtcgtgcccatggtcgggcttccttttgaagccactttcgttggcgtaccccatcgggagtcccagccaacaacttcggattttcctccccaaaaataccgcacttttccttttagactgtatgctgccataaccactttttccctgtccaaggacaagcccgctggaaggctggcccggatttccgcaatctcctcgggcgcaagctgtgtaaatgccgtactgcctgtcatggacaaaatcatctgctgcatgtccggttccatcatatccgccagcacatcggcctgttcttcattgaacccataaacgccgatcatctcctcatagcctttgctgttgacatagatgatgaggatccgtttttccgtagcatcatcctcctcatcttccccctccgacctttggatttccacctgttttgttacctccgtcatatcccaaaacacggagcgcagcaactccaccttggaagtatccatcaccactacatcctgcgggttctccagatccatattggtcttcaccgcaaacaccgccagaatatccggccagttattgatgggggtaccgtcgtcgcttccttcgtagacaatctctacttgatcggcgtcctcccccgtctgcatggatgatatcttttcgttgagctctccattgatggtctgtaccacttcggtaataggtggcgtctcctccgcaccacctccggcgaatatcccgaatggggacatcagcagcgctgcgaccgcaccgattaacaaaatcaacaaaaccacaacccatccgcccgcagcgatagcggcaatcaatcctttgaccgcggcgatggcggcttttaccatcatgacggttgcttttatcgccgcttttatagcaagccttgtcgctttcgcagccgctttcgccgttactttcgcagccttagccgacgccttgcccgtctgtttggccgtcttgattgtccgcttggccgtctttgccgtagattttgccgatttaatgcttttctcagccgtcttaatcgtctgtttccccttttctgttttttgccgaataccacgatatacagcgtttcccctatttttcaggcccttgacggtctgcttcttcccctctttttgcgcgttttcccgccctctgcgatgtgccttctccacttgttttttgaccgcgctcgctgtctttttccccagagttttggctttttcccctattgttctgattccctgctctacctttcccacagcatagctttccggtgattcgccagtggattgcggttcccgcatccattcttccgcctccaacatgccttttttcaccagctctttaggcgcctgggcggctttggataacaccttgggctttccgcctgtcggcttctctttgatggtttgtgccaatgttttccccctttctaacaaaaagggagggtatagccctcccttgcatttcctttgcccttatttcattctttcttatgagttccatacttccaaatccgcaggccgcgtggtcatcagccgatacagttcatttttcgggaacacattctcaaacggcaaaatggcgctcccacacttgatcaaaccatggccggcgtctgcattgctcaaatacgagagctgcacctccgaaatattcaataagcttgccaattcctctctatcgttggcggattggttgagcagcaccaggaactcgctgttgcccagcatggttcgtgccgtatgggattgcagcaagtcggaaatattctgggtaatgccggtgatagcggcggcatatttacgcaggcgtttccaccaggtatacaggaagttagcgctgtattcataggcaaaaagcagatagatttcgtcgatataaatccaggtccgcacgccccgttccttgttcttgataatgcagttaaagatggcgtccagcaccaccagcattcccaccggcatcagctggcggcccaggtcgcggatatcaaagcacaggatgcggttatgggtatccacattggtcggcttagcaaaggtattgagcgaacccgatacaaacaactcaatcgccagcgcgatctcctttgcctccggctcgctctggcgcagtagttcggcgtggaattccctgagcgtcggcggctgccccgtatatccgcccttgatatactccttgtaaacgtgggccgtacagcggtcaatgatggatttttccttggcctgcatcttttccgcgcccacgagctgctcgcaaagggacaggacaaattcggatttcaacgccaccggattcccttcgtcgctgtatcctgccgtcatgtccatggcattgatatggttggagctggacgcggagatatgatcacctccccgcccaacgctcctgataatagagaatgtcaaaggcggtaaagcaagcggggtgctgcctggactccaattctatcttgatgggattgctcatcaggctccgtttctggatagcaggaaaatccggctttccattcgtaatcaccagaagttctccatccaagatgcagcgctttttcacctgcttatgaatttccgagagttccggtaccttgggcagcatttttaccccacgcttattgacgagctcagtccctccagccggatctaaatatgccaggcatcgttctccatccagttttaattcgaagagatactcgtcgctgtcaaatggctcaccctcctgcccaatcaacatgggggcaatccctttcttatcaaataaatccattattccgacgcagcctgttttctgctcctgggcttcttagtcggcgtttgtttttgtttctccagcgaggctttgagcgcatccatcaggttgatgacattgctctgtccttcctccggcgccgctatgatttcctttccttgtatcttggcgttgatgatctcccacaaccgctgtctgtattcgtctttgtatgccgcaggattgaattcctgttccatggagcctatcagcatcttcgccatattcaattcctgttcagaaacctccggctgctggatctctttgggcgcttcctttacctcgtcggcaaagtacatagtttccaccatgatatcatcgtctgtgggaattaaggccaggagtttttccttagtgcccagcacggttttcgctatggcaatcttattctcttctttcatggctttgcggagtagctcgtatgctttttccccacccttttctggaatggcgtgataggttttatcatagtatacaggccggatattgcttagattggtaaaatgcaggatatgaatggttttatccttttcggtctttgcctgctcaaactcatcgtctgtaatcgttatatattttcctttctcgtattcaaagccttttacgatatctttagccgatacttctttcccacaatttgcgcagacttttttatatttcaccctgctcccatcttctttgcaaagctggttaaagtggatatctatatcctgggttgccgtatatagccccacaggaatatgcaccattccaaacgatatcgcccctcgatgtgatactgccatctttatttttgcctcctgttgtactttttcttagtgtttccatttttgccagcggtatgagtacgaacgaaaaaagcgccgtttttgccgacgccttgtctggatatttaaccactaaattgtataaaatgaggagtcatgtttttgcaaaaaattttttattcttttttgcttgccattgcttttaccattctttctccgcgcatatttcgctttaaagccttggttttcttgtaaatatccacggtcgtaaaacttcatccctatttcccacagggtacgaaaaaagcccgtaattacgggcttttttcgcatctatctacacagacaatgccaattggtggaggcgaggggagtcgaacccctgtccgaaagcgatttaaccagactttctccgagcgcagccgattatttgatttcccgggcagcggcccctagtcggcaaggtgccgcgccggtagcttcatttatccggcccgccgcaaagcttagacgggttcgttccctgcattaatggcacccgtacccctagccgcaggaagctaaggacggatgtacacggtgattaagccgcgtaagctaatttttgattgttggcgtttattacgctttacccggtttttaacgcggttccaggaggcccgcggctcgcttatccaatctcctctgcccccgtcgaagccaaatacgcccccacggtcaaggcgggctcagccgcctttttgagcatttctaaacgcccgctcaatatcgcgcttggcatcgcgcttggcgatatcttggcgtttatcgtagttctttttaccccgcgccagccccagctccatcttgaccagcccgtggctcaaatacagttgtaaggggatcagcgcatagccctgttgctgtaccgcgccgatcagcttgcggatctcgttcttgtgcagcagcagccgccgctgacgcaacggatcccggttaaagatattccctttttcataagggcttacgtgcatatggtgcacccaaacctcgccgttcacgatctgcgcataactatcccgcaggttcacctgccccagccggatggatttgacctccgttcccaccagttcgatgcccgtttcataagtctcctcgataaaatagtcatgccgcgcttttttgttctgcgccacgatcttaacgccgcctttgggagccatcgccgcttgtttcacccctaacctttccgcagtttctctattatatgcaaagccttgccatctgtcaagattctttggcgtccaaccagcctggcgcgggaccgaagtcgatccggcgcaggtctacatccaccgcgtccacccgcaccctggccggatcacccagccgcagggatttgcgcgtccgctcgccgatcaaggcatagcgcttttcatcaaaaacataatagtcgttgtccaacgcgcttacatgcaccaagccctcaaccgtgttgggcagttgtacatatacaccatattgcgtcacgcccgagatcacgccgtcgtattcctcgcccacatggtccatcatgtactcggcctttttcaggtcatccaccgcgcgctcggcctccatggcgctgcgctcggcctgcgaggtctgctgggcaatacccggcatggctttttccagctgctttacgcgcttttcatccagcttgccgtgcagccattcctttaagatccgatggatctccaagtcagggtagcggcggatgggggaagtaaagtggcagtaatccggcgccgctaggccaaaatggcccagcggcagctccaggtatttggccttttgcatggagcgcaacatcacctggttgatcacattctcctccggcgtgccctggatctgctccagcagctcctgcagctgtttgggcgttaccttccctttcacctttagcgtatagccaaaggcgtttacaaactgggcaaactccttcatcttgtccttatccgggtcctcatgcacccgatagaggaagggcaactctgcatgacgtgcgcaaagcgccaccgagcggttggccgccagcatgaattcttcgatcatccgttcggatatcccgcgctcgcgcagcaccacatccaccgcgcggcccttttcattgaggatgattttggcttcgggcacgtcaaaatctagaccgccattgcgctctcgccgcgccagcagcagatccatcagctcccgcatcgtgcctaaatcttccaggataggggcatacgccctgcacatctcctcatccccggcgaagatcttattgaccccgtcataagtcatacggtatttattgttgatcacgctctctacgatctgcgcatcctgtacctcgccggcctcgtcgatctccatgatgcacgagagcgtcagccggtccacatccggattgagggaacagataccgttggagagctccggcggcagcatggggattacccggtccgcaaagtaaacgctggtgcctcgcagcagcgcctcctggtccagcagggagccttcttgtacgtaatggctcacgtcggcgatatgcacgcccaactgatagcggccattctccaggcgcttgatggagatggcgtcgtccaggtccttggagtccgccccgtcgatggtcataaccgtccaatccctaaaatccttgcggccctgcttggccgcctccggcacctcctgcgggatggcgcgggccgcgtccagcacgccctgcgggaatacctcgggcaacccagcctggcggatgatcgagagcacatcgcaccccgggtcgtccttattgcccagcacctccacgacctttccctccgccgcgcggttgccgctgggccatttgatgatctccacgaccaccttatcctcatgcttggcgccgccatacagctcatggctgatatggatatcctgtcccaggcggggatcatccgggatcacaaaggcgcttttccagggccgatcaaaaaggcctaccacgcggctgttggcgcgggacaggatctgcaccacctcgccctcgcccgagcggccgttctgcggctggcggataatgcggcacagcacccggtccttatgcatggcgctcttcatcccattggccgggataaacaggtcgtcggcctcctcgtcatccgggatcaaaaagccgaagcccttggcattgccctggatgcgtccggccagcaggccgatcatcgccggggtagcgtagcgcccgttctgcgtgagcaccagtttcccttggcccaccatctccagcaccgcctctttcaccccgccggcctctccgccctgcgccttgacaaaggcctgcagttgagaaagctctgccgggccgcatttggggcggtcaaaataagataatatgttttccatcatttcttgcgtttccatcatttttcctcctctatcctcctaagcggggcgcctgcacccgccgccaacccatatgcttagcatcgcccaagggagacgatcttacacaaaaagacggcagccgaaaaaacgggctgccgtcttgacgcatacatcacttacttctgcaaaaataccatcacggcggagatcactaaaaacgccgcggccgcgatctttgtcagaaagaccattcgtccttcaaaagactttgacttgtttttgccaaaaaaagtttccgcaccgccggcgatggaacccagtcccgccgtctttgcaggttgcagcaatatgaccagaaccagaaacaggcccaaaatcaccaatatgatctgaccgataagaatcagcgtatccaaagcctatccatcctcccgcatagtcgataacggattaattttagcatagttccccgtaaattgcaagcggcaatccgcctttagggccgccattgtgcctgcaaaatatcctgcaccacgtaaagttcatcgcagatataatccgccgcacattccgcctgccggtgtaccagtatggccgccataccggccgcctttccaccgccgatatccgccaccggattatcgccgatcataacgcactgctgcgcgccctgcgctgcactgcgggctgccgcaaagatctcgggccggggcttttcgtatcccaggttagaggagatgatcgcgttctcataaagcccgcgcaggcccagcccatccgcaactgccgcaacctcggggaagttgttggtcaaaagatagcttttaaagcctaatgccttgcatcggcgcagtaccggcaacgcatcttcatacaaggtataggtaccggtgtccagtatctccgctttaaattgcgcgttgagcgctccccaagtttcttccggcaggcccagtcgcccgtatagatcggcaaagccagcaaacaaccttccccaccattttgcaccggtcgcctgcgtataagatttttccggcgcgtaccaggtgcagctgtgccgcagcgtctcccacaccatcgcctcgggcgcgcatatgccatgctcctgcagcgcgcgggataaggcgttaaaaaaagtgtcctctccatggatcagcgtaccgtcaaaatcccaaaacaaagccgtatttggcacgtgtgcactccccctgttcaggatatagaaccgggcccgccggactggcgggcccgttccttaccggcatactttatgctttacaggctatccacctctacccacgtgccgcgctgggccgaaagatccaccgcctccatgacctgcgcgcacttaagcccgtcgttaaagtcgggcgatgccggtttgtcgtttgcaatggcctgcacaaactcaaacacctcgtgcaccatggtatgctcatagccatacacatgccccgccggccaccaggcgtacacgtaggggtgcgtcccctccgtcaccgaaatcgtggtaaagccctggaagccctcctccgcctcggcgttatagtactgcagctcgcagatgcgctccagattaaatttgatggagcccttggagccgttgatctcaaaggacatatcgttgcgatggcccgctgcgaaccgggtcgcctcgatagagagcagcgcgccgtttttgaattcgcccaaaaagtgcgtggcgtcgtccacatccaccgtctcccggggcgagttagcctgcgccgtagcggaaacgccggtcatgctctcggcgatgggccgctccgtaataaaggtcttttccatgcccaccacccggtcgatctcgcccaccaggtagcgcgcacagtcgatcacatgggcacccagatcgcccagcgagcccgagccggccacggatttatccagccgccagaccttgggatagtcgggcgagatgatataatcctgcagataagagccgcggaagtggaagatcttgcccaggcggccggattcgatcatctgcttggccagcacgatggccggggcaaagcggtaattaaagcccacctggtgcttgatgcccgctttattggcggcctctacgatctcccgcgcatccgcggtggaaaaggccagcggtttttcgcacaaaatgtgcttgccctcattggccgcggcgatggccatctccttatgcaggtagctgggcgagttgatatccaccacatccacatccggccgggcgatcatctttcgccagtcggtctcataatcctgccagccgaacttatccatggcggccttgacgcccgcctcgtcccgtccgcagatcaccttgcggtttacctgcatatccgcatcaaaaaacatgttcacccgggcgtaggcattgctgtgcgccttgcccataaacttgtagccaatcatgcctacattcaattcacgcatcgctttttcccccaacaatcttatatttataaatgggcagcaggcgcaccggcccgctgcccatcaaggcctttaggcccagaacatctccgtggtcccctggaatgccatcacctctttgaggaagctgacggccttctccaacccctccgtgggcgagagcaggctgtcctcatgctcgatggacatcacgtcgtcatagcccaccatgcgcaggttggagacgatgtctttccaagtttgataatcgtgcccgtaccctaccgagcggaaaatccagctgcggttgatctcgtcggcatagtgcttggtatccagcacgccgttcacgccggtattgatctcatccactttggtatccttagcgtggaagaagtagatggcgtcgcccagcttacggatggccgccgggatattcacgccctgccagaacagatggctgggatccagattcgcgccgatcaccgggcccaccgcctcccgcagcttgagcagggactctacattgtacacgcaaaagcccggatgcatctccagggcgatacggttgacgccgtaggactgggcaatggggcacatcttgctccagtaggggatcagcacctggttccactggtaatccagaatttcctggaagtcatccggccaggggcaggtcacccagttgggatactcgtccttggggccaccgcccggacagccggaaaagcccaccacccggtcgatacccagctcgcccgccagctttaaggtattgtccaagtcgctctggaatttcgctgcgatatcgggattgggatgcacgtaattgccgtgggtcgacagcgcgcagatttcgatctcgtagtccttgatcaactgcttaaaagccttgagcttacccgcgtccgccagcagctccgccggcttgcagtgggcattgccggggtaaccgcccgtcccaagctcgatggtgtgcacgtccatggcggtcaggtatttcagtacctcttccagcggacggtcgcccagcagtacagtcaaaacgctcagtttcatgcaaaactcccccttacacattgtttatattcattatgattattataacgcatcccggcccgcgttgaatagagggaatggtaaagtattccacagaaaaagcaatgattatgttgcggatatggctaaagcctcctggcggcggcatttcccgggtgatcgcgcattgatggaataaaaaagcgatacagcaaccgctgtatcgcttctttttaatctactatccgttttttaccgctctatttggcgatcatgctcgagccggtcatttcctccggtacgggcaggcccatcagcgtcagcagcgtgggtgccaggtcggccaggcggccgccttcgcgcagcaccgcatccttgcggctggggtccaccaagataaagggcacggggttggtggtatgcgccgtaaagggctgtccgttagacggatccaccatgatatcggcgttgccgtggtcagccgttacgatggcgcaaccgccggtagccaacaccgcatccaaaaccttgcccaggcaggtatccaccgcctccactgcggccaccgcagcgctcatcacgccagtatggcctaccatgtcagggttggcaaagttgaggatcatcacatcgtacttgccgctttcgatgcgctttaccgcctcatcggctacctcgtaggcgctcatctccggctttaagtcgtaggtcgccaccttgggcgaggggatcagcgcccggtcttcgctctcgttgggggcttccacgccaccgttaaagaagaaggtcacatgcgcgtatttctcagtttcggcgatgcgcagctgcgtcttgccgtttttggcgatgtactcgccaaaggtgttggtcagggtctggggcttaaaggccacctccagcataccggcaaacgtcgcgtcatactgggtcatggatacgaaatccacccctaaaaagccgctcttgcgctcaaaacccgcgaattccgggtcgataaaggcgcgggtgatctcgcgggcgcgatccgggcggaagttgaagaagatgatgccgtcgcccttttctacctgggccaccggcttgccattctcctcaatcacgcagggcaccacaaactcatccaccacgtcgccggcgtaggagttggccatcgcctctacggcgctgtgcgccttatccccctggcccagcgtcatggcgtcatacgccttttccacccgctcccagcggttatcccggtccatggcataatagcgccccattacagtggcgatcttgccaaagcccagaagcgccatcttctcttccagctgctcgatatagcccttgccgctggaagggggcacgtcgcgcccatccataaagcaatgtacatagacctggtccagcccggcgcgtttagccagctcgatcagggcatacaggtgctcgttatggctgtgcacgccgccatcggaaatcaggcccatcaggtgcagcttgccgccgttttgcttgaccttagcgatcaaatccaggaactcggccttctcaaagaaatcgccgtccgcaatggatttggtgatgcgggtcaactcctgatagacgatgcgccccgcgccgatattgaggtgacccacttccgagttacccatctgtccatcgggaagacccacgtccatgccgctggcgccgatggtggtatgcgggtattcctccagcaaccggtcgatattcggggtcttggcctgggcgatggcgttattctgcgcgcactcccgatagccaaaaccgtccaaaatcaccagagccgtcattttctttcccatggttcctccttaatagttgaccaccttggagaagtctaccgctttgaggctggccccgccgatcaggccgccgtcgatctcgggcatgcccatcagctccgtggcgttgccggggttcatgctgccgccgtactgaatgcgcacagcgcccgcggcctcgccgccaaagtcctcttccaccgccttgcggatgatgccgatcacctcgttggcatccgcagaggtagcggtgcggccggtgccaatggcccataccggctcataagcgatgaccacatctttcacctgctcagccgtcaggccctttagggcagccttggtctgggtgcgtaccaggtcggccgttacgccggcttcgcgctgctccagggtctcgcccacgcagatgatggggatcaggttgtgcgccactgccgccagggtctttttgttgacggtctcatcggtctcggcaaagtactgccggcgctcgctgtggcccaggatgacataatccatgcccatggcaaccagcatcttgggcgagatctcgccggtaaaggcgcccttctcttcccagtgcatgttctgcgcgccgatcttgatattggtaccggcgatcagctttttaacggtctccaggcaaacataggtggggcaaaccaccacgtcgcacttggcgtcctttaccaggggaatcagctcctcgatcagggccttcgcctcatcgggcgtattgttcattttccagttgccggcaataataggtttgcgcatgttgtatttcctcctcaaaattcaaagcgttcgcttctcccgccgctggcaggagtaaaccataaatctgcccggcgcaaggtaaaaccttgggccgggcaaattttgctatcggtttttcttacttatcgttcagcgccgcaacgccgggcagctccaggccctccaggaattccagagaagcgccaccgccggtggagatatgggtcatcttatcggcatagcccatctgctctacagccgccgcagaatcgccgccgccgatgatggtgatggcgttgctgtccgccatggcctgcgcaacagcgcgggtgccggccgcaaagttctcaaactcgaacacgcccatgggcccgttccagatcacggtcttggcatttttgatctcgtccgcaaagagtttgcaggtctcaggcccaatgtccaggccttcccaatcggccgggatgccatctaccgggaaggtcttgcggggggtgtcgttggcaaactcctggcccgccaccacatccagcggcagcagcagcttaacgcccttggctttggccttgtccatcagctctttggccaggcctacgcgctcggcatccagcagggatttacccacttcatagcccagagccttctggaaggtataggccatgccgccgccgatcagcagcacatcgaccttctccaacaggttgttgatcacgccgatcttatcggaaaccttcgcgccgcccaaaatggcaacgaaaggacgctccggattatccagggccttgcccattacggaaagctccttgccgatcaggtaaccggcaacggcgggcaggtagctggctacgcccgcggtagaggcatgggcgcggtgcgccgtgccgaaagcatcattcacatacagctccgccatgctggccagctctttgctgaacgcctcgtcgttcttttcctcttctttgtggaagcgtacgttctccagcagcatagcctggccatcctgcaaagcggcggccttggctttggcatcctctcccaccacatcgctggccatgaccacttcctgccccagcagctcgctcaagcgcttggcgacgggggccagagagaacttcatattaaactcgcccttgggccggcccagatgagagcacaggatcacgcgggcattattcttgagcagatatttgatcgtcggcaacgcggcctggatacgggtctcgtccgagataacaccgtctttcatcggcacgttaaagtcgcaccgaaccaggactttcttgccggagacctggacgtcttcaatcgtctttttgttcattttaggcactcctttttaattgatctatgctgatgggcgcgtgagaaactttgcccacaccaaccggaaacagcttgtccctttcgcgcttttaaatccagtcgttttataaaagcgagggactcaattccgttccacctatccttattcactgtacatgaaaatgggaaaaaaatcaagccgcatgtgcagggttcgtaccccaatgggctccgcaaaaattgcaaaataaagccgctggtattagcagcggcaataggtggcaaatttatgcccatataatttgaatcccgggcgctaggcctaagccaaacgcccgggagcaaatttttaaccttttacggcgccggccgtcaagccagctaccaggtagcgctgcatgaagatgaagaagatcaggatcgggatgatggtgacgatagacgccgccgtcaacaggccccactccttcgtattctcctgcacgaacatctgcaagccgatgggcagcgtacgcagctccttcggtttgaggaacaagcttgccaaaacatactcgttccagcagtagttgaatgcgaagattgcaacggaaccgacaccagggctggataccggcaatacaaccttgaccaagctctggaatttggacgcgccgtcgatcagcgccgcctcttccatgtcgatcgggatcgaatcgaagaagccctgaatcatccagatgttcaacggcaacgagaacgttaggtacgcaatcatcaagccctcatgcgtattgttcaagttgagcgagttgaagatgatgaacagcgggatgagcatcagtacgatcgggaacatctgcagaaccagcagcaggtacacgaaccagttgagcggcttgaagactttccgataacggctcagcgagtaaccggcgaaaatggaaacgacggtcgacagcgccataacgataacagaaaccttaaagctgttcaagaagtagatgtagaactgcgccttaccaaacagcaccgagttgtaccaatccagcgtccaaccttccggcgaggaagggaacagggatacggagtacatatccgcgttcgttttaaaggacatacccagagtagacagcagcggtacgctggtgatcaggatcaaaaagatgatcagcagatagatcgggatctttttcagctgctttttggtcgcataaggatcagctacgatgacctgcccattaggcagcgtaacttggtttttcgatttggccatcttctctcacctctcttagacatctgtctggaaacgcttgatgtagaacacagagaatatcagcatgataatcatattgatactggactgtgccgaagcgtaaccaagtttcatctgatagaaggctttgaaataggccaatacagagataacatacgtcgaaccgttaggtccgccctgcgtcaacagccaaatgccttcgaaggagttcatgttccagatggtcatcagggtcgtggataccatcgtaaccgagctgagcatcggaaccgtgattttggtgaattgcttccacgtgctagcgccgtcgatgcgagcagcctcgtacagatcctcaggaatgccctgcaagcctgcgagcatcatgatcatcatgaacgggtagctcttccacacactcgtgaagataaccgtggtttgagctgcggccggcgtgctgaagaactgaatcggttcagggaacagatgcagctggcgcaccagcaggttgttgacaaagcccagctgcgggttcaacgcaaacaaccaagagttaacagctacaacaccggggataacccacgggatgagcaggaacgagcgccaaatggcgcggcccttgatctcgccgttcaacagaacagcagccagcagaccgaagatgtagctgaacagcactacgcaaaatacgtaccacaacgtgaatatcatcgcgccccagaactcgccgtcctggaacagctcgatgtagttctcgaatccaatgtaattgtagccctggcgaatacccgtgatcgaggcatccgtaaagctcagaacaaatccattgaatacgggatagacacgtatcagcatcaacaagatgaatgccggcaagacgagaccataagcaaatagcgcatcagatttacgaaacatgccttctctctcctaactggatggtctgaccactccttggccttgtaatgatcttgcaacagtctgcgccggccgcttgaaaaccagctatacactgtgcaaaaccccgcttgtcggtttgtggcccggtccgttaccgtaccggcccccgcccctttgtgcccaaacaccccgtttggacggaaccatatcccttgcggtttgacccgccgggtttgaagaaccgctgcaaatgccccgcgccacgcgcctgtgcccccgtcggtccccagccggccgctgcgaaaaaacgccccgatccgctgaaacctttcaaaaacacctgcgccctttgcaagccatctacaaatcccttccggacgccaggaccgctataggccccgcgatctttccgggcccccgcatagcggggcacctcttccctcccgggataacccgccaacttccccgcgcctcgcgcattgcgttcgcgcctcttccgtcaaacgccatcccacccgttaaggatgcgacagcctttagcggaaaaagccctcccccaaggcgccagccccggttcgtttggcgttcggacttaccagcggctcatctttcagctccgcgaaaacagcggctaaaccgcctcgctgaaagaagcctcgcccggataagagcttccacaaagaaccgtgttgccctcccccatacctgcagtctgtatcctctccgtatcgggacttcgctttcgacggccagaacagagggttcctcttcccgccttaaaagcttcatcctaatccgcagaaacgcgtatagccgctccacagcctcaggcctggtctgccttttgaaggataccccatggggcgccctccggcaacttcgtacttaactgttataacctacccatccccaaagggaaccgcgcataacagattggtacttttaagcaacctgcccgcccccgatagagagaaagccggctgcaactgctgaaacggtttaaataaaaagagtgcaggtgcacgcttccaaaataaacctatcccaacaggtttggatgttataaatataacaaagcggaaccccgcggataaaccagatgtttttacaaataggttagttatattgcggtttagggttcaaattattgattttacgaagataaatcaacatattgttccctttttccaataaaaatgcgtagctggtgttcaccacgcctcccctgtggccgctacgtttagtatgcaggcccggggcttatgacgatacctacaatatctagtgcgtcataacgggcatcacttcaatatctgtagctagtatagcaaaaaaaccgcctaaaattgttcctacttttttaccatttggtttcaatatttttgccctcgcccgcttaggggggccaccgcctgttatatatataaatggccacccttttactaggtcttcgctcctaaggcggatacacctttgccctgccttgatctatctatagtcgccgttctgtttaaatataccgcggcctgcccgttgctttgcgctttacggtataccggcgcggataaaaaaggggggagcctttctctctcccccccatccattgcctttaatagagtgcttggcgttaaaacctttagcgtttattgatccatctccgcgatcagaccggccagttcatcattgagcttgttgagcagctctttccactgtgcctcatcctgcgtcagggcggattggatcagctgcttatcatagccctgcccctctaccaccgcggcggaaggcgtcccattttgcatgggatagaccgtctgcacggaatcggggatgatatactcggtaaagggttgtttgacgaccggcgtcttaagcacttccagcgtatccaggaagctctgccgggtggggaatgaacccatgccgcccttttcccacagatccgcgttattttcagaccaccatttaaggaacttcatgccctcatctttttgatccgattgctcaaacatcatatagccgttgataaagatgcagtttttctgcaacccggaaggactttccagcggatgcagcaccagtacctgatcccggctcacatcccccgtggtggaattgacgatccagtccgaggcgccatagatcgcgcccagcctgcccgcgccgaagagtttttgcgcatcgtccccggtatagttttcgatcccctccggcaggatgccttcctgcttcatccggttaaagaaccgcatggtctccagattgctctcgctgtttagcgcggcgttgccctccttatcataggtaaagccgccattgttgatggcccactgcgtaaacgagcccccggcgttattggtcacgccaaaggcaaagccgtatattcccttttccttatcggtaaacgctttgcacatctggataaactcatcccaggtcttcggctcctgcaggcccttttcctccagccaatccttgcggatgaagatgcaccggggcgagaagttatagggaatgcccacctggcgcccctgccaggtaaagtattctacaaaaccttccggaaaatcgcccagcgcgccctctttttcccactcgtccaggatccattgcagatcggccgattcgccttttggcgcgaactggaagggcatgtagccgccaccggtggccacatccggcgcgccgttggaggcgacagcagtagaataagtctcaaaccagttgctccagggcaggttggtatattttatcgtcacatgcggcgctgcctctttatactttgcgatgatctcctcggccaccaccggatacttctccgccggtccccaggccatatcccaaaattccagcgtgaccggctcatttgccgcgctctgggtctcgctgggcggggttgaggcagtctgctgctccgccgggccgcagccgggcagtgcaaacgccaacgctgcgcatagtgccgtgcaaacgattctcgttataccgcgtttttgcatggttatttccccctatttaattttctctcattttactgtgtcagagtttcagcgtcccgtacaccgggcgggagcctttacttagaatttcattttgagatctgtcttgcgtaaatgcatatgtattgattctccgggagtagaagtgcgattggcgtcagtagttcatcggcctggcgaaggatggcacccctcctttcccgccacaattacaggctatgcgaaaagcagcgcaatggtaaggatatgttttttacaattattccagtttgttgactttcgcgccattatccattcacaccaatgaatcgcacaatgaatgggggcacagcctgtgctgtgcccccgcatatttctactcatcagtcgttttcggcgatcaatttttccagctccttttgcagcctttgcagtagcggcttccaatcctcctcttcctgcgtaagcgccgcctgcatcagctgggaaccgtacttttccccctccgccatggaggccgacggcgtgccattttgcatagggtaaacggtctgtatcgagttggggatgatatactccacaaagggcgccttggtcaatggctctttcaaggtatcgatccccttcaaaaaacttgtgcgcaccggaaaggcgcttaccccgccctcgctccacaagctggcgttgttttccgagaaccatttcaaaaaagccatcgcctcatcccggtgctcggattgctgaaagaccatgtagccgttaaaatagagcgcgtttttctggatgcccgctggacttttcagcggatgcagtaccgtcagctggtctgtggtaaatttgccggaatccactattgcctctacccaatccggcccgccataaaccgcgccaaccttgcccgcaataaaaagcttttgcgcgtcatctccggtaaagtgctcaatgccttcgggcagcacgtccgcctttttcagctccgaaaaaaacttcatcgtcaaaaggttgttatcgctgtcgatattggcgttccccttacggtcaaaccccatgccgccgttgttcaccgcccagttggtaaaggagcccgcgccgccgctggtcaccccgaaagcgtagccgtaaatgccctgctccgggtcgcggaaggccttgcacatctccataaagtccacccaggtttccggctctgccaatcccttgtcctccagccagtccttgcgcaccagaatcgcgcgcgggtcgatattaaaggggatgcccacctgcttatcgcggtagcggtaatattcgataaacccctcggggaagtcgtccagcgtgccctctttttcccaggcgcggataatccactgcagatcggccgattcgttgttgggcgcgaactgaaaaggcatatatccaccgccgatggccacatctggcgcgctgccagaggcgaccgcagtggaatagacctcgaaccagttggcccaaggcagattggtatatttaaatgtaatgtttggatgcagcgtttgatattgcgccagaatcttttcaacagccggctgataccgctctgctgtgccccaggccatatcccaaaacaccagttctatgggctcctccgtgccggaggcgccgccctgcacttgggcgggatcggacggctgctggcagccaataagggaaaaagccatggccaccactaaaattaggcagcacaaaagggtagagtgcctgtgcattacgtgttgtctcctactcatccgattaattaccatcttaacagctgtcaaccgtgattcataccccgcattttgacatattcgtacaatatattcacatctgccgcctataatgttgcacctttgtcttacatccatccagattatttcttgacaaaaaaggcgccgggtctccccggcgctgaagcttaaagcaatgcataaatcctaacgcgtggccgcacattactggtccatgctttggatagtgccctccaactcagcctgcagttttttaagtagcgtctgccagcttttttcctcttgcgtcagggcggattgcatcatctgcatatcatacttttgcccctccaccatcgaggccgagggcgtgccgctctgcatggggtaaacggtctgtaccgaattggggatgatgtactccacaaacggctttttggaaaccggcttttgaaagacgcttaaggaattcataaagctggtgcgggccggaaaggcgctcatcccgccctcttcccacaaaagctggttattttcggaccaccacttgatgaagttcagcccctcttgtttcaggctggattgttcaaacatcatgtagccgttaaaatacaacgcatttttctggatgcccgaagggctggtgagcggatgcaggatggtgagctggtcctccgtcaggccgctggagctcatgatgatctcggcccagtcgctcccgccgtataccgcgcccaccttgcccgcgccaaacagcttttgcgcatcgctgcccgaataattctcgataccctcagggagcacgcccgcctttttcaggtcattgaaaaactgcatggtctgcaggttgcgttcggtatccacagcggcgttgccctcccggtcaaaactcagcccgccgttattgacggcccagttggtaaacgagcccgccgaatccaccgctacgccgtaagcaaagccgtatgtgcccttttccttgtcggtaaaggccttgcacatctccaaaaattcgtcccagttggtgggttcagccaggcccttttcctccagccaatccttacgcaccaggatcccccggggatctacgttaaagcagatgcctacctgtttatccttgaaccggtagtactccataaaaccttccgggaagtcctccagcgtcccttccttctcccactggtccacgatccattgcaggtctgccgcctcatcgctggtggcaaactggaaaggcatgtagccgccgcctgtggccacatccggcgcgccattggaagccacggccgtagaataagcctcaaaccagttgctccagggcaggttagtatagttgatggtgacgtgcggcgccacttccttatagtttgcgatgatctgctcagccgccggcacataccggtccgccgtgccccaagccatgtcccaaaacgtcagggtaacgggctgtttgctctcccccccaccggtgggctgcgtttgcccctcatcaggctgctggcagcccactgccgatactaaaagcgcaacaaccagcaaaaggcaaatgctaagcgagcgaaatttttccacgcgattacctcctttaagatgccaatacgttttcgcgcttagtatttgccttaatcttttgtttatgcccgctttctcgcgctatgatcgcccgtgccgattaaaataaaaaaaggaagagcgtttcgctcttccaaatatcttaagattcaatcttgtctatccgttctattactgtcccggtttgccgaaaggcagcgcgccatcatcctcgatctgctccaccggctcaaacatgctgccggagctggaactggcgctggcatccgccccagagctggcgctcgcatccgagctggccgcagcactggtactcgcgctgggcgcagtagacgcggtagaatccccaccgccaccgcaaccgacgactgccagggataacgccatgaacaccactaagcacaatataacagcaaccattttcttcataccgtaagcccccctaaagatttgatataatgaatatatcaaaagaaactacactgtaaaaccagttttttttactttgaagtgtaaaaaatttgactatttgccttatttgcgtcccatttattcattttttccgtaagttaaccacacttgtccgctattatacacttcgcctcagcgtatggcgcacgctgtagatcacgccatttttaaaggtcagccccgctgccctttccccctggcagggcaaaagcggcccggtcgtgatgaacttcatcccctggcggactgcatcctgcacaaggttgatcagcatcgcgtctcgcaggcccgtccctacatattcaggccgaaaaatactcagcagcagctcaaggctgcgcacctcccggcggaaggcctcaaacttgcgcttgttccagggccggtggcgcccctccacagcccgtagcgcggcagccatatccggcagggcgatggtcgcgccggcaagcgcgcctgtccggtctacataaaggtggataaagcgcaggtccgcatagcgcagccagctctcctccagccgggcgcgcaccagcgcctcgggtagcagcctgccctgggcccgcgccagctggctggcgatgagtttaaacagcggctccgcccaggcggagaactgctcgccgttttccagcggcaaaagcctgactccctggcgtcgcagtaaaaattcggcgtaacgcgtctcccggctgcaaagcgcatccggcagggccacccggtattccttctgggtaaaaatcttggtaaagcccagcccttccaaatgttggagatagtattcgggctgctgcagggcaaaggcagaaccatcgtgcatctgtcccagcgccatggccccctggggctccagctccagcgcgccccgcgggccgcaaagcgaagcgtagcccctttgcgatgtctccttacaggcgctctcgatcaaggcggcgctgacctgcgtatcgtcgataaaatccaggcggtaaatggcggcctccgtccccacccctgcggcggggaaaaacagcgccatccgcccgcacacctcttttcccaccagcgccaggtagagccgcatctgtcccagcgcctccggtgggttgagcagctgctgttcgatcgcctgggcggccggcacaaaaaaggtttccccttcgtataactgctgaggaaaatccataaattttttcagctccgcattgttttcaacgcactttacccgaatcaaaccgcccgctccttttcctccagctcttgttatctttacgcctacgcctgttttgcccgcaacgccgtcagctgatcgatggtataatccacgcacgccatgacgatgggggcgcaaacgttattgcgcccatccgcgtccttaaaggcctgggcagccgcctcgccctcatcccggcaggtgatggcgccgcacttttcgctgccgaaattctggcgcatataatctgaaagctcctgggcaaaggcgtagagcgcagcggtgctgccgtccttcgcctcatcccgccccagcaatagccccgcggcgatcaggcacccggtcatggcgccgcaggtcagcccctgcccgccgatgccgcccccaaaggccgaggccgcgcgggagagggtcgtatcctggccaaagtggcgcagcaccgctttgcaggacgcctccgcgcagttcagcttttctccggcaaatttctcccgggtataatccgtatccgccttatggcgatagctcatctcgatctttttcatcaaagtcccctcctttacgcgggcttagcccgctaggcactattataacatagggaaaggcgcctgcaaggcgctttgcgcatttttacaaataagcaaaaccgcccgtattggagggcagcatcaaaaggcgcccctggccgctacacacgccttaatcacgcttagcggctataaaaaagccgcggcaaaatgcttctgccgcggcttttggctgccattttacagcgccgtttcctgccacacatcgccggagaggtccttccacaaaaaccggctgtcttccagcaccatatacccatggcggctgccctccttggggatggaaaccgagcccgggttgaggtaggtgtatccctgcgtttgccggcagaccggcacgtgggtatgcccgtgcagcagaatatccccctggcccagcagcggcggggtctgctcgttatagtggtggccgtgcgtggcgaagatcatctttccgccctcgtacaaaatgcagtaatccgccaggatggggaattccagcaccatctggtccacctcggtatcgcagttgccccgcacgcagagcagcttgtccttatgggcgttgagcagggcgatcacccttttcgggtcataatcccggggcagatcgttgcgcgggccatggtaaagcaggtcccccagcagcaacagcctgtccggctgctcgcgcgccatagcctcaaacagctgctcaccataataggctgaaccgtgaatatccgaagcgatcatcaacttcatcattatcaactcctttgggtttttacagcgcaaaggggcgcgcccgctccagcatgcggtcaaatagcggcaggtagatcccctcgtcccccgtggtgatcagctgcgtctgtccgcccgcagcgcgggaattgcgcagccccgcctcctccagcatctcttttaagtgccgcacggcgccctcgttgccatctaccaccttagcccccggaaaggccgccgccaccgctgggcggatcaggatataatgggtacagcccagcaccaccgccgcagcctggcgggccctgtccggcgcgtggtgcaaaagatactctacgatctgcgcctctccccgctcgccctcaatcaattccaccaatcccgggcagccgatagggataatatccgcctcccgcccggtgcgctgcaccaacgccttaaacttttgctggcgcaccgtagccgcggtcgccaatacagctacctgcccggccccagccgcctccagcgcgggcagcaccgccggctccatgccgatcaccggcaccggcagctgcgcgcgcagcacctggaccgccgcgctggtcgccgtattacaggccaccagcagcgccttgatgcccatatgcatcagtcgcccggcaatctccaggctgcgctggcgaatatccgcctcatcccggtccccataggggccgtacgcgttatcccctaaaaaaatggtatcctccccgggcagcgttttttgcagctgcgcaaggaccgtaagcccgcccacgccggaatcgaacacgccgatgggccgggcgcatcgttcatcacaaagcaccgccttgtcctccttatccagttccctcaaaacctattttggcactggaaaggggcccctgtcaaccctggcgctgggcgtttagcacgttgctcatggcctcggagagcaggtctgccgccgccagcgtttcctccagggtgtttttgttatgccccacctccaccagcagcgctttattggatacgtgctggttatagcggctggtggatttgcggatgggtttggccacgcccggggcgatccggttcagctcgtctgtgatctgctgggccagggcgtagttcttctcccagtccggcttgacggaaaagcccgcccccgtctgcccctctccggtgccgaccacgaactgaatctgcgcgatgggctgtccgttatactccgcagcccgctcgccggtaatgtaagcatcccggtgcacgtctaaaaacatctccaggctggggtgggccgccttctggttctccatggtctgcagcgaacgtacgtaggccgtgccatgcttgggcggctcatggttggtggtatcgtggatgatattgagccctgtgcgcgctacgatgccgtttatgatctgctcgcccacccgcaccacgttataattgttatcggtggtgcggtattccccatctccatcggcataggtattggcctctgtcttggtataggcttcagtggtatgggtatggtagaccagcatataaggctcgccctcgccctgtgctggggcctgggcgggctgttggggctggggctcttcctgctcggtggcgatctctaccacaatgccgtgttcggcactgtcgtccgcgttctggccgtctccctgcccgctttgggcggaagtggtaagggccagctgagtatcgtctcccttggccgcggcagcctgcgccgggccaaaattgagctggggcatgcaaagggtgagaaagctggccgggtcctccgtcaatcccaaaagattacgcaaacaacccgccaggttagaggcgggcgtgatgacattttgctcccgttcccgttccgcccgggcagcctgctggctgcgggtgtaaaaaaaagaacgcagcaagcgctgtgcccccgtctgccgcgtttcaagcgtttcctcctccagggcctgtccgctctggcctccgccctccggcggggcggccatggctgtgaccacccccgaggccggctgtccgctgggctggctctggtgatccgtgctgcccttccataggcccgccagcagcaccagcaccaggatcgccagggccactacagccagataatacaggatttgtgtgatcttccagaccttgatgcgaatcatgctccccaccccttaaatcgcgtgcgttaaccgctttgtgatttatgtatatgccctcggggcaggggattatgccaagccttgcgattaaaaagggaaggcgcgtatctcctcaacgctcaggtttttgtgcagcgccaggttcagtcccagcgccagcacgctcgcggcctgcgccaccagctcgtcaatgtttttgggggtgaccaccatatcccctgcgccggccgcctggcgcagcagggccagcaggtcgtctcgggatacagcgcgggtaaaggcgccgaattccccgccgccctcctcctttagcgcgtccagcatctgctggaaggcgtcctgggcgatggtggaagcatacaccaccgtgggcacgcccagggccagcaccgggcagcccagcgctttggcgttcagggccgagcgcatattgccaagtccgctgccgggctggatgccggtgtcgctcaactgcagggtattgcctacccgcgcggcgctgcgggccgccagggcgtcgatacagatcaccaccccgggtttgatgcgcttgaccaccccgcgcaccacctcggcagtctcaagcccggtcacccccagcacaccgggtgcataggccgccaccggccgcagccgttcatccaccgcctcgggcatatattcgatcaggtgccgggtcaccatcaccatctccagcgctttggggcccagcgcgtccggcgtggcccgagcgttgcctaagcctaccaccagcgcggtgccaaagtccccgggcagtagttttttgatctcctgcgccagcgctttggccagatgctcccgccgatccatatcgctaaaagcctcgtcggtggcatccagcgtcacataacggcccatggccttgcccagcgcgcgcgcggcggccggggtattcacctgcacctgatagacctctacgccctcatcctcccggctaatggtctccacgccatccaaagtacccatggccgcgctggcctcccgcgccaggtccgtccgtatatttttttgcatatcaacgcccccaatcttgctattcccttgcagtttaggccttttgcggcgggtttatccggttttttacaaaaaagccttgcttaaaatgtccaagcatggtaaaattttatcgctgaagtcataagggggtgaaccatatgccgaatattaaatcagccaaaaagcgcgttaaagtgatggaaacgaagaatatgcagaaccgcatggtgatgtccagccttcgcacgtccattaagaaatttgaagctgccgtcgccgctggcgaagccgacagcgccaagaccctgtacaaatccgcttccagcgcgctggataaagcggtcatcaaaggcacgatccataagaacaccgcgaaccgtcagaaatcgcgcttggctaaagatatcgctcggattgctgaataagtaagcgtaagaatagagaacgtccgttttgcggtacgttcttttttcatgcccggtttataggcaaaaataccgccccggtctttttaccgtgtggcggtattatatcttgatagcctctaccctgcaattttaacctaaaatattcgctgcaggcaaatatcaactacaggtacagccttcattctggtcaaaagtttcacaattcaaacctctcacctatctatgcaggaaatggcacgtggacctgcgtaggatataacctttttgtcaccgccatgtttattgagcaagctaaaaaaatgggcttacattttagcgatgtaagcccgaaggatgagaggtatgtaatgaagcaaatatcgaagatattatccattatagttgcttaccattacaacaaaataatggggaagcgggaaacccgcctccccataatatttcgtcaaagatttaacgtgatcggtcagttaatcctgctctttgatgatcgtctcgaattcagcctgaagatcttccagcgtcttcttcatgccggcttcatccatcgtcaacgcagcctgcatgcagatcatgtcatacttctggccctcggccatagaggcgctgggtacaccagcctgcagcgggtagcacaggctaatagagttgctcagtacattcttgataacatcctgacgatagtctttctggaactcatccagctcgtccatgaagctcaagcgcgccggataaccatcctggccgccgctgacccacagatcctggctgttctcagagtaccattttaggaatttcatggcctcttctttgttctcagactgctcgaataccatgtagccgttaatgcacagctgctgtttctgaacgccggagggcgatttcagcggaggcagtacgcagacctgatccgtggtgaagccatcattcgttacggcattcttgtaatcgccgcaggatttgatgcagataccagccttgcccgcattaaagagcttggtggcgtcctcacccgcgtaaccctcaataccatcgggcaggcagccctcgtccttcagggtacggaataacttcattacctgcaggttgcgttcgttgttaatattggccgtgccatcttcattataaagcatgccgccattaccggttgccatggacataaacggaccggcagcgttcgtggtaacaccaaagaccacgccgtaggtttcggtgctcttatcggtaaaggccttagctacctcaataaactcatcataggtggtaggcacaggcccttttcctccaaccagtccttgcggatatacatcgtccgcgggtcatagttgaaggggacgccgactaccttatcgttatagacatagtagtccagcatgccctcgaggaaatcatcggtcgtgccttccttctcccactcttcgatgatccagcttaaatcagcagcctcgttgtttaccgcgaactggaagggcataaaaccgccgccgatggccacatcaggcgcaccattggaagcaacagccgtggaataggtctcgaaccagttggcccagggtaggttggtgtaattaatggatacgttcggagccacctcagtggtgtacttctcgataatgccctcagccgcagcagggaaagtctccgccgggccccaggccatgtcccagtactccaaagaaaccggttcagcgctttccgcgctttcagatgccgcggcactcgacgaggccgagctggcagagtcgtccgcagcgggctgcgagcatcctacgattgagaatgccatagccacaaccagcaacagacacaaggcgatagagttgcgttttgacatgtgtgtagtcccccttttcttttgctacgatgagctaatatgaatcaaacggccgccctctgattttccgtttaagagcgcccagtgattccacgattttgaataacaatccccaagtcccaagcaatgtgtgtacaggcaccaaagggggccgagccgcgcgcatcgccggccccatctgggctataaaggaacacacatccgctaaaaatctctttgcattagtgcttttaagctgttatccgccaagctgaaaaactgaactcctttctatggtggcgattaaccgtctttctctttaagcaccttcatcctggcacagaatttgcggtattcaagaggcgtctttccgtattccttctgaaagatcttgcggaaaaagctctcattgctgtaaccaatcttattgataatctcgcttatcggaagttcatcttttcgcagcagcttcgccgcctctgcacagcgtacttttctcacgatatcgccaaaaggcatttgcatattgtcattgatccaccggctcgcataagagggggaataccccaaaactgcggcaaccttttctaatgtaatatcttcgagattattcctgatcgtttcgtgtaccaaccgctgtttgtgcgaatagatctcgtcgtttggctttaaaagatcgatcacgtaatctacctcgtcgccggtagggatggaaacagccgagccttggcgggaaacggccagcgctgccgcaaaagccgcatgtttcatcgcctttgccgcacactttgaggcagctatcccggccaaaaagtagcctgtaaatgtatcgtcgccccctgtcgtatccaccacttttacgcggtacgaaggctgaacgatggtttgctcatggtcgatataaaggctgcccttttcgcccagggtaaggactattttcattgccggataggcttgcgtaatgtattctacaaaggcctccaggctgcttttgccggataagctattggcctcatgctcgttcagaatcaaataatctattttattaaggtcgatctcatcaatcacatcgttatacggagagggattcagcgctacgatcatccccttacctgccgccttttccacgatgtaggggacgttacttatctcgttttgtaacagaatgtaatccccttttgtaaattcacgcaggacctcatcgatatactgaggcgttatttgtaggtttgcgccgccataaacgataatactgttcttgccggttttatcgacctgaacaaccgtatggccggtttttgactcgaccctctttagcagttccagctttgcgccacttgacgccatgatctcgcataattctacttcgtttacaccgacgcatcccgcatgaaaaacctgtgcgcccgcgcgcgccaaagcaaccgattggttaagtccctttccccctggaaaaagctgcctgcttttacaagaaagcgtctcgccctccttggcgatatggtctacacgatatacataatctatattacaggatccaaaattaaggatcttcaacgcaatcccccctggttatttgtaatataccattgggaacgccgcaaagaaagcgccatttttatccattttcgttccaatttttacaaattatatacttattgactctcaaattttacaattatgacgcatattgtttttatttggtctagattttttatattggttgagtatcatactttcattcaataaatccggcaaattatctacacggccgtgcgctttcgttttccatggggcgcatcgggatgccatttacaccggaatttttcagatttgtgtataaaaaagcgcccccgccgggggcgcttttgcgcttgggttcgctattctttgaagatgtggatatccattaccagggcctgcagcgccagatgatcttcccttatctgcccgcttttgatctgccaatccagatcggcgcaggctttcagggcgtgctcgacctgggcgggggtaaagtttttggcctggcccgcggccttgcgcaccgcaaagggcggggcctccagctgcttttccgcctcgcccttgggcagggcgcgggagagcagggccgcgtaacggatcagccggaactgccgggcgatcatggccaggatgcgcaccggcgcctcaccatcgtgcagcatctgctccagcgccgcctgggcctggggcagctggcgggcggccagcgcgtccaccatttgaaagaccgtaaaagccgtattgcgggtagccgcctgctccacgtcccgggcggtgatctcatgccccggcgcgaaggctaccagcttttgcagctcctggtaaagatcctccaggcccgcgccggtgataaagctcaaaagctccgcagcgttctgggcgatctgcttgccgctgcggcgcgcctggctctggatccagcgcacccggtcatgctcgtttaggggcttgaactccaccgtgcggttcagcttgccgatggcctggctgagcttgagccgtgaatccgccttgccccggcaaaagaacaccaggcaggtggtcgggctgatgtttttcagataatcggccagccgcgcctgtgctgatgcctcctctgcgccccggccgcccttcaggccgggataatccttgaccaccaccagccgtgccgggctcatcaggggcagcgtttcccccgcggcaatgatggcgtccgccgtggcggcggccccgtccagcaccgtatagttcatctcccgggtggcttcttccaggcagcgctcctccaggcgtttgagcatgctgtcctttacaaactcctcttctccgtgaaacagatacacgcccgcgggcgtctcgctctggtcgatctgttttaagaatgcgttataatccatggtttctcctttggcgccgccttttccttaataaaataatcgatatgcacccttccatcccgtatcgagacggtgagcgcgcctttttcatccgtgcgcagaacctgcgcgccggcctcatacagccgcatcagcgtttccggcgccggatggccgtaggtattggaggcccccaccgagatcagcgcgactttgggcgacacacggtgcaaaaagtcctcccctgtaacattgccgctgccatggtgcgccactttcagcacctccgccggcggcatacgctttagcaactcttcctcctcgttgggttccaaatcgccgcagatcagcatggtcatgccctgatattcgatctccagcaccagggagcgttgccccttttgcccttcctgtggagagagcacccgcacgtttaccccatcccaggccagcgtatctcccgcgcccagcacctgtgtctgtgctccacagcccgacagggcggcgtttagcgcctgccagctttcgtccggcgcctcagaggaataaaaggtctgcggacgcatggccctgaccaccgctgccatgccgcccgcgtggtcgctatgcagatgggtagccgccgcgccctccagacgggtgatgcccatggcgtacagcgcgggcaccacccggctctcccccagatcatacccctcgtccgccgggccagcgtcgatcagataggccttcccgcccggggtctgcagcaccatcgcgtccccctgacccacatccagcaccgtcaaacgcagctccccgcgcaggggcagccagccgatgaccgcccccagcgccagcaccgcgcttaagccgatgcaaagccaggatttgcggtagatacggtcgaaaaaatcgtacctgccgcaaaggatgagcagcagcgccaaccccgcgatccacaagggcgataagggcggcagatgtaccatactgcccggaatatccgctacccatcgggcgccatccagcaaccagccggccagataggccaccacatcccccgtataggccgccagcgcggggaaaaccagcgctggcagcagtgccaccaggcccgccagcaacagtaccgtggcgtatggcacggcgatgatattgcagaccagcgagaataccggtagctcgtgaaagtgcgccagcaccacgggcagggtgcccaattgggccgccaccggcacggccaaggcggaggctgcccaacgcggcaggaaagtaagcgcccgctccaggggcctggccagggcgatgagtcctgctgccgcggcaaaggagagttgaaagctcagggtgaagatgtccaaagggctgaagattaaaataccccagaataccgcggccagctgggtgggcgcatccaccctgcggccggttaagtccgagagcaataccacgcacagcatcaacgccgcgcgcacgatggagggcgtaaaaccgactaaggtacagtacagccccatcaccgccaccgtccagattgcacgggtgcgccgcctggcgtgaaacagtttaagcacggcccataacgccccggccacgatgcccgcgtgcaagccggatgcggcggtgaggtgcgaaataccggcagcccgcagcgcttcctgatccgcggcggaaagcgcatcggtattgccgatcaggatgcccttcatcagcggagcgctggccttaaacacctgctcgatctggccggttacatagccccgcaggttttcggcccagacggccggcgaatagggatcggccggctgtaccagtgaaaaagcctcgccccgcatggtaaaaaagatgccatcagccttattgggcaaggtataatccaccccgccgggattggtcgggccgcgcaggtgttcgatctcggtgcgcagggtaacggtctgcccacaggccagcgtaaatgccggctgggtatagctggtcaccgcggcctttccctccagcgcccggttctccttttccagcacgatatggtccagcgtcaggcggagcgtatccccatcctgtcgtacctcctgcgccacgccgcgcaccagcacctgccctgtgggcggcgtaaagccctgcatatccggaagcagcgcgcaaaacgcggctaccccgcccaacagtaccgcggcaaagcaggcggccagccgcctgcgtccacccaaccaagcggccaatgtcaggatccccgccagaacgatgcaaaagtcctgcccgccccattccagggcgcgccacaccacgcccagcgcatagcacagcgccagcgtcatcagcgtacgcgttacccgtggctgggcctcattgggcagggcgctttgcttttccggcatcatgaccccttcctctacacctgcagcgccatccccgcctcagccaccgccgtgcacgggaagatcgcctgcgcctcctgcaagcgcacctgcgggttgcagcccggcccgccgtgggtaagcagcagctgccccacccctgcatcccgcgctagttcgccgcacttttggggcgacaggtggggtgccgcggccgaccagtttttgtgcagcacgccgctatcggccaccagtaggtgcgccccccgcgccagaggcagcaggttatcacacacgttggtatcccccgtataggctaggatgcgatcttcgcactggatacgcatgccatacgcttccagcgggtgattcatgcgcaaaaaggtaaaccgcatacacccgatctgcgcctgcatgccgtctgtgatgacgtgtacgttaaagtagtcctcgtccgccagcagtgcatgctctcttgttgggctggccggcaggtataaatccatcttatgcgctgcgggcagcaacccttgggctttttgcgcctgcaacacgtggcgcagtaccagtgcgtcggacatatggtccccgtgcaggtggcttagcaccagcgcaccccaacgctgcggcggcgtggcccgaagcagccgctccagtacgcctgtgccgcagtccaaaatcacccgctgctccccctgttccaacaaatagcctgagcaggccccattcgcctgcggataggccccatcgcagcccagcacttttaagatcataacgcttccccccttaaatttggcgcgcctcgcgcaccaggtcgtacagcatgatacccgcagccatggccgcgttgagcgattccgcccggcccaaaatgggcagtttatagcgcgcatccgccgcatccagcacctcctggcggatgccatgggcctcgttgcccacgatcagcgctttttttgcgggatttgcggggcgggcgtaaaaatcgctcccgttcaggtcgccagccagtacaaaatatccctggcctttgaggcggcacaatgcctgtaccagatcctcgacttgaaaggccggcaggtggaaaaagctgcccatcgaagcccgtactgccttgggatggctgggctcgacgcaccctggcgagagcagtacgcccgagcagcccgccgcatccgccgtgcggatcagcgtgcccaaattgccggggtcctgcacctcatcgagtaccagcaggttgccgcccagcgcctctgggctctcccacagcgccggttccgggcggcgcaccaccgccacgatgccctggggcgagcgggtgtcgctgatgctgtcagccatcccctcgggcaggaggcagacgtcgccctcctttgcgtaatcctcgatccaggatagctgctcgagcaacccttcctccagcaaaatggtttccacctgcacgccgcttttgactgcctcttccacagttttgatcccctctgcaacgaaaaggccggttctctggcgctccttttttaattttaacgcgcgtgcctgttttacggtggcgttctgcgcgcttgtgatcgggcggataggcaaggcagtttcccctttctggctgcgttttcatattattataccgcatctgcgctttacgcgccatccaggcagagtattttgccaaagcggtgaaggagataacaaaaagcccggagcatcagctccgggctcatcttttgcgctaacccttacttcacctgggctttggccatctcggccagctgggcaaaggcggccgcatcgttcacggccaggtcggccaggatcttgcggttgatctgcacgccggccttgttcagaccgtccatcatacggctataggagatgccgttgatgcgggcagccgcgttgatgcgggtgatccacaggcgccggaaatcgcgcttgcgcagcttgcggcccacataggcatagctcagcgccttcatcacgctctggttggcggcgcgatactgcttggaacgggcgccaaagtagcccttggccagtttaaataccttacgacgtttcttatgggcgttaacagccctttttactctcgccattgtttaaatcctccttcaagcacccttacttatacgggatcagtttctttacgaccttggcctccgccgcacttaccagcgtggccttgcgcaggccgcgtttgcgcttggaagtcttcgcgtttagcagatggcgcttgtaggctttgttgcgtttgatcttaccgctgccggtcttgttaaagcgctttgcggcgcagcggcgtgttttcatcttgggcataaaccgtcctccttaatccttgatcggggccaggatcataatcatttgcctgccctcgactctgggttgacgctccacagtggcgacatccttgacgatctccaggaatgccttcatcaccgtgaggccgacctccgtatggcttaactgtcttccgcggaaacgaatggagactttgaccttgtcgccgccctttaaaaacttgatggcgtttttggctttgacgttcatgtcatgttcttcaatcgtagcggagaggcgcacctcttttaaatcgacgaccttttgattcttacgcgcttcacgctcctgtttggccgcctcaaaccggtatttgccgtaatccatcagcttggctaccgggggcttgcccgtaggggcgattaaagccagatccaattcctgttgttcggccaaagccattgccttgtcccgggacatgatgcccaactgttctccatcctgcccgatgacgcgcagctcgcggtcgcggatctgttcgttgatcatcaattctttaataggaacacacctccacaaaataaaaataagagcgggcagaatccacccgctcttatcgtaattcatccactatttaccgtcacgatagacctgcaagcgcaattaccgcaggtgagaagcgggtaggcttctacttaagacttagatagtatatcacgctaaaatgccgctgtcaactaattttccggatccagcgccttttcggccacttctttttgtatcttagccaccaggtccgccttgcccatcacacccaggctgccggctttgcggtggcgcacggcgataacgccgctctccatctccttatcgcccaccaccagcatgtaaggcaccttttccacctgcgcctcgcggatcttaaaaccaatcttctcgttgcgcagatccacctcggtgcggatgcccatatcgtttaattcatcgcacagctgctgggcgtattcgtccgcgcggctggtgatggtcagcaccttgcactgcacaggcgagagccacagcgggaaggcgccggcaaagtgctcagtcaatatgccgatgaaccgctcgatagagccgaacaccacccggtggatcatcaccggccggtgcttttcgccatcctggcccacatagcttaggtcaaagcgctcgggcagctggaagtccagctggatggtaccacactgccaggtgcgtccgatggagtcctccaggtggaagtcgatcttggggccgtaaaaagcgccgtccccctcgttgaccatgtaatccatgcccttggcttccagcgcgtcgcgcaaggcctgggtggcgcgctcccaatcctcgtccgaacccatggaattctccggccgggtggaaagttccacgtggaatttgaagccgaagatatcataaaaatggctggtcaggtcgatcacgccgacgatctcgtccttgatctggtcgggcgtcataaagatgtgcgcgtcgtcctgggtaaagcagcgcacccgcatcagcccgtgcagcgcgccgctaagctcgtgacggtgcaccagccccagctcgcccatgcgcaccggaagatcccggtagctatggatcttgcgctcatacatcaggatgccgcccgggcagttcatgggtttgatggcaaaatccacatcgtcgatcttggtggtgtacatattctcccggtaatggtcccagtggccggagcgttcccacagctgacggttgagcatgatgggggtcttgacctcctgatacccgcgccgggtgtgctcgctgcgccagaaatcctccagcaggttgcgcagcaccatccccttgggatggaagaaggggaagcccgggccctcgtctaagatgctgaacagatccagctcccggcccagcttgcggtggtcgcgctttttagcctcctccaggcggaacagatacgcgtccagctcgctctttttatcaaaagccgtgccgtacacgcgctggagcatcttgtttttctcgttgccccgccagtaagcgcccgccacgctcatgagtttgaacgccttgatcttgccggtagagatcaggtgcggccccgcgcacaggtctacaaaatctccctgacggtaaaagctgatgaccgcgtcctcaggtaggtcccggatcagttccaccttataaggttcgcccttttcctgcatgaaggcgatagcctcctctcggggcagttcaaagcgctccagcttcagatcctgcttgatgatggcctgcatttccttttcgagggcggtcagatcgtcggtagacagggtcccgtccaaatcaaagtcgtaataaaagccgttgtcgatagccgggccgatggccaacttcgcctcggggtgcagctttttcatggcctgggccagcacgtgggatgcggtgtggcgcatggtccagcggcccatatcgtccgcaaaggtcaaaaaggtcactttacaatcctgctctaagggcgtggtcagatcccgcgtctccccgtcgatctccacggagagcgcctgccgggccaggcccgcgctcaggctcttggccacgtccagggccgaaatgcccttttcaaattctcgggaagatccgtctttaaaagttacctgaatcattgttccctccacctttcgttaaggctggccgcatcaaaaaagcctccgcatctcatgctgcgcatgggacgagaggcatttctcccgcggttccacccaaattgtcaaaaccacttttacgggcttaacgcgcccaagacgcccagcgatcgggagttggtattcaccttaccggccgtacgggggcggcttgcagcccatggcccgccctctctgttccgccgttgccgtcggttacttaggtctccttcgcttcgccagaatcttcaatatttatgctgattatacgcccggtaacaggtctttgtcaaggccggcggccctgctcgccctgccctttcccgtccgtgggcgggatgtttttgcggggcagccgccccttccggtggcggggacgggctttagttggggcggcatcctccacttcggcttgcgtgccgggacgaaacttttcctccggcgtttgcttgccgcgcagcctgcggccaaccaccttgcgcagcagcgcatacagtaccgagcacagcggcacgcataccagcatgcccacaatgccaaaggcgctgcccccggcgatgaccgctaccagcacccacatggccggcaggcctacggagctgcccaccacccgcggatagatcaggttcccctcgatctgctggagcaccaacacgaacaccacgaaccagaacgcctggatcgggctgaccatcaggatcagcagcgccccggtggccaccgcgataaacgcaccgaagatgggcaccagcgccagcacgccgatcagcaccgagatcatgcctgcatagggaaagccgaagatcatcatgccgataaagcacagcgaccccaatatcgccgcctcggttacctggccggagaggaacttagagaatatccggttggaaagctgaccgacctcgatcaggccatccgcctttttctcgggcaagaaggcataggccagctttttaaactgaatgctgagcttttccttttgcaccagaatatagatagaaaacagcatccccataaaaaaggtaaatacggtattgaccaccgaagaggccgcgctaaaggtggtattgaccagggctgtggcgctggagcgcagaaattccagcagggcactggagaccttcggccaatcgatattgacgttagggatgaaatcctgatattccggaaagcgctcgcccagctcttttaaccattggctgacattgttcaccgcctggggcacgtaatcggcaatctgcatcagggtactggccagctgggggataatcaaaaacaacacgatcaccaataccgccagcaccgctaccagcgccatgaccagcgccagcggccggcgcagcctctggaccaggtcgggataatggcgtttgggagaggcgaacaggtgccgctcaaaaaagcgcatgggcacattgaggataaaggccacggcacttccaaatataaagggggataagatccccgtcaccacggagaataccccgcccatagagctgatgttttgcagcagccagtacagcaggatgccaaaggcaatcagcatcgccagccttttcatgtttgaacggttcagttccatcttgctctcctcacgcatattgactcatgtttatagtgggccggggatacccttccccgcttattattcgatgccgcggtacttttcgtccacctgtgcgaccaggtaggccaccgcccggttaaagagcgcctcgccctgggcggcggtcgcctcccgcgggtcgccgtactgcacggtaaagtccgcattggggcggccggcaaaggcctcgccatccgccatgccgtgcgccttcatctccaggggctggcctttgggcggcagccgggtcaggtctaccgaatcgggatgcaggtaaagctgccccgccgtttctcccaacgtggcatggcctcccatagcaggattgtctaaatcttccggcgaaaaggggaatatggccatgaccgtgctctgcgtttcccctgtaaactcccgggctagccgctccagcacggcgccctggttggtagccccatggccgttgaccaacacgatcagcttgtatccaagggcgaccatcatcctcagctgctcgcgcaccaccagagaaaacacctcttccctggcgtacatactcttaactgcaagaccggggaagtccataccgactacatactggtccgtatcctcaaagcccatgttgtgcagatcctccgggctgcgctcgcgctccgtgcccaaaaacagggtaggcatcaccacgccgccgcccacgcgtgccgcctggcgggcgatggcctgcgccatcagcgggtccgtgccaaagggcagcgccaggccgtgccactccaccggaccgatgggcagatagaccaccgatttttccgccttgcgcgccagcacttcctccgggcgcatcaattcataccgtaccgtcctcatattcttcccccccccgttaaagcgatcaatcttttggggccgtttccgggcagttccgcctccagaggcgaaaaagccctgttgggcccatcgctttcatgataacatattccggccgtttgtccaacaactctaaaggcccgccgcttcaataaaaaaggcgaaggtctttgtccgtcttcgccctttttaaaatattctattttacgcatcccacaaaaccacatgccctgccgcgcgcgaccgtggtacgtcgatcaaccgctggttggatgaaccgcgaaagcgcagggaaatatcctttttcgcctccacatagcgcccgtccaccagcacgtcgatcagctccagcatcggcgcggtagcctcgcaatgcgggtggctgcccggggtgtgcatctcctcccaggtaaagccggaaaaggcccagatggtcttatgggggtaccgctggcgcacccggcgcaagaagggcagcaacgtccgttgattatccggctcgaagggttctccgcccaacagcgtcagcccgttgatgtgttccggcgccagcagcgccagcaattcctcctccgtttccccggtaaaaggctgcccgtagctaaaatcccaggtctcgggctgaaagcagtgctcgcaatggttggtgcaacccgaaacgaacagcgtcacccgcacgccctcgccgttggcgatatcgcagtttttaatctcaccaaagtgcatgttcttcctcctccggtcaaaaaaggggcatccgcttgggacgccccttgcccgctattccctttacaggtgcatcacgcgctctttgatctcctgcgtgcgcccctggttccagaactgcgtaccgatatagccacaggtgcgacgcgctacgttcatcttatcctgatcctgattgccgcactgcggacaggtccacaccaatttaccatcctgctctacgatctcgatctcgccgtcccagccgcacacctggcaataatcgctcttggtgttgagctcggcatacataatattatcgtagataaagcggatcacctgcatcaccgcctccaggttgtgctgcatgttgggcacttctacgtagctgatcgccccgccgggagacagcgcctggaacttggattccagggccaacttatcaaaggcgttgatctcctcagtgacgtgaatatggtagctattggtgatatagcccttatccgtcacgccctcgatgatgccgaagcggcgctgcaggcacttggcaaacttataggtagtgctctccagcggcgtgccatacaggctgtagtcgatattttcagcctttttccacttgccggtatattcgttgagcttttccatgatcttaaggccaaacgcctcgccctccggctcggtcagctttttgccgatcatagcgtacacgcactcccaaaggcccgcatagcccagcgagatcgtagagtagccgccgtggagcagtttatcgatcttctcaccctttttcagccgggccagcgcgccatactgccacaggatgggcgccacgtccgatacggtcccggtcagccgctcgtggcggcactgcagggcgcggtggcaaagctccatgcgctcgtcaaagatctgccagaacttatccatatccttgccggccgaaagcccgatatccaccaggttgaccgtgaccacgccctggttgaaccggccatagtatttaggcttgccctcttcgtccacaaagggcgtcaaaaagctgcggcagcccatgcaggtataacactggccatcgccgttttgatccaccttaagctgcttcatgatcttctcggagatataatccggcaccatgcgcttagccgtgcacttggccgccagctcggtcaggtaatagtagggcgaatccgggtggatattatcttcttccaacacatagaccagtttggggaaggcaggcgttacccacacgcccttttcgttttttacgccctgatagcgctgctccagcacttcttcgatgatcagcgccaggtcctgcttctcccgctcatccttggcctcgcccaggtacataaataccgtgacaaagggcgcctggccgttggtggtcaacagggttaccacctggtactggatggtctgcaccccgcggcgcacctcttcgcgcagccgatcctccaccaaatcgtggatcttattgagcggcacatccacgccgatgtttttgatctcctggagcacctgctgacggatcttctcccggctgacctgcacgaagggcgccaggtgcgccagtgaaatagactgcccaccgtactggttggaggccacctgggcgatgatctgagtggcgatattgcaagccgtggaaaaactgtgcggccgctcgatcagcgttccggtgatcaccgtgccgttttgcagcatatcctccagattcaccaaatcgcagttatgcatatgctgggcataataatcggtatcgtgaaaatggatgatgccctcattgtgcgcctctacgatctcctgcggcagcaggatgcggttggtaatgtcgcgcgagacctcgccggccatataatcccgctgggtggaattgaccaccgggtttttattggcgttctcctgcttggcctcttcgttattgcactcgatcaggctgaggatcttatcgtccgtggtgttggactggcgcaccagggtacgggtgtagcggtaggtgatataagccttggccacctcaaaagcgccatgggccatgatctggtgttccaccatatcctgcacctcttctacgctgggcgaacgccccagctgctcgcaggagagcactacgctctgcgcgatccgctggatctgcatgggcgtcatgcgcgctttttcctccaccgcttcgtttgctttgccgatcgcaaccacgattttcgtgatgtcaaatacggcctccgagccatttctcttgatgatcttcatagctgcatccccttaggtctatagtattcattaatgagcgtatcactatatattgtatctcgaaccggtattatagtagcatatctggtattttgtgtcaattaccctgaatatcgctttaaaacgattctcggccaacctcctcattctagcacgcattttctcggcatttcttcggtaaaacaaaatatctttaggctaaaaaatattttttgctcttttgggcgatgggggataaacgccttaccggcctgctgggaaacgcgcctgcggtacttttataggatgtccaaaagtgcatcgctgagagtcgataaggcttaatgtaatcagctctagatttaactgtgctaattttacacaacaaaaaagcacttagcgatatagcaataccgctaagtgctttttcatttatttataggttctgggcagttcccacgccagatttataccgcctgtttacgccctccgctttttctgggcgaaggtcaaaatcataaccgcggccgagaggaacaacagtgttgtccaaaggcccgcattcgacatatcccccgtcttaagcgaggattccggtactttaatggtaaattcggcgctggtcttcccctctgcaaacaaaatctcgatctgatggctcccggcattgagtgtactgagataatgctgcttcagcgttaccactgtaccatcttcagaaagcagataatccgcgcggctcagtgtcttcccatccaccaggatttccgtcaccgttgccgattcggcatccaaaacaaattgtaagtcctcgttactttcctgcgtccagatggcgcctacgcccttgcggatagaaatcgctttaggttgttcatctttgccttcgttctttggctcttccgccgcagcttgggtcaccgtcactgtcatatcggcgtagggacccatgctgtcgatccacagggcacgtacggtcacctcgccaggttgctcacccgtcaacactccttccttcgaaatgctggccttacccgttccattgattacagtccagaccacctgactgtcagaaagactgtccggtttgatcgtagcgaccatctggagcgattctcctaacgccacctcgtttttcccgtctttaccgctaatgctaaactcggtgggatcggtaatgatttcccctttatacaaagaaacatctgcccttacatcgtgatccagcaaattaatcgtaccataggaactcatcatgtatcccgctttagtaattacaagattatacaaacctttttccagatctttgaactcatacataccatcgggccctgtagtagttcgggccacctcgacggtctgatcgccctcccactttttgatcacgacctgcgcgccctctatagggatattaggcgaggaaaatttttcaaaaatcaaccccgtaacgttatacgttagtcgttcttccatttggaataccatatcgctggcatcgccggtaactgtatactcatcacgaatttcgcaatatccattcatttccacagaaagaatatactgttgtgcgtatacccctacaaccgtaaattttccatccgcgcctgttttcccgttgctctcagtctccccagtgccgggatcgatcgcgctgacccatgcaccggcgatagggttgccggtagccttatcaactaccgtaccactcaggcgatatggcgtggcatgcatgctaaggtccttttgcaggttttcctcttgcatatagactctatcctcggtaatggtggaatagtgcggcaattccccctgaatgcgatattccgcatagggtgtaacatcagtaatactatattggccttcttcatccgtgtatacggccgccaaaatattcgacgggtcgccgcttttagcagcgttacctttacgttttccaatggtgcctgtgtcccaatgtcaactaccttacccgaaatggtaaggcctgctgcatgtgcaatattgggcaccatcacacatgccagcagcaacgttaacgcaaatgccaatgcttttctcgcagccattttaaattttctcatcggttaatcccctcttcattttgatatgcgcaaataaaatgtcgaatagaaatgagttcagcgcttagtcagtgccgcatcagagaatcttttatacgcttaagtatatcaaaaggattgcaaaaggcaatatctcatgtttgacttggtttctgaaatgatgcgagatacccccattggatatttgtaagatatttaacaatagaaaataagtgatatcctttttgtgtctggctccccgtgttggactgagaacccaacggtcctctgttcgctatggattcgtcctgcgcagcataattgctgcgcaggacttatctcatgctcacagaaatcatcgcgcccgccgccggtggcggatgggcgctatagatttccctttggttaacgccgcgcggctgttaaccgcagatgctgcccaagttcagcaaggataactaaaacaaaacacaccctatgttatagggtgtgttttgtttggctccccgtgttggactcgaaccaacgaccctgcggttaacagccgcatgctctaccaactgagctaacgaggaataacatccggcagcgtcctactctcccgggccgtcaccagccaagtaccatcggcgctgaagggcttaacttctgtgttcggtatgggaacaggtggttccccttcgccatcgccaccggaatccttcgagggttcctcttttatcccctcaaaactacatcaattcagctttctgcaatttccactactcttccactacaacttcctttgatcaagccctcgacctattagtaccagtccgctacatgcattactgcacttccactcctggcctatcaccttgtcgtcttcaaggggtcttacttcctttcggaatgggatatctcatcttaaggtgggtttcacgcttagatgccttcagcgtttatcccttccgcacttcgctacccggctatgctcctggcggaacaaccggttcaccagaggtgcgtccatcccggtcctctcgtactagggacagatcctttcaaatatcctgcgcccgcgacggatagggaccgaactgtctcgcgacgttctgaacccagctcgcgtgccgctttaattggcgaacagccaaacccttgggacctgcttcagccccaggatgcgacgagccgacatcgaggtgccaaacctccccgtcgatgtggactcttgggggagatcagcctgttatccccgaggtagcttttatccgttgagcgacggcaattccactctctaccgccggatcactaagcccgagtttcctccctgctcgagatgtctctctcgcagtcaagctcccttctgcctttgcactctgcgaatgatttccaaccattctgagggaacctttgcgcgcctccgttactctttcggaggcgaccgccccagtcaaactgcccgcctgacactgtccagctgccggcttacggccagccgttagaatccaggcaacggaagagtggtatcccaacagcggctccaccaagactggcgtcctggtttcaatgcctcccacctatcctgtacatccattacccgaacccaatgtcaggttacagtaaagctctacggggtctttccgtccgatcgcgggtaatgtgtatcttcacacatactacaatttcgccgggtcccttgttgagacagcgcccaaatcgttacgccattcgtgcgggtcggaacttacccgacaaggaatttcgctaccttaggaccgttatagttacggccgccgtttactggggcttcggttctatgcttcggttgccctaacatttccccttaaccttccagcaccgggcaggcgtcagcccgtatacgtcgtatctctacttcgcacagacctgtgtttttgctaaacagtcgcttgggcctcttctctgcggcctctttcgaggcactccttctcccgaagttacggagtcattttgccgagttccttaacaagggttatcccgctcgtctgaggattctctcctcgcctacctgtgtcggtttgcggtacgggcacctccggattccttagcagcttttctcgccagcgtgatttacccgacttccctactaatttcagtccccatcacacatcatccgtacttgacgcgtacttcactacgccaaagactctgtgcttggacagggctgtccatcaccctgcttcggtcaaccttctgtgtcactgcttcagtcaaacacccttcggtggtacaggaatctctacctgttgtccatcgcctacgactctaccgtcctcggcttaggccccgacttaccctgagtggacgagccttcctcaggaaaccttaggctttcgacggaatggattctcaccattctctcgctactcataccggcattctctcctctatgcagtccacggctcctttcggtaccgcttctgcccgcatacagtgctcctctaccaacatttctgttccgtggcttcggtggcaggtttagccccgttacatcttcggcgcagaaccactcgaccagtgagctattacgcactctttaaatgcgtggctgcttctgagccaacatcctggttgtctgtgcaattccacatccttttccacttaacctgcactttgggaccttagccgacggtctgggctgtttcccttttgactgcgaaacttatctcccgcagtctgactcccataattcaattatccggcattcggagtttgataaggttcggtaagctttgtggccccctagcccattcagtgctctacctccggtaatcatttatgaggctagccctaaagctatttcgaggagaaccagctatctccaagctcgattggaatttctccgctatccacacctcatccccgcctttttcaacagacgtgggttcggtcctccatgggattttactcccacttcaacctggacatggataggtcgcctggtttcgggtctacgtcatgcaacttgtcgccctattaagactcggtttcccttcggctccagcactttatgccttaacctcgctacacaacgtaactcgccggtccgttctacaaaaagtacgaggtcgcacctagatcgtgctccctccgcttgtaaacacagggtttcaggtactctttcactcccctcccggggtacttttcacctttccctcacggtactattcgctatcggtcaccaagtagtatttagccttggggggtggtccccccgacttcccaccggattcctcgtgtcctgtggtactctggatccccgcctccttcaaaacatttcacctacgagactcttactccctttggttgggctttccaaccctattcggctatgttcttcccagattacgcgggtccttaaccccgcaaaaccgtagtcttgcggtttgggctctttcccgttcgctcgccgctacttaggaaatcgatgtttctttcctttcctccggctacttagatgtttcagttcaccgggttccctcctcacggactatgtgttcatccgcgggtagtggagcattgcctccactgggtttccccattcggacatccatgactattacgcttgcttgcagcttatcatggcttttcgcagcttgccacgtccttcttcggctcttggtgccaaggcatccaccctgtgctctttctagcttgatcgtctttttcccttgcttggattcctccaagcctttctctcaaagcgaaattgtagtttcccgttcgatttcttcccgtttcgttacctttacagcaactccactagatttctttcttacgttcttttcgtttctatcgctttcttgcttctttgatgtagttttcaaaggacaaatgccagcactgcactggcagtggtgggctcaagtggactcgaaccaccgacctcacgcttatcaggcgtgcgctctaaccggctgagctatgagccctcgtggtggagatgagcgggatcgaaccgctgacctcctgcgtgcaaggcaggcgctctcccagctgagctacacccccacgacaagcaggcttccgttcgttccgcgcatcacgcgggaagaatcttataaagtttaaaacttaagacccttcaaaactgcacaggtcagacacgaaatatctcccgctcttccgctttcttctcagcttcctcttccgagaccttctcgtttaagccttgatttcttcttttcctctttttccgtatcccaaaggatacgctcgaccggagtttgaaagacgttcttccgtctcccatcttctccctagaaaggaggtgatccagccgcaccttccgatacggctaccttgttacgacttcaccccagttatcggtctcaccttcggcgcctggctcccttgcgggttacctcaacgacttcgggcgctcccaactcccatggtgtgacgggcggtgtgtacaaggcccgggaacgcattcaccgcgacatgctgattcgcgattactagcaactccaacttcatgtgggcgggttgcagcccacaatccgaactgggaccggttttttgagatccgctccaccttacggtctcgcttctctttgtaccggccattgtagcacgtgtgtagcccaggtcataaggagcatgatgatttgacgtcgtccccaccttcctccgtgttatccacggcagtcctgttagagtccccggctttacccgctggtaactaactgtaggggttgcgctcgttgcgggacttaacccaacatctcacgacacgagctgacgacaaccatgcaccacctgtctcctcgtcccgaaggacgtacatatctctatgcacttcgagggatgtcaagacctggtaaggttcttcgcgttgcttcgaattaaaccacatgctccgctgcttgtgcgggcccccgtcaattcctttgagtttcaaccttgcggccgtactccccaggcggaatacttattgcgtttgctccggcacagggggggtcgataccccctacacctagtattcatcgtttacagcgtggactaccagggtatctaatcctgttcgctccccacgctttcgcgcctcagcgtcagttacagtccagaaagccgccttcgccactggtgttcctcctaatatctacgcatttcaccgctacactaggaattccgcttccctctcctgcactcctagccaaccagttttaaatgcagttcccaggttaagcccgggtatttcacatctaacttgatcggccgcctgcgcgccctttacgcccagtaattccggacaacgctcgccccctacgtattaccgcggctgctggcacgtagttagccggggcttcctcccatggtaccgtcacttccttcttcccataggacaaaagtttacaatccaaagaccttcttccttcacgcggcgttgctgggtcaggctttcgcccattgcccaatattccccactgctgcctcccgtaggagtctgggccgtgtctcagtcccagtgtggccggccaacctctcagtccggctacccatcgtcgccttggtaggcctttaccctaccaaccagctaatgggacgcgagcccaccctgcaccggatttctcctttgacccctgtaccatgtgatactgtggtctcatgcggtattagcactgatttctcagtgttatccccctgtgcaggacaggttgctcacgcgttactcacccgtccgccactagatcggatgtctccatgccgaagcatttcctcatcctctcccgttcgacttgcatgtgttaagcacgccgccagcgttcgtcctgagccaggatcaaactcttcaatttaatccttttattcaagcagggcttcgtttcctctcccctgctctttggctctttctcaaagtcctctccgtttccgcttaccttacttacttcagaacttcttgttatttcgtctcttctctgtgcagttttcaaaggtcttacaaaccaccattcggggcggttttgcgccccggttttaccggagcgagattaatcataccagacttaccatagcctgtcaacccaaaacttgaaaaaaatgcacttttttataagttttttccccggagggagcggatatcagctttgccgcgccgttctttatcgccgtacggaaccgcttttatgcttatatatatggaagcgatctttttaaccgttccaggtccattttaagcgcgcggatgatcttatgggataatcttagcagaaaacgataaaataggatagaggaaatagagcggctttatagtccgcagcgcaattttagcggttttagcccgaatttggcaatagcgagccccggcggggcctgcatcatgcgcgtagacgcgctgggccttgcgccatcctccggcgatgggcgcaaagcatttgccaattccctccatttcccgtatgataagtcatgtaagttttcactgtagcgcttacagatgagcaaaacaaaagcaaggagattgaagcatgaaaaaaggtgtcatcataacgttgggcgtcatcgtcgcggtcatcctcatcgtggtgttttccgccattggcggctataacgggctggtatccggccgggagagcgtctcaagctcttttagccagatcgacgtacagctgcagcggcgcacggacctgatccccaacctggtgagcacggtcaagggctttgccgcgcaggagcaggatgtgatcgacagcgtgaccacggcccgtgcccagttggccggcgcccagacggtgggcgaaaaggcggaggcggattcggcgctgaacagtgcgctgagccggctgatggtaattgtggagaattacccggagcttaagagcgacgcgaacttcaggcagctctccgacgagctggccggaacggagaaccgcatttccgtagcccgcaaggactataacgaggcggtgcaaagctacaacaatatggtcgtacgcttccccaacaacatttgggcgggcatgttcggtttccagaaggcggagtattttgaggccgccgcctacagcgaccaggtaccggaagtggattttagcaaataggacctaactgtaaaggaaggctaggtgaacaatgaagcgcgcacgattaaaggccgtttggtttatcgcgctgctcctggtgctgcttggcgcgttgcccgcgctggcagcgccgcagccctcccgagaactatatgtttacgacgaggccaacatcttctcccccgaggtgaaggaaagcatcgtggcctccagcaatgcgctggctgaaaagaccggcgcgcagatcgccgttgccacggtgaattccctggacggacagcccataagagatgaaagcctggatatgctgcgcagctggggcttgggcgacaaggacaaggataacggcgtgctgatcctgctggcggtagaagaccggcaaagcgccatcgaagtgggctacgggctggagggcgcgctgcccgacggaaagaccggccgcatccaggatgagcggatgctgccccacttccgcgaaggcgaatatgagaccgggctggcctacggctatcaggagatctacaatatcgtttgtgaggaatacggcatagacccctcggaaatttcctacttccaatcccccttgcctacccctgctacgccgcaggagcatggcgatgaggaagggatgccccgctggctacagatcgccatgatgatcggcgcgatcgcgctcttggccatcgactggttgtttttaggtggcaccatcacccgacacttgctgacgtttttcatcctctttggcagagggggacgcggcggcggtggcggaggctttggcggcggcggtttttccggcggcggcggttccggtggtggcggcggctccagccggagctggtaaaatacgaacaagcgggcggtaccctttgaagggcgccgccttttgctatgctgcgcaaaaaatgtctggtttctacgcgcgtaaagtccattgacagtgtgctaagcgcgctatacaattgaagaaaaggccggttcaaaacgcttctaaagcgtacaaatattgatggcttgaagggggaaaacgacatgggctttcgcaacccaattattccaggctataatcccgaccccagtgtttgccgcgtgggcgaggattattacctggtgaccagtagttttgaggactttcccggggtgccggtgtaccacagccgcgacatggtgaactgggagcagatcggctactgtttgacccgccgctcgcagttggaattgaagaactgtccgccctcccggggcatttttgcgccggtgatccgctaccaccaagggcggttttacatgatcaccaccaacgtcagccacggcggtaacttttacgtgtggaccgaggaccccgcgggggaatggtccgaacccatctttttggcgcagggcggtatcgacccttccctgttctttgacgacgacggaaaggtctacctgaccagcaaccagcccaccggcggggattggaccattgcccagagcgagatcgacatcgccaccggccagcttttgacaaagccccgcaccgtttggacgggcacgggcgggcggcacccagagggcccgcacctctacaaaatcaacgggaaatactatttgatgattgccgaaggcggcacggagctggggcatatggagaccattgcccgcagcgacagcccctacggcccctttgagagctgcccccacaaccccattttgacccaccggggcaacccgctaaacctcatccaaggcaccggccacgccgatctgatccaggcgcacgacggcagctggtggctggtgtttttggccttccggatgacgcgcaacgccttccaccacctgggacgggagagctttatggccccggtgacctgggatgaggacggctggccccacgtgtataacgacaggcagatccgcatcgatatggaatgcgaaacgctgccgctaaagcccttacccaaggcgcccaagcgggacgactttgacggcgagcacctggccctgccctggaactacctgcgcaaccccaactttgcggattacgacctgaataccgggcgcaaaagcgccatcggactgcgctgcggggcgtacaacctgtttgactgggcctcgcccagctttatcggccgccggcaggagcaatgggactgcgaggcctatacccttttggactttgagccccgcgccgagggcgaagaggccggctttaccacctacttccagccgctgcaccattacgagatcgccctgacccgcaaggagggcaagcgggtgctgatcgtgcggcgaaacgcggtggacatgtgctatatcgcctttgagcgggaggtggagcccggccccatcgtactgggggtcaaggcggataagatggattacacctttatgtacggccggccgggcgagcagatgcaggtcgcctgcacggcctctaccctgccggtgagcatcgaggcctctaccacccacgccaccggcatgtttttgggactttacgccacggccaacggcgcccaatcccagaactgggcctactttgactggttcgattacagcgtaggcgacgaatagaaaggatgtgcgaagatgaaatatcaaaacccggtcatccccggttacaatccggatccttccatctgccgggtaggcgaggattattatctggccaccagttcctttgagtactttcccggcgtgcccatctatcacagccgggacctggtaaactgggagcagatcggctatgcgctaagccgcaaaagccagctgccgctggacaactgcaagccctccggcggcatctatgcccctaccctgcgctatcacgacgggcggttttatatggtgaccaccaacgtgagcaacatgggtaacttttacgtatggaccgaggatccggcgggcgaatggtccgagcccatccccgtggcgcagggcggcatcgacccttccctgttttttgacgacgacggcaaggtctactttacctccaaccagagcatcgacaaccaattttgcatcaccaccagccagatcgacattaagactggacggcttttgaccaagccccgcaaggtctggggcggcacgggcgggcgcaaccccgaggcgccgcacctttataaaatcgatgggaagtattacctgatgatcgccgagggcggtacggagctggggcatatggaaaccatcgctcgcagcgacaacccctacggcccctttgagagctgcccccacaaccccatcctctcccagcgggatcatccgctcaacatcctgcaggctacggggcacggcgacctggtgcaggcccacgacgggagctggtggatcgtatttctgggttaccggctcagccgcaacgccttccatcatctcggtcgtgaaactttcctggccccggtgacctgggatgaagaaggctggccgcacgtgtatggcgacgggcagatccacaccaccatggaggcggagctgctgccccaaaagcccttcgcccccgatccggtgcgggacgactttgacggccagcgcctggccctgccctggaactacctgcgcaaccccaatctggcggattacgacctgaatacagggcgcaaaagcgccatcggcctgcgctgcggggagaaaaacctgtacgactgggcctcgcccagctttatcggccgccgccagcagcactgggactgtgaggctaccacccttttagactttgaaccgctggccgagggcgaggaggcgggctttaccaccttttatcagccgcgctaccattacgagatcgccgttgtccggcgcgacggcgggcgcaagttgatcgtgcggcgcacctccacggatatgagctatatcgcctttgagacggaaatcgaaaaaggccccatcgtgctgggcgtcaaggccgacaagctgaactacaccttcatgtacggccggccgggcggggagatgcaaacggcctgcatggcctctacccagcccatcagtaccgaggccacgaccatgagctttaccggtaccttctttgggctttatgccacggccaacggcgctacttcctgcaacaaggcgtactttgagtggttcgattataagccgctgtaaagacgcacagcataaaggcgggcaaggggtctccttgcctgccttttaggttgcgcgcgcacgtttaaacgggtatgataaaagtagaaaatagccaaaaggaggcgccgcatgaagatcggctttgtggtgtaccaggggatgaacctgctggagtttgcgcttttgtacgatccgctgacccgcatcaagaccatggggtttgacgaggggctcagctgggacctggtgagctataccctgcttggcggggatgaccgcgggctggagctgaaacctacgcgtgtgggcggccacctgcgggaatacgatattctggtgattccgggcggggatacggcccgcaagctgtgcaacgacgagggctttatcttttggctctcctccggcgcgcaggtaccggtgcgctgcgccagcggcctgggcgtactgatggccggcatgggcggtctgctgctgggtgccagagctgccgcgccccagaacctacatgtagcgctggagcgggtatgcaagccggaggatgtcccctttctctcggacaaacactgtttgacctgccagggaggcttaagcgcgctgctgctctcgctgcacctggtgcagcggctgcagggggaaaagatacgcgatttaatcctgcagcgcattgccggcgagtacgcggaaaagggactgctgatcccgggcgggaagtaatgcaaaaaagccaagctacaggggtttgcccctgtggctttttattatccaaagtcatggcgatctccgccatcgctgcctaaattttcaaatatacaaactattttttcaatctgcgcaaagcattctgaatctgataatgaactatctgatatgatacttttaattttgactagagaacgatagcattgatcttgcaatactgactctattcctgcagccgtcaaaaacgcctttggattttccaaggcaatctttaaaaccatttcttcatataaatccattgctcatacctccgtatcgttcagtccgattggaccaatactagtcccattataacagcttaaccctataaaataaacaaaaaagaactagtattagtccagattgaggctgagatggagcagaaaatcaagcaggatgcaggtatcccgatcggtcagaatatacgccgcatccgtttacagcgccatatggggcataccgctttggtgcggacgctgcagctttgcggcgtgggcatcacccgcgagacgctggtcaagatcgagcgcggcaagcagcatatttacgcctcgcagcttaaagcgcttcgggatgcgttgcagactacctatgatgagctgctaaaagaaacagaaaactaaaagccagggcacgataccctggctttactcatgctgcgccgctctttcctactcctcccccgccgtatccgcaactggctccagtgccaggcgcagggtggtatcctgaaagaaggtattggcgttatagagatacagcacctcgctgatgtcgtaataatccaccaaatcatccaggttgccgtagtaatagcgggggtccaccaccacgatctcgctgaaatagggcgttaaaaacgggatgaagcagttggcgtacgaatccttgaccaccaggagacggcgggtggaatcggccgcggtctcgatctccaccagcggatggttgccgtttaaaaatacggcgtaagcatcccgattttgcaggttctcgctggcgtaaagggtggcggtcctttgctgctcttccacataattgaccaccagggggacctcttccctggggaaatacatctcgatggcctcggtcgtcccgcccagaaagccgcttttggcgctgagggtgccctgaaagctctcggtcacgggcgcgcggtcaaaggcggccgcctccgcgtccagccccagcgcgtccgcggcgctctgaaaggccagataagcgccgggcgtggtccagtggtgatcggtccggtaataaaggcgggtctgatcccgatgggccataaagctctcccgcaggtcgatagggatgatattcccctcctccagtttggcaaagagcgcgtccaggtagggattttgatcctccgcgggggcaaagtgcggcaggcggtccgcataaatgttcacggcggtgggcgccaccatggcgtagtgccgcaggttcccgtgccgctgcgcaaacgcctgcatggcggcgatggtttcgtccaggttgtccgcatccggcggggtaaactgctcgtacaggctgccatcccgccccagataaacgccgttggcctcccgcttgcccatggcctgatcggccatggctttgatggaaacaaaaaagtcccgcccggcgaattgatcgttgacataggtttccgcatctgtacggtagcgcccgccaagcagcctgtccatggaaaaatccggccgcgcggccagcatgcggttctccttttcagaaaatgtccgatccgcggtgaacagattgatcagcgtcagggcgaacagccccaccagaaaggccgcgcccaaaaagagtgaaaaggcccggaagctggcgataggatcgcgttttttcacgttgcgccctcctttctaaaacctgaagtacaaaaacggattgtaggtatcaaataccaggtaggcgatgcacagcaccaataccagcatcaacaccagcgccgcggcccagggcgcccgctccgtcagcgcgcttaatccccgggcgatgagcggcccacaggccaaaatgcctaggacgaacagcacaaggttgctcagcagcaggtaaagcccggcgccatcggcaaagcctgccgcgccgatgcccaccatattgcccagatacgcccctaccccctgaagggaggtattgctaaagagcacccagcccacgatgaccaacaccatggtgtaggtgcgcttgccccaggcaggcatgcgcgagagcacccggcccagcaggtatttttcaagacagagcagtaccccgtagtaaaggccccacagcacaaagttccagctggccccatgccataggccggtgagcatccaaaccaccatgatgttgcgcaggtgcttgagcaccggcacccggttgccgcccagcgggatatagacatactcgcggaaccagctgctaagggagatatgccagcgccgccaaaactcggttatgcttttagagatatagggatagtcaaagttttgcatgaagttgaagccaaacatcttgccaaggccgatggccatatccgaataaccgctgaaatcaaagtaaatttgcagcgtataggcgaaaatacccacccaggcggtcagcacgctggcctcccccggcgctaaaagctgcacagtagaaaaaaccttacccaggttattggccagcaacacctttttggccagccccagaataaaatcggccgcgcccgcgccgaatttgaccatgccgaccgagcgctgctccagcgccggctcgatatccgaatagcgcacgatgggcccagcaatcagctgggggaacatggtgacgtacaggctgaaattgagcaggctgcgctgtgcccgcaccttgccacggtacacgtcgatcaaataactcatggtctgaaaggtgtaaaaggagatgccgatgggcagcggcagcgcccggtagggcaggttcagcccggtcagggcgtttaccgtatccaccagaaagccggagtatttaaaaaagcccagcaaaaacaggttgacccccaccgccaggatcaggttggctttagccccccgcgcgccccgctcgatgcggcggccgatgtccaggccaaaaatatagttaaaggcggcggaaaaaagcatcagcaccacatagaccggctcgccccaggcgtagaagaacaggctggccagcagcagcacgatgtttttaaaggacttggggacgaaaaaataagccatcagcgtgatgggcaaaaagaagaataaaaagaaaatgctgctaaataccatgggcctatcctttcaaaacgattcttttggcaaaaccggcggggcgcgccccgccttaggcccggatgatctccgagaaaagcgactgccacgcctgggaatagggagatacggcgtaaaaggcataccgccccttgatctccagcacatagccgttgagcagcgcggtctgctgcgcgccgtacccctcaaaggaggccttttggctggcctgccgctgcaaaatggcctgctccaccgcggaggcctgctgctcatctttcatcttgaccaccagcagctcgtccgcatccataggcgaagtgggcaggtagagcataaagccttctagttccccctcctccaggttataatagcgccgcaggtcgtttgcatctccctccttcagcgcctctataccctcggcctgggagagaacagcggtaatctcctccatgggcttatcggcataattgccggaggtgcagatcaggatgaggaacaccgcgataaaggccagaaggccgattttaatgaacagaaagttatgcttcataccgccctcacccgtccaggcccgcgacttgggccatgtgctgcatccactggatatagtagctgttgaccacgtggatgccgtcggacttgtacatttcaggcttgccctccacgtaagggttattatcgataaagggaatatccagccgggcgcacatctcctctaaagccctgttgaactcgggatacttgccgtaataagcattttcgtcgatggcgttttgctggacgggcagcacgctgttgacgtagatcttcgcctcgggcagcgcctggcgcagcttggcgatctgctgctcgtaatactttacaaattcatcggcatcccccagaaaatagggcagatcattcatcccaaaggagaggaagatatgatccggcgcaaggccgatgacggtggaaatctgcgcatccgcctctttgacgctgatgccccgatggctgaccacattgttgcggggcaaaaagccgtaatccgccaaagcctcggtaatggaatcccccacgatcacggagcccttgaattgcttgcgcagcgtgcgcaatgcggcggcctccgcctcctttttctggcgctcggcctcctgctgtgccgcttgctcctgccgcttttgctcagcctcttcctgctctttttgctgcctttcagcctcggcctgttggcgctgtgcttcggcgcgggcgtccacctgggcctgcgcctgcgccacatccgcggcctgggcctgttgcagcagcgcctgcccctgggccagctgtgccggatctaccgccgggcgggccaagccatgctgcagggtcaggacgcacaccagcccggccacaagcgtgcccgcgcctgccaatatacgcttaaaacgcctgcccttgatcctgatcttgcgtccatcccttacccgcaccgtttgacccaccttatgacaaaattcgtatctcttactattctatcggtttagctggccaatgcaagggctgtagacaaatggaacgaagatttaacacttttgaaaccttatctttaaaaatcgtaacggatattttgcttgacaggaaaaacctgccatttgggcagtaaaaaagcgggcgcattttgcgcccgccctagcatttgcggttaatttttacaggctcttcaaatcctgcgcgatctcccggtaacagtcctccgcctgggggtaaaggccacacttatcgatgaaggcatgatccatcccgttgtagcgcagcatgcgcacctctacgccatcgtccatgaggcggcgggcataggcctcgcactggaggcgcagggaatcaaactccgccactacgatcaggctcttgggcaggcccttaaaatcctccgcgcgcagcggcgaggcgtaagggtcatccacctgaccgggtgaggtaaggtaaagcgcagtggagttggcgtccactccatagatgcccagggcgcactgccgggccatctgctcatcctccgggcggaaggtaaaggcgtccagcgtccaatcgtaataggggttgccatcaaagggtccacggtctaccgtagggtagatcagcgcctgataatggatcatgccgctgcccaaatcccggtccttcagcgtgcagaccgccgagaggttgccccccgcgctgtccccggccacgccgatcttgtggggatcgatctccagttcccgggcgtggttatacacccaggtgaccgcgtcaaagcaatcctcaaagccctgggggtagggatgctccggcgccaggcggtaatctaccgatacaacgacgcattccgccttctcggcgatggccttgcagggattctccaccgttttgcagctgccaccgaaaaagccgccgccatggatgaacacaaggcaggggcagcccggtttagcctttgaggcagtgtagatagaaaggccgatggggccgtttttcccatcaatagtgcggcactgcgtacgcacatctccggcggtgatgtcggcattagcccagcccatcttctggcgcatggcgccaatagggatgccattataggtgtagggatccacctcgctcacctgcgagggcggctgggtgcgtactgcccgcacccgcgggtccaccgcgccgggcaggtcctcatccggcacgggcttgatggtgacgggcaggcctgccacatcgatcaaacgggtattctcctccaggtgctgcagacaggtacggtaatctgccattttcattccctccttaaaaaacgcgctaactttatatataaagtataaccgatagacttacgccatgtaaacccaacctaaaagcgctcctttcgccgctgcacgcgcagctgctggcgccgctcggcggcctcccactcggcggcctcggcatcggtatccaaaatcagccggggcactggtgttgggttgccttttttatccagcgcaaccatcaccaggtaggctacgttgatcttgtgccgctccccggaaaggtcctccacataggtatccacccgcacctccatggaggtgcgccccgcccgggtgagcttgcccaccagaataatggtatcgttgacaaaggccggcgcgcggaattgcaggttatctaccgatgcggtggtcacatcgcaccccgagtggcggcgggccaccacggcggcgaccacgtcgatccactccatcagcttgccgccgaacagccggctctggccgttgatctgctcgctcatcaggatttgcacctgctcggtgcgggaatcggacacgtgcttggcgctgaacttgccggtttcatctgtcatatcgtgtgctcctttaacataggtttggagacgttgctctgcccttagtgtaacacagcggcgcgcaaaaaacacgtccagagcgcaggccggtaaaaaagggggctggcaatccgccccggcttggtctacaatagtaaacaagagtactacggcctgcgctttagccccggccgttacattgagaaaggcgggagtatccatgaaaaaatgcctggcgctggatatcggcgggtccaaattgatcgtagcgctggtggacgaaagcggcaatgtgctttgccaggagaagacggccttttccccccggccgacccaggaggaggtgctggaaaagatcctctccagcgtggcgcgcctgcccatggccggggaggccgtggcctgtggggccaccatcccggggctagcggacccggaaaagggactgtgggtatacgcgccctattccggcattggggatttccccatcgcacagctattgggcgaaagattgggccttgatgtctacattgaaaacgatgtgaatgcctgcgccctggccgagcagcgctggggcgtgtgccgggagatgcgcgattatctgtggatcaccgtttccaacggcgtgggcggcgcgctggtattaaacgggcagctgtacgccggggcgggcggcaacgccggggagatcggccacctgacggtggagagcggcgggcccctttgcccctgcgggaaacgcggctgtctggaggcctgcgcggccggcccgggcatcgcccggcgctaccgccaggcggcggggctgtccgaaggagaccccatcgacgcggcgcagatcgccgcccgcgcacgagcgggcgagccggaggccctggccgtatggcgcaagaccggcaactacctgggccgagccattgcggcggccaccaacttgctgaacttgcaggccgccatcatcggcggcggggtatctttaagttttgacctgctgcaagagggtattatcgaggtctatgggcaggaggtctttgccactgccaacgccgatatgcccattttgcagaccggccttggctatgaggcgggtttgcgaggtgcggccgccctggcctttcagggcctggagcaccaaaacgcttaaaaggaggaagactcatgatgaatatttggcacgatattgccccggagcggatccgacccgagagctttaccgcggtggtggagatctccaagggcggcaagaataagtatgagctggacaaagagaccggcatgctgcgtctggaccgggtgctgtacacctctacccactacccggccaattacggctttatcccccgcacctacgccgcggataacgacccgttggacgtgctggtgctctgccaggagagcatcatcccccttaccctggtacagtgccggcccatcggcgtgatcctgatggtggacgggcaggacaaggacgagaagatcatcgccgtgcccgaggaggacccgaattactccagttatacggatatagaccagcttccgccccacttttttgacgaaatgagccacttttttaccgtctataagagcctggagggcaaaagcgcctatgtacgcaacatcaaagggcataaagaggcgctggaggtcatccgcgcctgcatggagcgctacagccagatgcaaaagccggcgttcaacgcttaggagggacagcctgtggaaaagaagaagtttgccatgatgatcctggggccttactatgacccagagcaacaccaggcccactttgagacggcctggggcgatacctatatcgtgaccgtgcgggactttgaagaggcgaaggaaaaaatccgccaactccagcagatgggcgtaggcgcagtggaggtttgcggcggttttgggccggaaagggccaaagagctgatcgccctgacaaacaacgaattggccgtgggctatgtgaccagcttccccgagcaggcgccgctgttcgcccaggtgtttggcgattagcgccgggcttactatcttaataaatgtactttacccatgccggccggtgcaataccggccggcatgatgtataaacgccccaaaatagaataatgcgcccttccatcgcggacggcaaagcgccccacgcccttgatctgccgggcatagccccgcctttttccctattcttgtcacttgtcattgcagctgtcttgacacatattgccatctacgttacaataggtgccgttaagcaaaagaccggaggccttttaaacgtatgcttaattagaggagatcaaacatgaatcaggcctgtgatgtggtcatcgtcggcacgggcgtggcggggttatactgcgcgctgaatctgccggaaaagttgaacgtgcgtatcatcaccaagcaagcggcggacggcgccaactcttttttggcccagggcggcatctgcgtgctgcgcggcgaggaggattttaacgactattatgcggatacgatgcgcgcggggcattttgagaacaaccccaaaaccgtggagctggtgctgcgcagctccaaccagatcatccgcgaccttttacggttgggcgtgcgttttaaccgcgacgcgcacggcaacttcgactacacacgggagggggcccactcccggccgcgcatcttattttgcaacgacgtgaccgggcgcgagattaccagcaccctgttagaccaggtgctcaagcggcccaacgtgacgatagacgagtataccaccatggtagacatcctatccaaggacaacgcctgccgcggcgtcgtggtagccgaccgggagggtaagatttccgccataggcgccaaccatgtggtgctggcctgcggggggctgggcgggctttataaaaactccaccagttttccacacatcaccggggacgcattggccatcgccctgcggcataacatcgcggtggagcatctggactatgtgcagatccaccccaccaccctgttttccaacaagcccggtcggcggtttttgatctccgaatccgtccggggcgagggcgccctgctgctggacaagcggggcaaccggtttgtagacgagctacagccgcgggacgtggtcagtcaggcgatctggaagcagatggaaatcgaccagagcgaacacgtgtgggaggatatgcgcccgctgggcgagcagacgatcctgacccacttcccccacatctaccggcgctgcttggaggaagggtttgacccgcgatatacgcccatccccgtcgtccccgcccagcactatctgatgggcgggatcaaggtggacctagccagccgcacctccatggccgggctgtacgcctgcggcgagaccagctgtaacggcatccacggcaaaaaccggctggccagcaactccctgctggaatcgctggtttttgcccagcgcgcggcggacgacatcgtgtttgccgcacggaccaggcacaccgcatcgctgcccgaggtagaccttgaacaatatcaaaacctgaatgcgttatttgacgactatcgcaaggatattttaaacagggtagaaaggttggaagcaaagcatggataagatcgcactgaagctgaatatggacaagctgctgctcatggctctgcaggaggatatgaccagcgaggacatctccaccaacgccgtaatgcccaaagagcagcgcggcacggtggatttgatctgcaagcaggacggcgtcatcgccgggctggacgtgtttgtacgggtattcgagctgttggatgaaaaaactaccgccacactgctgtgccaggatggggacgccgtaaagaaggggcagctgctggccaccgtgcagggggatatccgcgtgctgctttccggcgagcgggtggccctcaactatttgcagcgcatgagcggcatcgccacctatacccgcgatattgccaagcttttgcagggcagccagaccacgctgttggatacccgcaaaaccacccctaactgccgcatatttgaaaaatacgctgtgcgcgtgggcggcgggcacaaccaccggtataacctgtccgacggggtgctgctgaaggataaccacatctccgctgccggcggcatcaccaatgccgtacgcatggccaaggcctatgccccgtttgtgcataaaatcgaggtagaagtggagacgctggaacaggtgaaagaggcggtagacgccggggcggacatcattatgctggacaacatgaccccggagcagatgcgccaggccattgcgctgatcggcgggcgggcgcagaccgagtgctccggaaacgtcacgcgggagaacatcgccgcgctgatcgccctgggtgtagactatatctccagcggggctttgacccactcctcccccatactcgatatttccatgaagcatctgcgcgcgatttagaaaggggtgtttgtttgaacgtaaaggaacggcgaaacgagatcatcaaaattttaatgcaggccgatggccctgtggcggcaaaagagctggccgttcgcttccacgtcagccgccaggtcattgtacaggatatggccgtgctgcgcgcggtgaattccgatatcgtttccacctgccggggttatattctgcaaaaagaggcgcgctttagccgggaaattaaggtctgccacgacgacgaggatatagcgcgggaactgaacctgatcgtagactatggcggcagggtaaaaaacgtcagcatcaagcaccgggtctacgggcggatcacggtggacatggatatcgcctcccggcaggatgtggacgagtttttagagctgctgcaaagcggaaaatccacatcgctgggtagcgctaccgccggctaccactaccacctgatcgaggcggccagcaatgagcgattagaccggatcgccaaccagctgaagcaggccgggcttttggccccgctgaccccttgggagcaggagaacgaaatggaggagcaggacaccccatgaccgtaaaagagatacaagaagagatccttcggctgaaggcggaaaaggatatctgcattttggcgcacgcctatcaaagccagcccatattggaggtggccgattacatcggcgattcttacggcttgagcgtacaggccagccaggacaagcgacagaacattttgatgtgcggcgtgcgctttatggcggagacctgtaaagtgctctgcccggaaaagcgcgtgtacctgcccaacccggacgccggctgccccatggccgagcagctggaccccaaaggtcttgccgccctcaaagcgcaatacccggattacaccgtggtggtctatgttaacacgaccagcgccctgaaagcgcaggccgacgtttgcgtgacctccgcctgcgccgtacaggtctgccaggcgatagaaaacgacaagattctgttcatccccgacccgaacctggggcaatatgtggccgggcagttgccggataagcaatttgccttttaccagggcggctgcccgcaccatatgcaggtcacccggtcggaggtgacccgcgccagggccgcacaccccaatgcactggtactggtccatcccgaatgccccgggccggtcaccgctatggcggattatgtgggctcgaccacgggcatcatggcgtatgcgcagcaatcccccgcgcaggaatttatcatcggcacggagatcagcatcgtcgagcacctgcagtaccagtgcccggacaagcggttttacccgctctccgccagcctcacctgcgccaacatgcgcctgactacgctgatggacgtgtaccactgcatccgcggcgccggcggggagcagatcgtcctaccggctgaggagatggcaggcgccgggcgctgcatcaggcggatgatcgccctgaacggttaggtttgcagacgataagcgataatagatcgtgggcaacaaaaaagacaggggcgctctcccctgtcttttctattatcgttatgggtttacccttgggatacgtggatgcggttatcgtcaaaggcgatcttggccatgccgtgcacatgcaccggcttatcccgccccggcacccggtaggctacgcttttatttccggacagcaattcgtcgcagcaggccagcatgtccggcacgatctgtttcgatatgcccagccggctgtggccgggatagagcacgtcaaattcatccagatgcgccatcagacgcaccaagccctggcggaatttttccaccgtcatgtagggcgtgacgatcgcgttcggatcggaggacatgcaaaaggtgggcgtccacaccagcgcatccccggagtacagcacccggcgcttgcgatccagcagggcgatgccgccttccgcgtggccgggcaggtggaacacctcgacctcatagccgccgcccaggtcgaacacgtggccatcctccaccgtttcaacagcgtaaggcgcgggctgaattaaatcgccctgtgtgtaattatactggcgcacctcgtccggcggtagcgcacgggcaggcgcagccatctgcttgtccaacccgggggcgtccatgctgtggatatagaccttgccaaactgcggattgccctgcacatggtcaccgtggttatgggtattaaccacgaataccggcagagcggtcaggctctccaccagtcctttcaggtcgccaatgccaaagccggtatccaccagcatggccttatctttccccggcaccaggtggcaccaggcgtccccgctgtagccggggctgcgcgagaggatgtgccaaaggccctgggcgcccggcacctgcaccaaaggataattatcagataacgccataaatcctgcctccatttcgtttagacgggcgcacggacaaaggcgcgccgctcctaagttattttggcacgcggcgggcggccctgtcaaccacaaggggggcgctattagagcccgtgcggcttgaacccctcgcccaatacttcatgggcgttgctcaggatgacaaaggcctccggatcgacccgggagacgatgcgcttaaggcgcaccaactgcatgcgcgtgacaacgcagagcagcacctctttatcctcgccgctgtacatgccccgggccgagagcaatgtcacgccccgctccagctcctccattagcagctgggcgatcttgcggctttgatcggagatgatgtagcataccttgccgctgtccaggccctcctgcaccaggtcgatggtcttagtggtcaggaacagtgctaaaatagcgtacagcgccatctcggcatcaaagataatgccggcggccaggatgatcaccgcgtcgataacaaagatccagcccgtgaccttgagctgtgggatgagcttgtgcaacagtaatgccgcaagctcgctgccgccggtggtagcgcccccgcgcatcaccagccccagcccaaggcccatggccgccccgccatagacgctggagagcatggcgttttggctaagcgccacctcggggatcaggtaggtggccgcgcttagcaacagcgtggccaggatcgagcgccagaaaagctctttgcccacctcccggtagcccagcgcgaacagcggcaggttgaccaggatattgaccagccctaccgacagacccaacgtatggtacaagatcgtccccaagcccgtggcgccgccggctacgaccttggcgggcaccaaaaacaggttcagcgccccgccggcgataaacgcacccaccaccaggaggacgtaatccagcaacacggtctttttcttttgcttcttcatgttttttctcctcaatcccaaaatagcttgtcccatatggataaaaaaggggaaggccgcccttcccctttggtttttaacgcgtccgctttacaggtcgatcattccaaggctgatctgcagcgcctggtccacctgctccatccactcgggcggcaggctgcccagcttttcgcgcaggcgcgccttatccagcgtgcgcagctgctcggtcagcaccaccgaatcctgcttgaggccggaggtatcccccgccaccgccacatgggtgggcaggcgggatttattgatctgactggtgaccgccgcaacgatcaccgtggggctgtaccggttgccaatatcgttttgcaaaatcaacaccggacgcacgcccccctgctcggagccggtcacagggcttaagtccgcaatataaatttctcctcttttcatcatcgctattcactctccgccaacagcgcctcatagtgcgccgaatcttgggcctgggctgccatgccccattccgcccaatctcgattgatctgggccatgctttcgtagccttcacgcatttgttgacggataagctccctttgcttttcggagatataagcccgcatcgcctcccggatcaattcgctgcggttgacgttgtgatcccttgcgatctggtccgcctgggccagcagcgaatcgggcaggctgatgagtattttctttaactggggcacggtagattcctcctttcacgcggaggcaaccttgaagcgccccctgccctagaggccgcttaggcgggcaaaaacccgggccaggcccttgtgcatatccgaggccgtaagcccgtgataccccatttcccgggctgcgagatcccccgccgcgccgtgaacgtagctgcccaatcttgccgcatcatagccgcccagcccctggcccagcagcgccgtgatcacgccgctaagcacatccccgctgccgcctgcggccatgccggggttgccggtggcgttgaaggtgacctgccccttggacgaggcgataaccgtggccgagcctttgagcaacaccacgcacccccagcgcgcggcaaactccaccgcgcagcccaccgggtcctttaggatatcctgcaccttccagccgcacaaccgcgccatctccccgggatggggggtaagcacgaccggggcggagcgtccgcgcaggatttcgggatcttcagccaatgcgttaagaccatccgcgtctattaacataggtatatccgtctgctctaaaatatgccggatgagcgaaaaatgatcttgatctttccccagtcccgggccgatgcccacggccgacttgcccgcaagggcggatagcgccgcctgcgcggccccgtgtatgcgtccatctttctcgggcagcgccaggcacatggcctcgggcgggtctccgttgagtagcggcactaagctggcgggcagcatcagcgtgagcagccctgtccccgagcgcagcgcgcctccggcggccaggcgggcggccccggccatgcctgcgctgccgcagatcagcgccgcatggccatagctgcccttgtgcgaatcccgcgcgcgcttaggcaccagcgccgccgcatcctcaaaggatagctgttcataggggcaggcgctatggatctggggcgggatgccgatatctgccaccacgatctccccggcgtattccctgccgggatacaggcacagcccgcttttaagggcgtggaaggtcaccgtcttttgggcgcgcaccgcacagcccaggatatgccccagccgtccgtccacgccggagggaatgtcgcaggcgatgaccggcctatgctgtccattcagccagccgatggcggcggcgtacagcccggagaccgcccggtccagcccggtgcccagcaggcagtccaccgccacggactccggcgcgcccgcgcaaaaggcggcaagcgccgcttcatctgcgatctcctgcgctgcgccgccgcagcgcagtaaaagctcgtactcggcccgggcgtcccctttcagcttagcggcacttgtcagcagggccacccgcaccgggcagccttctaacagcagcatgcgggcggcggccagcccgtccccgccgttattgccgctgccgcagaaaaacagcgcgcccgcctgcgccagggggcgcaccgcgtcccgcagggccatagcggccttttccatcagcaccaacccgggaaagccatagtcctcgatcgccgtgcggtcggtctggcgcatctcagccggcgtcaatacgcgcatcttgttcccctcctttatttctcgcgggtgaccgcgcgcagcaccgccctgcgcagtacctccaccgcggccacgcaaatttggttaaaatcccctgccgcgcgccccgtggacagggcaaaaagggtgtccccatcgtttaaggtgtgcaccgggcggatggaaagcgccagcccgtcctgcgccacccgagccagacggttgcactgctcgcgggagagggccgcatcggtggcgatcacgccgatggtggtgttgcgcccggcctgcccctccaccggaaactgcagggccgccttggcggtgttgataaagcctccatccgatcccttagcgcccgagatgatggcgccggtatccgcgtcaaacacatcccccagcgcgttgaccgcaaccgcggcagccacctttgccccgccgggcagggtgatgctacaggtgccaaacccgccttgggccgccccagccgggcccaagatcttgccgatggtggcgcccgtgcccgcgcctacccgcccttgcgccagcgggccggaagcggcggccttggccgcggcatagcccatggcctcatccggacgtgccttgggatcccccacgcccaggtcgaagatcaccgcgccgcagaccagcggcacccgggccacccctacgtccagccccacgccctgttcttctaaatagcgcatcaccccgccgcaggcgttcagtccataggcgctgcccccgcaaagggtgacggcgtggatcttttgcaccaggttgccgggattaaaaagatcggtctcccgggtaccgggcgcgcccccagccacgtccacgccgcccacggccccctctgggcagaggatagccgtgcaaccggtgcgtccgcattcatccgtagcgtgccccgccaggatgcccgctatatccgttatgcttcctgtaaactgctcatacataacctaaaatcccccttaccgatacttcgccggagaccactctctcccgctgcccctgttcattttccacgatcagttcgccatcctccgccaggtccaccgccctggccttataccttccctcccgggtgaccagcagcacctcctggcccagggtggcgctgtggcggcggcaataatccaccaccgcccccacgcccgcggtcatcagctggtcatagcgctgctccatttggcgcatcaccgcgcccgccagcgcgcagcgttggaagctacgcccggtctcgatcaacagcgaggtggccttgtcccgtatctcctcggggaaatcttcaatcccctgggccacgttgatgccgatgcccatgaccacccactgtacgttatccatatccgcgctcatctcggccagaatgccgcacacctttttgccgtttacgatcacgtcgttgggccatttgataggggcctgcaccttgcagacctcctccagcgcggcggatacggcagcggcgctgagcatggtcaatatcggcgcgcgctgggcctcaaagggcgggcgcagcaccacgctcataaacaagccctggccttttgccgagttccacccccggcccaggcggccccggccggcggtctgcgtttcagccagcaccagcgccccattcggcgcgccctgggcggcccactccttggcccgcaggttggtagaatcgcaactatcgtacacctgtatggcctggcccatctcccgggtgcccgccgcgtggcggataagcgctggttccagatgatccggcatggaaagcagccggtagccccgccgggtggccgaggcgatctcaaacccatcttcccgcagggccttgatgtgcttccacacggccgcacgggtcacccccagttgctcgcagatcttttcgccggagatatccttttcccccgcctccagcagcagggtcagtatcgcatcccgcactccttttcgccctcctttactgcctctattttaccctttccccccataattgtaaacttggtgcaaaatgataaccctttatcactttatcccccttgcggggcctgccccccatggtttatgatggaaaaaacggcgcttcaagcgccccatttcccgcccggtacgcgggcgcagccataagttgatcgcaatattttttgaacgtaaaacgaataggggatagggggaactttagatcatgcaggattttgcaaccatcgcttccgcgctgcgggagaatatccaaaaagttatcatcggtaagaccgaggtagtggacctgatgctgatcgccatggcctgtaaagggcatatcctgatcgaggacgtgccgggcgtgggcaagaccaccatcgtatcgtgcctggccaaatcgctgcagtgcgattttaagcgcatccagttcacgccggacattctccccagcgacattaccggtttttccatggccaacatgcgcacgggggaatttgagttccactccggggcgatcatgagccagatcgtgctggcggacgagatcaaccgcgcctcgcccaagacccagagcgcgcttttagaggtaatggaggaaaaccaggtgaccgtggacggggtgacctacgccgtgccccagccctttttggtgttggccacccaaaacccggtggaatacctgggcacctatccgctgcctgaggcgcagctggaccggttctttatgcggttatccatcggctaccccagcgtgggcgaggaggtggacattctctcccgctttgagatggaggaccccatggagagcctttcggccatcgccacgggcgaggatattttggcgctgcaacagcaggtgcgcaccacctatgtggccgatgagatcaaggactacatcgcccgcatcaccgccgccacccgcgagcaggagtttttgcagctgggggccagcccccgcggcgcgctgtacctgatgcgcgcagcccaggcccgcgcccggatggacgggcgggactacgtgcaggtggacgatgtgcagaagatggcctacccggtgctgtgccaccggctgatcctgcggccggaggctaagctgcgggatgtgacggccgagcgggtgatgcagatcgtgctgggcggcgtatcggtccccagcctggcgaaatgacgcggcggctgctcctttttgtactggtgatggtggtcaccttttgcgcgggattgtacaccggcatacgcctttactacgcgctgctgttcgggcaggtggtgctgcttttattcgccctggccagcgtgtattatacggtgttcaagttcaattacctgcaatccttcagccccctcatcgtcaaaaagggcgagaccgtgcaactgaatatgcagctgtttaacgaccatgtcttccccttcccccacctaacggtggtgtacgatacgctggacaccctgttttccggcggagaggtgcgaaaagagctggacctggccccccacgagaaggtggacgtgggcgaagagatggtttgccgctaccgggggcagtatacggtagggctgcgccgcatcgtagcgcaggatgccatgcgccttgtgcgggtggattacgacatgaccaagctctactactataagccctgcgaactggtgatctatccccgcatcgcagagctgggggcgctgcccttccccatggtggagatggacgggcaatcccgccagtctcccaaggcgtccaacgagctgaccaccccctttgacacccgggcctaccagcagggggacccgctcaagaccatccactggaaactctccgcccgcaagcgggagctggtcaccaagcagtacgacatccccatgcggccccataccttgctgtatatcgacgcggccgcccacggctttgagggccttaccgccgtagagcttgaggatatggcctgcgaaacggctaccgccatctgccggtgcgtgctggcccacatgctgcctttggagatgatcttttataacgaagggcgccagagcgtggccggcgcgaccctgcacgattttgcctccttccacgcagcactggcctatatgacctttcacgaccgggaaaagatggccgatgtgctggcccaggagcaggcgctgctggcccgggccggcggcatcttacttgtcacctgccagatggatgaggcgctgttcaaccggttgatcctgctctcgggcagcggcatcacggccacggtgttctttatcacacccgcggtggacccggactccaaggccagccatgcgctgctggagctgcggcgctatggggtaaagagcgtgcagatcaccccacgggacagtgtggagcaaaaggcgggtgagctattatgaggatgagagaccggctttgccacctgctgctggatggcggcatggccgcgctgtttgccgcgtatttaagcagcgccgcctttacctatctccagcttgaaacggtattttggcaggtgctcgccatcgccctgttggcggcggttgcctctagcctgctgttttataatggaaaaacgacggggatcaccctggccgccgcggcgctgatcaccttgggcgcctatcttttccttccgggcgcgcaggcctacctggcgggctttttcggccagctgggtacctttatggcctttgtactgggcggggtctcccgcctggaggccggggacacctttacctttgtctgcatcactacgacgcttttgaccctgccggtttggcttttacagtacaagttcaaaaaagtgtggtacctgccgctgtttatattagcggtggtaacggtattctttttcgccttgtacgagcaggcgcagctgcctcccctgtggccgctgctgatcgccctttgctatcagtttatccgcgccggcggcgaagcgcgggattacgcctcgccccaaaagagcctcaagctgcgcctggccgcgctgctcacggctgtagcggtcagcggtctgggccttttcttcctgccgggggatacttccgcctggcgctcccagggcttccgggacctggtagccaatgtgaacgacctgctcaatacctacggcaactttaccgagccgcgcaccagcttttccatggcgcagatgggctttcagcccctggagcaccggctgggcgggcccatctccccctcggatgacgatgtgatggtggtcaacgccacgcgggaggtctatctgcggggcaacgtgctggactattataccggccaggcctgggaacacgccgcgccggccaaccgcatccgcctgtcccagtactggaacaagcaggagcaaagcgacgtctttggcctggcgctgccggattataccctgctcagccgtttcccctccagccgctccatcgatacggtgaatatcgaggtgcgcaccacctccagcgggcccagcaccctgtttgcccccagccgcctgatcagcctggacccggcggaccgctccgaggtcgtaccctactttaatacggtcagcgaggtattcgccaccaaggatgtgccctatggcaccgagtacgccatgaaggggtacgagatcacccgctctaacccgtactttgacgagtttatggcctatgtgtatgacgagaagggcgaccagctcgcccccatggacccggagcttgagcagtactatttacagctgcccgataacctgcccactacggtctatctccacgcgcaggaggccatcggctaccaggaaaataccctgaacccctacgaaaaggcccaggcgttggagcgctatctccaggagaactttacttacgccctggacgtaccctatccccctgaggacgaggactttgtctccttctttttagaagacggccggggttactgcacctactttgcctccgccatgacgctgatggcccgctccctggggctgcccgcccggtatgtggaggggtttgccctgccccgggccgagtcgatccaggactatgcggttaccaaccgcaacgcccacgcctggacggaggtctactttgacagcgtgggctgggtgacctttgaccccacgcccccggactgggcctcttttgtagaggacctgctgccccagaccggggaggcctttaccctgcccgaccagtatggcgacggtaactacgtgcccattgagatagaggataccggcaagctggaacaggacgaagaggatatgaccctgccgctgatgatcgccgcggcggccttggtgctggctttggggctatatcttagctattgctacctgcgcacccggcgcaactttatccgccgccgcgccaagggctgggatgcggcctttatcgccggctatcaggacctgcagcggttgctgcgcatcctgggtcttgagcgggaaaaaggcgagagcgaccttaagcaggctagccgcgcggatgcgcgcctgcttttggaagatgtcaaagtggcggacgcggcgctgaccgctacccggctgctgctctccccctacacgtgtaacgagcaggattttgaaagcatgatggacgtgcgcgatgcgctggccgattatctgatccacgcgcgcggacgctggtattatctgttgcaccgcattctggggctgccgctgcccggcgccctgcgccggcggcgttccggcaggcgcagcgcttaagccagccggaggaaaaatggcaaggggccgcccgtgggggcggccctttatcgttccctccggcgtctacattgacaaaacattaacgttatttgctaatgattgttaactatgttataatacctgtgtatgttaggaaccaacacttctattttgaacaagggggttacatttgtgcaatatcgtccttttggaaaactggggtttgacgtatccacctttggcatgggttgcatgcgcctgcccaccaccacggacgccgagggcaacacggtaatcgacgagaaagaggcgatcgccatgatccgccatgcggcggacagcggcgtaaattactttgacacggcctatgtttaccacaaccagaccagcgagatcgtcgtgggcaaggccatgcaggacggctaccgcgagaaggtgcgcattgccgacaagctgccgctgtggctgtgcgatacctatgcggacatggagcgcaagctcgacgaaatgctggagcggctgcagaccgaccatatcgactttttactgctgcactcgctggaccgcaagcgctttgactacggcaaggagctgggcgcgctcaaattcctggacaaggcgctggagcagggcaagatcctgcaccccgccttctccatgcatgacaatatcgagtcctttaagtacattctggatagctatccctttgagatgtgccagatccagctcaacttcctggacgataagctccaggcgggcgttgagggcctcaagtacgcggcggacaagggcgtgcccgtggtcatcatggagccgctcaagggcggcaagctggcaaacaacatccccaaggacgtgcaggccctgtgggatggcgccagccccaagcgtaccccggtggaatgggctttccgctggctgtataacttcccggaggtgaccacgattttaagcggcgtcagctccatggagcagctgcaggataacctgcgcatcttctcggcgccggacgccaaacccggcgtgatgacggccgacgagcaggcgttgattgccacggccaaggagatctacatggcccgcaccaaagtgggctgcacgggctgcgcctattgcatgccctgcccccaggggatccatattccggataccttcaccatgtataacgacctggtggatcctgaaaccgcagaaaaggccaaggccaaatatgccaatgccatcaaagagggcgtggatgccagcatttgtgcccagtgcggcgcctgcgaggcggtatgcccccaggccatcagcatcatcgatgtgcttaaagaggccgacgcggccctgcgttaacggcacaaactcaatcgcccgggatttttcccgggcgattttttattttaaggcaaagcaaagcccccgcgaaaatttcgcgggggctttgcttgcggcaggccgcgctgcagggcttggcacattactccaggtttaatttgtttttcaggatatagcgcgtcagcaccatataaagggcgcaaaccgcggccataccggcgctggccaacagcatcatgctctcggcgttgacattcatcatgctctctacgcccgcaaggttcaagcccacggtggagcagaccacaaacaggatctgccagatcgtattgatggcaatgtaggccacaaagcccatcagcgcccgatggctgttaaacaggtgcccgatgctgatagataaatacacctgcagtacgaacatggcgccgctgagcaacagcatgagcaggaattccgctaccagtcgcacgatctcccaggccttggcgtgctggaacagcagcccgaacccttcccacatcgcggggaagaaatcccccaccacgccggacaggatcaaaatggacagcgcccctacgatacagctgaccaccgcccagatggcaaaggtcaaaagcttgctccagatcagccggccggtggtgacgggcagggtattcatcaaatacccctcgtcccccagcaggtttttgtaaaaccgctggatcaggatcaacagcgtgatcacgcccagtgcgataaacagcgagaacaccaccagcccgccgatggcgctgggcgcgtcgaacttgctgaccatcagcagccgcgtgaccagtaccgagaccaggatggcggcatacagcggcaaaaacgtgcgcccggtggcgcgcagctcgtacttcatcagtttgcctagcatttgaatacctccctgaagatctcgtcgatggattcgccatactgctggcggatgtcgtccgccgcgccggtgagcatgatgcgcccggagcggataaagatgatgtcgtccagtatcttctccacgtccgcgatcaggtgggtggagatgatgacgctggcctcctcgttataattggtgatgatggtattgaggatataatcccgcgcggccgggtctaccccgccgataggctcatcgagcatataaagctgggcctgccggctcatcaccagcaccagctgcaccttttcccgtgtgcccttgctcatggccttgatgcggtcggcgggctggatatccaggttgcccaacatggtcagcgcccggccacggtcaaagtcgtcataaaaatcctcaaaaaagttcagcaggtcgctgacccgcatccaatcgctcagatacgtgcgctcgggcaggtaagagacgatctttttgctggcgaccccgggcgcgttgtcgccgacagtgatcgttccctcatccggcgtcagcagcccgtttgccagcttgatcagcgtggttttgccgctgccgttaggccccaaaaggccgatgatgcgccccttgggaatctcaagatctacgccttccagcgcgaccttgtgcccgaagcgtttgcccagcctcttgcattgcataatgttctccatacttccctactctcctttgccggtggacttgatcagcgcgatgacctcttctacgctgtagcccatctgctccatttcctttaataactgcgtgatacgctcggttgccatctgctttttcacctcgtcgatcaattgtgtgtcctccgttataaagcgtccgtttgtgcgctgggtaaacaccagcccttccttctccaactcccccagagcccgctgcagcgtgttaggattgacggcgagaacccccgccatctcccggacggattgcagcttttgccccgggccgtactggccggatattatcttctgcttgatcatatcgatcagctgcaggtagatcggccgatcggtgctaaattgccattccattgcttcaccccttttgccgttgtatcactgtattaagtggttaatacaataatacagtgtgccctttcttttgtcaatagtctttttcatttttttaagcgcggcaaaggcccggcactgggccgggccttacaggcatttattcttttaaaacagggccgtctgtccatcggccggttcaaagcggatggcgttttccgcctgggccaacagcgcgtccagcgccacatcccgctccagccatttctgctgggcgggcttatcgaagatcacgggcatccggtcgtgaataaaggcgatctccggtgcggcatcccgggtcatgatcacaaagcggggcagggcggcgccctgctcgcgccggtaaagcccggccatatagagcggttcccggggcgaaagggcatacttttgctttcctccgccttccagcttgcgccactcgtaatagcagctggccgggatcaggcagcgcccctgggacagtgggcggcggaacatgctcttttcccccgccgtttcgctgcgggcgttgatgacctggcccttgccgtcaaaccgggtaaagccccactgcatcaaatgcgcccggtccggcgcggtaagcactggcacgatatgggtaggatagacctccccggtacgcatatccgcaaaggcgggcgattgacgatcctcctgtgccagcagctccagcacccgcatccactcgcggtcccccgcgtcgataaaatatcttccgcacattttgcatccctccgtcccctagcttacccgaccacccggccgatcatgcgcagctcatcctgcgggcggatggggatgggcgcatattgcgggttgagcgagagcagatagcacacctcgccctgctgaaattttttacaaaacgcatccccgttgagcagaaagatgccgatctccccatcctccagggtctgctgctggcgcacgaacaccacctgcccgtccacaaagcggggctgcatgctgtccccccgcacgcgcacggcaaagttagcctcggccggggcattaggcgcctccagcagctcgtaatggtcgctatccaaaaacaggcccgtgccggcggataccggcatatcgtaaagcggcagggtacgcacccgtgccgcgccgccggcaccggcagctggatgcagggtaaaggccccatcgccacgcagcagacgaatatattcagctgcgcgggcgcgccccgtggcattgagcccggagagcaggtctttctcccccgcgccgtcaaaggcggccaacagatcccgcacgccatagagccggcatagatagagcagctgcagcccatcgggccggctggcgccctgctcccattttgagaccgccttatgcgtcaccgccagcccttggcggctgaggtattccgccgcctgggcctgggtcatccccgccgcccggcgcagacgggccagattttttgctaattccatctgtttcaccccttttgcccattatagcggaatatccacgggatcgcaaccgaatattctcctatttagagaatatttccgctttacttctctttaaaagagatttataatcattgtagtcgcttataaggagagtgagagcgcatgcgtacggtgctgcatgtggatattaacaactgttacgccgccatcgagtgcctgcaccacccggagctgcgggacaagcccgtggctgtgggcggagatgtggaggcgcgccacggcattattctggccaaaaaccaactggccaaggcccggggcgttaagaccggggaggccctgtggcaggcgcggggcaagtgcccggggctggtcatcctggagccggattttgcccgctacctgcgctttagccgcctggcccgggcgctgtttggcgaatataccgatcaggtggaaccttttgggctggacgaagcctggttggatgtaagcgcaagctgtgccctgcacgggggcggcgccgccatcggccaggagatccgccgccggatgaaagaggaactgggcattacggtctcggtgggggtttcctttaataaggtgtttgccaagctgggcagcgacgtggcgggcccggatgaggtgtgcctgctctcccccgaaaattaccggcaggctgcctggccgctgccggtagaggagctgctgtatgtggggccagccacccggcaaaagctatacaagcgcaatatccccaccatcggccacctggcccagaccccaccacggcttttgcagcaatggttgggtaaatggggcttgatcctgcacgcctttgccaacgggcaggactgctcgcccgtgcgggcgctggatgaggcagaggccatcaagagtatcggcaactccaccaccacgccccgggatctaaaggacgaccgggatgcgcgcacggtattttggatgctggccgaatccgtggcggcccggctgcgggagagcggctttgtatgcgatacggtacagatcagcctgcgggacaacggccttttccgctttgaacggcagatgcgcctgccccggcccacttgcttggcagcagacctgtgcgatgcggccatggccatattgcaggccaactatagctgggacaagcccctgcgctccatcggccttagggcctgcgggctgcacagtgccgcccaacccagccagaccctgctctttgagccggaggccgcgcgggagcgtcgggaggccgccgagcgcgccatagagaatatccgcgcccgctttgggccggacgcgatctggcgggcggccaccgggctggatgatacgctgcggcgcatccaccccaaggaagaacacgtgatccatccggtgggctttttccatgccggttaaaaggagggatgaacgatgactggcagcgcttacgaccccaaggcctacgtgggcgtggaggcctacttcagcccggaggggaagattctgccccggtgcgtggaatgggaggacggccggcgctatgcggtggaccaggtggtggatatccgcccggcggccagcctgcgcgccggcggggcgggcatgcgttacaccgtgcgcatcggccggcaggagacctttatctttctggaggagaaccgctggtttgtggagcgcaaggggctataaatatgcgcaggccgcgccgtacatgatgaaaagaaaaaaccggcccttggggccggttttaaagctaccgttacgcttgatcctccgcctgctcccgcttgcgggcggccttttctgccttttcccgccggcgggtcaggtacaggtttatagccgtcagcaccacggccgcggcgggcactgcgaccagccatcccatagcgatggacatgtgcaaaaataccgacatgtataaaatacaggccgaacccgccagcgagataaaccagaggatgcttaaagcctgttcccctttgctgcgcatgcaagcgcccccttccatccgatcctcatcgttttaaaagaagcggcgccgcctttcatggacggcgccaccgctttattgagccttaagccttatttgcaaacggccagggctttttcaaccacgttatctaccgtgaagccaaactccttaaacaggatggaagccggggcagaagcgccaaagtgatccaacgcgatcacttcgccatccaggcccacgtacttgtaccagccaaagggactggcagcctccacggccacacgggcgcgcacggccttgggcagcacgctttccttataggcctcatcctgggcgtcaaacagctcgaaggagggcatcgaaaccacgcgggcgtccacccctttttccttcagggcgtccttggccttcatgatcagctccacctcggaaccggtggccatcaagatcacatccggcgtagccttttcgctgtccgccaggatataagcgccctttttcacgccgcagccggtattctcgtactggggcaggttctggcgggtcagcaccagcgcgcaggggccctgatgggtcatggccacctgccaggcggcggcggtctccttgccgtctgccgggcgcagcaccgtcatccccgggatggagcgcagcatagccagctgctcgatgggctcatgggtggggccgtcctcgcctacgccgatggagtcatgcgtcagcacataggtcagcggcagctgcatgatggcggaaagccggatcgcatgcttcatataatcgctaaatacgaagaaggtggacacataggcgcgcaggccgccgtgcagcaccatgccgttgccgatggccgccatggcgaactcgcgcacgccaaagtgcatgttactgccgctgtaatcctcggcggagaaatccccgcggtccttcatcagcgtcttggtagagggcgccaggtcggccgagccaccgatcaggttgggcaccttggccgccaggcggttcagggcaatgccagagctgttgcgcgtggcatccgccttggggaaatcccagtaggactcgtccgcaaaaatgctctcgtccaccttgccgctgaaccagcaatcccactccttggcaagctcggggaaagcctttttataattatcaaacagcacgttccactcgtcctgggccttggcgccggcggcgatgcgttgctgcatatgggccttaacttcctcaggtacggtaaagggcgggtaattccagcccagatttttacgggtggcctccaggttctcctcgcccaggggttcgccgtgggcggaagctttgccctgcttggccgggcagccgtagccgatctcggtatgtaccacgatcagcgagggtttgccggtctcctttttcgcctcggcaatggcggcggagatggcgtccacatctgtgccgtccgccacgtcgatcacctgccagccataggcctcatagcgcttggccacgtcctcgcggaaggcgatgttggtgttgccctcaatggagatggtgttgctatcgtacagcacgatcagcttgcccaggccccaagtgccggccagggaggaagcctccgaggagatgccctccatcaggcacccatcgcccaccagcgcgtaggtgtagtgatccatcacattgtagccttcgcggttgaacttggcagccaaatgcgcctcggccaccgccatacccacggcattggccacgcccatgcccagggggccggtggtggtctcaacgcctaccgtgtggccatactcgggatggccgggagtcttagagccccactggcggaactgctgcaagtcctcgatggtcaggccgtagccgaacaggtgcagcagcgaatacagcagcatggagccgtggccggcggagagcacgaagcgatcccggttgatccacttgggatccttggggttatgcttcatctgctcggcccacagcgcgtacgccatgggggcagagcccatcggcaggccgggatggccggagttggccttctgcacgccctcagcagagagcatgcgaatggtgttgaccgataattccttgatacagggcataaaatttacctcccttaatttgttgagcggttgattttttctcttacacgcaaaggcttttgacaaaagcccatatgcatttattataacgcacttacgccccgatggaaaggcctttacaggcttttctcaagcgggcttacgtccagaccgggcatgttttgcagcaccggcaaaagcttttgggcgattatgcgcgccccgcccgccgcatcggattcgatattcaacggcatgatcgggtcgtgtaccgacaggcgcaggaggaaccagccctccccttccccagggccaaagctgacgcggatgccctcccggttgtcgtcggccacctgccagcccggctgggccgcggcatagctctctaggctggcgatcaccttttgcccgcaggcggcaaagtcggcctcggtgatgggcaggcgtacctcctgcatctccagcggctctttcagatcccggatcaggtcggcaatatccccgcctgcgcggcgctgccgggccaggcggatcaggatcttgaccatgaggtaggccccgtcgtccaggttatagttctccgccagcgcgccgtggccgctggtctccatggccatggggcagtcgtgcccggcggcgtttagctccaccattttgtcgatcacgtttttatagccccggcggtagcgatagtgtttcccgcccaagtgctgctcgataaaagccttgagccccgtagaagtgatggaatcggtgaccaccactccgccgggatgttcttctaactcaatagcggcgatcagcgcgatcagcttattgcggttgatctcgttgccctggcggtccaccgcgcccgcccggtccacatcggtatcgaagatcaggccgatgtccgccccattttgcagcactgcctcccggatggaggccatggcctcgggttcctccgggttggggatatggttggggaagcgcccatccggctccaaaaagcggctgccggtggtgtccgcgcccaagggagccagtactccgtccacaaaaaagccgcctacaccgttgcccgcgtccaccactacgtgcaggccctttagcggatgcgcgtagtcctcaggggcgtttacgccagcgcggatcttatccgccagcatttgggcgtacagaggcaaaaagtcccgccgctccacccgggccggcgcgccctggcagagggtggcgttggcctgctccaggatagctttaagctgcgcctcctccaggccgcccgcgggggtaaagaatttaagcccgttgcggtcaaagggatggtggctggcggtgatcatcaccgccccatccatcataaagccctcggtcacgcaggtcataaacatcgcgggggtggagatcagccccacatccgttacggcgcagcccgcagcgcccaagccctgcagcaccgctgctttgatccgctgcgcggacaggcgggaatcgtgccccacgctgatgcgcagcgtttcggccccggcgcccttttgcccggccagccataaggcaaagctatgggcgatgcggcgcaccgcctcgtcggtcaggttcacttcccgtcccgcatccggcagggctacgccccgcacgtcggttccggatttcagctttctcaagtcctgctccataagttcctcccgattttttatttgaatacttgattaagtggttttgtcattccgagccgttagcgagaaatcccatgataaccatttggcgtcgcattcggatacaaccgcttagaacatgcatgaccaagaaggtatgcagtagatccttcactccggctgcgcctccgttctgaatgacaatagcacatctgttaaacgaacgaattagtataagttttggttcaacggcatctctccctccggcgcacccaaagggtgcgccacctccctcgtcagagggaggcaagagaaagggaaaacaagctgcggagcataagcgaaacggctggaaaatacttttgcttatcggcatcggagagtttgataaacctccgtcccctccacggagtggccgttttaaggggattagggattgttaagggggtaaagggggaaatcggaatccccctgcttgcgccccctctgttcgctacggacgcgagcttcgcggcacgttggccgctcgcccttgtctcatgctcacagagcgctgcactcacttccatagtccgtctctggggtcgcctctgttcattgcgggctcattctccgcggcacggcggccgctcgaattcacctcgcattcacagaaatcatcgtgccctttttcgcccactgggcgcgggcactatagatttccaccggcggcattcgtttcgcgctcccttaacgaataaaaaacgttccctaactttcctccctgcctcgcgttaagcctggttcattactgaacaaaaaacttatacttacccgcgcatccgtagggatactgcgccattgtcattccgagcttcagcgaggaatctcctgacgccctgttggccccgcctacgtcgcgccgcgcagatcaggcgctgcttttttgcaatcacaggagattcttcgcacggccttacggccttgctcccccatggcacaaaattaagcgtttgcgccgccctccggcaataggcagcggccatgcgcactaaaaatccgcgtcctcgccttgatccagttccaacgcttcataggcctcccgcagggcggattgtatctcatcccagccaaagcccttgcggtacagggcctgccccgccttgcccatagcttcgcatttgggaagtgccgtatagcggcgcagcgctttttcggcctgagcggccagcagctgggcttggcgctcctcatccagctcagaaacggcctgctcggccaccgcatcgggcacgccctgcattttcagtgcccggcggatgcggtgcgggccctgacccgcggcgttcagcttcccctgggcaaagtttttggcataagctgcatcgtccacaaagcggtagcccttgagcttttggagcgtatcgtcgatcacatcctgtgcaaactcccgggcgcgcaggtaatcgcgcacctgtttttcggtgcgggcgcggcgctccagataacttagcgcccggtcaaaggctacccgccgctcgtcctgcgccgcggcctgggccacctgctccgcctcgatcgtcatccccagggcgatatgcagcttggcgcaggtctccttctccagcgaaaaggcgtattccccatccagatagatgttgacccgagtacggttccgcttttgatcctcaatagccgtgaccagcgccataacgcttttgccccctttgaaaatttaaaccaaaatcattataaacgcttttgcctttccaggcaaacacgtccagaaattggccggtatactttcgggcgcccaggcggaaaatagtggcgtattccaataaaggagatgaaagacatgagcaacaattgcagcctttctagcaaggatctgagcatgttggaggacgtgctggggcaggaggcgcacgcctgcaaggtgtgcgaattttacgcccgtcagtttaacgaccagcagctgtcgaacttcgccagccagctggcgctccaccatcagcagcgttattcggggctgatggcgtttttgaaccaacattaacctttaaaaaaggagatccgagaagatgaatgaaaatccctttgtacagttgaccgagcaggacatgctgaccgacctgctcggccaggaaaagcagatcgtcggcctttattccgtggcgatcaccgaggcttccacgccggagttgcgccaggtgctgagtaacaactttaccaacaccacgcaggaccagtaccagacctttgactacatgcagcaaaaaggtttttacaagatcaagcaggcccaagcccaggatattgaccaggccaagcagacctactgcaaaatggaaaacgagctgaccaagtaacctttattgggatacgtatcgatcccagtcccgatgtttaggcagggacaaaaaaggcgccggatcattccggtgccttttttatgcgcttttattgatggcttttatccgcccggcgtttctccaccagacgcaataccacccaggcgacagcctctgtcgccataacgcccgccaccatcagggtataagggagcatctgcgcgtaccagggcgcgctgaactgctcataaaagccgggatgcgcggcatgatcgcagctcagccagatccacctgccgatatatgcgcccagtgtggaaaagatcaacagcacgcaaaaacgcctggcacgcttcatcattaacgcccctcctctttcctgcggcgcgcgcccagccccttgcagcggcgcaggaattggcgcgccatgcggaagctgaaatccaccatcgtttgggtcgcccttcctaagcccagcatcaccggcagcgccagcgcgcacagaatgagcagcagcaccgtgcagtgcaccgaaaggcggctcatatcaaacagccagtgaaagtaggtggcgctaagggcgatgcccgccaccatcgccgccacaatggcccagcgccacaggttcatgggccggccgatataacagatgatgagcagccctacgacggacatgagtatcgtcgcggcggtggagatcatctcgtcgggtatccccatccatctgcccaccagcatcagaatgctgaccaggacaaagtccgtcaccccagctggaaaggcccgctcgatcacattgcgcaaaaaggtgcccttaatccgccgcttgttgggctccagcgccagcaaaaaggccggcgcgccgatggtaaaggcgctgatcagcgagatctgcgccgggccaacgggataggtacacatcagcacgatggagaaaaagctcatgaggaaggaaaaaatatttttgaccagaaacaggctggccgaccgctcgatattattgaccacccgccgcccctcgtccaccacaagcggcatacgggcaaagtcgttatccagcagcaccaactgggcggcctgggcagccgcgtcgctgcccgaggccatggcaacggaacagtccgcatcctttaaagccagcacatcgttcacgccgtccccggtcatggcaacggtatgccccgcgcttttcagcgcccgcaccaacgcgcgcttttgcgcaggcgttacccggccaaagacggtatagcgggtagcggccttgcaaagcgcctcctccgtttgcagggtggaggcgtccacataattttcggctccgtcgatgtgggcctgcatcgctacctgggagacggttaccggattgtccccggagattaccttgacctgcacgccctgctttgcaaagtaaccaaaggtttgggcggcagctttgcggatggggttgcgcagcagcaccaggcaaagcggacgcacccccgccgtcaacgcccggccgtctgcccgcccatcatatcgggcaaagaccagcacccgcgcgccccgctcggcatggctctggatcagcgcctgatattcgctaaaccgctcgcgcagtacgaactccggcgcgcccagcacatagcagccctcctcaaaggtggccgagctgtatttgcaggcggcggaaaacgaggtcacccccaggggcctgcgcccctgcccttgggtaaaataggccttaaccgcctccatggtgatgttatcgctggcctgggcggcggcaaaatcccccagcaggggcaaaatatccccttcatccgaaaggggcaccgcgccctctacccgcatttccggctcggtgatggtgccggtcttatccacgcacagtacgtctacccgggccagcatttcgatgcagttcatctcgtgcaccagcactttgctgcgcgccaggcgcatcacgctgatcaccagcgccacgctggccagcagatacagcccctccgggatcatgccgatcagcgcggccaccatgcccaccacgctttcttccaccgtgttgcccaccagcagccactggtgtaaaaacaggatcacgcctatggggatgatgatcagccccacggccttgatcaaccggttcagcgccagaatcatcttgctttgacccacgcccttgctctttttggcctccagcgtcaggcgggagatatagctgtccgctcccacggcgacaaggcgggccttgcagacgcctgaaacgataaagctgccgctcatcagcttttcgcccgggcccttggcgatctcatccgcctcgccggtgagcagcgcctcgttgacctgcgcctcgccttccagcaccacgccgtccgcgcagatctggttgcccgcggtaaagatcaccacgtcgtccagcaccagctcttcggccctgagcgtctgctcccgcccgccgcgcagcacccgggctgtgggggcgttgagcatggtcagcttttccagcgtgcgcttggagcgcacctcctgcacgatgccgatcagggtgttgagcaccacgataggcataaaggtcagactccggtacgagcccaccagcgccaccagcacagccagcaccacgaatatcaggttaaaaaaggtaaagacgttgtcgtggatgatcgctttgacggttctgctctgcgcgtccaccgcaacgttgacaaggcccatggctttgcgcagcgctacgtcgctctcctccaggccccgctccgtcgtgggctcgcgcagggcgccgcccgcacccgtctttttcccgtgaactttcatgttttatggtctcctaaagtcgttggcgccgcccgccatccagggcagcccgcgcgttttcgccgccgtctaagtaaatgccccctatatacatctattcccctttcagcaaagggataacctcgtcaagcgaggatacctgcgcatacaaaagcgcccgcgtttcgggggaagggacgatcagatccggcaccataatgggccggcacccggcccgataggccgagagcacgcccaccggcgaatcctccagggcgatgcagtgctgcggcgcaaggcctagcgcccccgccgcggccaggtagatatccggctcgggcttgccgcgggcgatcatatccccgcagatgatggcgtcaaagtacccgtccaccgccacctttttcaggtagccggtggcccgctcccgcgcggtggaggtggccacggcgattttatagccgccggcctttaaaaaatccagcagctggtaaagccctgccttgaccggcaggccgtttgcctcaatatcctgtgctagcagctggttgcgcacctggcggcaggctagaaagtcctcctcccgggcaaaaacttcggcaaacacctttttggtattctccgcgttcaaccccagcgtgcgtttgaccacggcctccccgatggggaaacccaactgctccccggccctgcgccaggccttcatcattagccgctcggtatcgatcatcaacccatccatatcaaaaatcgcgcccttgatcgtcaatctacccatcctcctcaagcactttattcctatccgttataccatgccttgcctgttggccgcaaccgggcgaaattttattagtttgctaaatattttgttgacatgtcgtaaatcgccctcctataatagacataaagagagaataagaagggggatcaatttttatggcgctgatcaaaatgaactttttatcccaggtgctggggatgcagaccaacatcaccgtggcgctaccatcgttcagctttgcagatatcgtgcagggggcccagagctattacgtgccggggatgaagttccaggtgctttacctgctgcacggcggctcgggagacgatagcgactgggtcaatttctcctccgtgctgcgctatgccgacgataacaagctggccatcatcatggcgccggctttcaactcctcctatgtggacatggtccacggggggcggtacttcaccttttttaccgaggagctgccaaaggtctgccaggccttcttccccatttccgataaaagggaagatacctttatcgccgggctgtccatgggaggcaacggcgccatgcgcctggcactgaagcggccggacctgtacagccaggcgctttgcatgagcggcgccgcctttgacgtgcaggagctcaagcgccgtgcagctcagcctccctttaataccgcggggcgcatcgccatgccggacatggaggatacctatggcgaccttaacgcctttgagggcagtgaagaggatatgttcttcgtcgccaagcgcaacctggcgcagggcaagcccatgcccaaattctattttgcctgcggcggcgatgattttgccttaacgaccgtgcgcaaagcgcacgaacacctgaaatccctggggtacgatacccagcttgaggagatccccggctatgggcacgagtgggatttctgggacctttacattcgcaaggcgatcggcgagctgttccccttaatacgcaaaccgattttgccaaactaaaccctctcaacgcgaaggggctgcagggcgatcctgtggccctttcgccattttatacaaattttgccaggggatgtgggcctatcccttcccaatccggcgcaaatatgctatacttacaccgagtaaacactttttaaggagggtcatattatggcaaaacttccggttgcagtgcaggtctattccgtacgggaggacgctgagaaggactttaagggaaccatccaaaaaatcaaagatattggctatgacgcggtggagctggccggcctttacggcatgagcgcccaggaagtgcgcaaggtattggacgaggtgggcatccgcgccctgtccgcccatgtgccttatgtggagctgattggcgataccgaaaagaccattgacgactatatcaccatcggctgcgagtacatcgccgtgccctacctcaccgaagaataccgcccgggcacgcccgagtatccccacgtgatcgaggagatcgagcgcattggccgcgcctgcaaggcaaagggcgtgaccctgctataccacaaccacgactttgagtttgccaaaatgccggatgggcagtacgcgctggattatatgtatgatgccatccccgcagacctactgcagaccgagcttgacatctgctgggtgcgcgtggcgggcgagtgccccagcgcctacatccgcaagtatgcgggccgctgcccggtggtccacctgaaggactactacaaagaagagggcaaagaggcgggcgccatgtacgagctgatcggcatcgacggggaaaagcccaaggagcagggcgcctttgagttccgccccgtgggctatggccaccaggatatgccttccgtgttggatgcagccgttgcctccggcgccaagtgggtggtggtcgagcaggatcgctcggtgggccgcacccccatggaggccattaccctgagccgggaatacctgcgccagctgggttggtaaacgaatacgctttgtaaaatgcaagggctttggaaatccaaagcccttgtttttttatgcgccacttaaaccacgtcccggccatgcagggcggcaaaccgtcttttacacggtacaaaaccgcatgttcccttcccctaccgtaccagcaccctccccagcgccacggcggcgatgcagcccgctacgcttagcgttacatacagcagagccatgccccaccgtccgccggaaagtaggccctgtgcctccagcgcaaaggtcgaaaaggtagtaaaccctccgcacaggcccacctttaaaaagagcaataagccagcgtccaagccggcctgcttttgcgccagcgccgcgagcagcccgatgaccagcgcccccaggatattgatgcccagcgtgatcagcggaaacccgctcatctcccgaacggggatcagccccaaaagatagcgtgcgactgcgcccagcatgccgcccaagcctacgaacacgcaattgatcatgacctgcatctcggataacctccctgcctttaactttaaacataaaaataagccgacttcccctgcatcctcgcagaagtcatcagctttaccagcggtttgggccgtgcggcccggggagcacttcattccccatttagatttattttaccacagccacgcacagaaatccagccacctgccacatagggacagggtggctgcccgccgctcctcacgcgcgccgttagccttcccgccttggcagtttagggctggagcgggaatcgcgcagcctggttacgcgcccgcctgtgcaaaacgcttaatacggctcaaggcagtgcgcaagtccagctgtcaagcaggtattgcctacccggcaggggccgtccatattaggcaggcctccgccccgccagagcgcaaccggtttgcacaaacgcataagcccattacatcatcaattccatcgcatcgcctacgtgctcgatggccacaaggtcgatcccctgaggtaaggctacgccccgcagcccgtctttgggcaccacgcagcggtgaaagcccagcttgacgcactcggccagccgccgctccatctggggtacgccgcgcacctccccggtcaggccgatctcgccgatgcacaccatgcccatgggcagggccttgccccggaaagaggagacgatcatcatagcgatccccagatccaccgccggctcgtccaggcgcaggccgccggccacgttgatgtagatatcctggttgccaagcgccaggtgcatctttttttccagcaccgccgccatcaaaatcagccggttataatccacccccgaggcctgcctgcgcggcatgccaaacgaggtggtggtgaccagcgcctgcaactccaccagcaccggccgggtaccctccatggcgcagaccacgccgctgcccggcaccggctccggccgggaggacaggaacatctccgaagggttgtccacctgtacgatgccctgatttttcatctcaaaaagtccgatctcgttggtggaaccaaagcggtttttgaccgcccgcaggatgcggaactggtggtggcggtccccctcaaaatacagcactgcatccaccatgtgctcgagcacccgcggcccggcgatagccccctctttggtcacatgccccaccagcacgatggcgcagcccatggtcttggccaggcgcatcaggtgcccggtcacctcgtgcacctgggatacgctgcccggcgcgctggtcagcgcctcgcagtacagggtctgcaccgagtcgatgatcaaaaggtcgggcttcatttcctcggtctcagagagcaccgcctccatctgcgtttcagccaggacgtagagctccggcgcgtccacggaaagccgggccgcccgcatcttgatctgccgggcggattcctccccggacacgtatagcacccgggtacctcccgccgccaacgcgccggatacctgcaaaaggatggtggatttgccgatgcccgggtctccccccagcagcaccaggctgcccggcaccagcccgccccccagcacccggtccagctccgtaaagccggtggagcggcgcgcatggtcctgcgcggggatctcgtcgatccgcacggggcgcatcttgcgcgcggtgctgcgcgccccccgcgccccgggcttggcggccgtggccaccttcttctcggtcatggtattatattctccgcagccggggcagcgccccacccaccggatggactcctgcccgcagttggaacagaaaaaaaccgtcttttccttggccatcgctctatccttcccttttacgaatcttcctgcggcgtggactctggcgcaggttccgtctccggcgtagcctcgggctccggtgtggcctgcgcgtccagctccgcccggtaggccgccatgccgccctcgcaatccaggcgctggaggcaatactgatccttttgctcctgcaaattcgtcacgtcgaaccagagcacggtcttgcccgccatggccggcagcatggccttttgcccctcgggcgagaggcggaagtactgcccatccgcccagcggtaggcccatatcgcctcatcccggctgtagcacaggtatccctcgcctatggcgtaggcggtcacattctcatctaccagatgggccttgccctggcccacgctcaagtacagcttggattccggcgccttattggcgtcgatccaggcaatggcgtccccacaggccaccggctcgtgcacataggtgccgggcgcatagctgtcaaagatcaggttgccctcctcgtccacctgggattcggaaaggtattgaaagatctgaatcacgctcttttcgcccgtctcccgctgctgcgcgctctggtccgggtccggcgcggcccagaggatggcgctatcggtgatgcagggcgcgctcaccccataggtagccgcatcctcaaaggtggcaagggcaatattctcctgcgacttcaggtcgatcaggtagagcttatccacattctcgtcggtctgctccatccagatcaggctgtcccccgccaggcgcagcttgggcttgccatttgggcattctttgatcttggtacgctctccgctcgcccggtcgatacaataaatcacattgttttttgccatgtcgctatccacatagcagatatattgagcgttaaactgggtctcgtagatctcgccgttatcgatctcggttctggcaacttcctggcaggctccatcttttagcgaatacaggtacagcccgcttaataccggcttgtcgatagaaccatccccggcggaaaatagcagttcgtccccataaaggcagggctggttcaggtactgaaaatccagctccggcgcccacacgcccgcggtagcatcccccgcctgcgcccgggattcgcccgggccaggcgttgcaggcgctaacgttatcgtctccccgccaggtgcgcttgcactgacaggcgctggctcacccgcccatgggcgccaaagaaaaagccccagtgctgccgccaatgccaatacgccagcccctgcggcaatggccttaccatgggccggggcggttttgcgccctgcgcggggccttggcgctatggccatggggttgcgtttgcggttgtggtgataacgcttgcgctgcatattgacctctcagctttttattgatgccctcattataccataaacggcggcgccgcaaagtaccgcggcgcacgtgttggttataataacctattcgcaggcagtgtctaaatatccgcatccaatggatagaggatggcggccgcctgggcgctgatgccctcgccacggccctcaaagcccatacgctcggtggtggtggccttgagccccacctgtcctgaggccacgcccatggcctgggccaggttctcccgcatgcgtccaatatgcggggcgcacttgggggcctgggccacgatggtggcatccacattgccgatggcatacccggcctcctgcacgcgcgcagccacctgcttaagcagcgcaatgctatccgcgcccgcataggccgggtcattatccggaaacagctggccgatatcccccagcgcggcggcgcccagcagcgcatccatcaccgcgtgggtcagcacatccgcatcgctatggcccaaaagccccttttcgtaagggatattgaccccgcccaggatcagcgcccgcccctgtaccagcgcgtgcacgtcaaagccggtgccgatccgcgggccggcatgggcggcgccctgtcttcggcgcagaatctggcgggccagcgccatgtcctggggcgtggtcagcttgatattctcctcgtcccctttggataagtaaaccatttgtcccatctcctcgagcagggccgcatcgtccgtagcgttattgcccgcccgcgccgcggcggcatgggcctgcatgatcgtctcaaagcggaaggcctgcggggtctgcacggcgtacagattgtcccgctcaggcgtggagaggatccgcccctccccgtcggtcagcttgatggtatccttcaccggcagggccgcaatgccgctgcccttctctcgggccgagtccagcgccgcgccgatcacctcgcccgtgaccagcggccgcgccccgtcgtggatcagtacgtaatcgatcccctcccccagggcgcgcagccccgcgcagaccgattgggtgcgctgggcgcccccattggcaaatgtcacctgggcctcccctttcaagggtttcagcgcttcacgcgctggcctctcctcgccgggggctagcaccacggcgatgtggcgcaccccaaagtccataaaagcctgaaccgaccaggccaaaacgcttttaccgcacagcggcaaaaataccttgttcacatccgcgcccatgcggctgccccgcccggccgcaacgatgaccgctcctacctccatacccaaaagcgccccctagttcagcgggcggtacatctccgccgcctcgcccttgggcacgtgttcggacacccgcagcacctcatagcgcaacagcttttcgccaaactggatggcgatctcgtcccccggcttgacctcgctgcccgccttggcctgccggccgttgagcgatacgcggcccgcatcgcaggcctcgttggccacggtgcggcgtttgatgatgcgcgaaaccttcaagtacttatctaacctcatcttatccccctatagcataagaaagccgggcccgcatgcgcgcagcccggccaacccattttatggtttagtggttcacggaatccttgagcagcttgccgggtttgaaaaccgggctcttggacgccgggatggtgatctcttccttcgtcaaaggattgcggcccatgcgctcggcgcgctcgcgcacctcaaagttgccaaagcccacgatctgaaccttgtcaccctttgccaacgcttccgacacaaccgacacaaaggcatttacggccgcttctgcatctttcttcgtgcaatcgcacttttcggcaaccgccataaccaattctgctttgttcataagttgaaacctcctattttacttaaaagataaacgaacctgaattaatcttaattcgctatataaatggaatctccttctcctaagggcgaaaaaaccgtaaatattctgtatctaagccctttagccgatgcctttggccttggcctcctcccacagggcgtccatctcgggcagcgtcatctcctgcaggctgcggccctgtgcggcagagcggctctccacataaccaaagcggcggatgaacttctccgtagaggcgttcagcgccatctccggctggataccggccattctggctacgttgaccacggcaaagagcaggtcgcccatctccagggccagcctatcctcactgcggggctgcgccttgtactccgccatgaattcccgcgattcctcttctatcttccccagggcgtcttcaatatattcccagtcaaaccccacttttttggccttttgctgcaccttggccgcccgcatcagcgccgggaaggtgcggggcacatcctgcatcacctcggtctgggtgtgcagctgtttttcctttttcttgatctcctcccaggtatccagcaccgctttggcatcgcccgccttaccgtctgcaaaaatgtgggggtggcggcggatcatcttctcgcagatgtgggtgcagatgtcacggtcgtcaaaatccccgcgttcaaaggccacctgtgcgtggaacaccacctgcaacagcaggtcccccagctcgtcggacagcttgtccatatcctgcaggtcgatggcgtccgccacctcgtaggcctcctcgattacatacggctttaagctctcgtgggtctgctccttatcccaggggcagccctggggcccgcgcagcgtgcgcatgatggagagcagatcctcaaaagtatagcgcacccgctccctgcgcggctgggcaggcagcaccagggtgctcaggtgggtaacgcgctggcggtccagctcataaaggggcagcttctgggccttatcctcgccggcatcatacaggcaggcgggcatatcgtccccatagctttcggccagcgccagcttacacgcccccgtcagcaaagggttgtccagctgggcgacgatcagcggcagttcggggttcggccggacatcgggctggtcctgcgcgctgatcagggcatatccctccccttggggcagaacgccctccagcgccgcggcccctgcggcgggcgcggcggccgataccccggccacaaagcggcaggcgatcccccgcgctttaacctcgcgcagcagcggctgcaccacggcctcgccgtggatgccgtcccccggtacgccgaaggccacattttcccccggcgtggagaggatgcacgcgatcagcgcggcgttgagcgcgtcaaaatcctgcgcttcctcataaaggtcatctagcgccgtaaaggccagcccgttttcctttagatagtctgcggcgccatgcttttgcgtgcgcagcagcaccgcgtccgcgccgcttagcgcctgcacggcctccagcgtcagccatttggcctgctccggccccaggcctaccagcgttaactgcttcatcgtccattccctcccttgactttgcggggcgttttccaaatatgcatccggcacagcagccgcgtgatcttggccccgccggggatataggccatatccgccgggcgaacggccttggtgatcagcagcataaacacgtacaccatcgccgccacgccgatggccagaatagtaacgacggtattgctgtggatgagtttgcgcgcccaaaggttgacaaagtagaccgcaacgcccatgcccccggccgagagcagcgggcgcaccagcatatccccaaagcgcagccgcatgtgcgagagcctggcggccatcaccacatccaccagcgccgcaaccgagtagcagcagatggtagagatcgccgcgcctttgatattgatctcggggatgcccagcaaaatgtagttgaccactaccttggtcagcgcgccgatcagcagcgcgaacaccggcaccccgaccttgcccaggccctggagcacgccggtcatggtctgcacgatgctcaggaagaacaccgcaatgctcatcacccccagcagttccacggcgatggccatttcatccgccgtgccggtgcggtagagcatggataagatgggttccgccatcaggtacatgcccaccgcgcagggcaggccgatgaggatggccagcttaagtccggtttcggccttggtgcgtaccgccaccggcgcccgctccgccaccgaggcggagatggccggcaccaggctcatggacagggccaccgtcagcactgcgggcatgttgaccagggtattgacctggccggtgaggatgcccagcagcgtgcgccgggcttccaacgcatagccgatggcctccagccgcccgtggatcatggcggtatcgatcatctgcgccaccggcatgatgatgccgcccagggtgatggggatggccatggccgccaggttgcgcagcaccgtgcgaaaagagaggatgtgcctgcgcgggctttggcggatatcctgcttgatctcccctttattgcggttatacatgccgatcagcagcaccaaagccgccacttcgcttaaagtaacgcccaaaagtgcgcccgcggcgcccgcggccgggccgccggtcaagtacatctggtaggccaggtatagcccgatggccagcttgccgatctgctctaccacctgactggccgcggtaggcaccatgcgctgcaggccctggaaatagccccggtaggccgagagcagggagacgaagaacagcgccggcgcgatggccatgatggaacttgccgccatctcatcgcccaggccctgggcgatgaggcggttgcccgccagcatcaccaaactggtaatcaggccgatgatcagcaacacccggaaggcgacctgaaagatgcggtgcgcatttcggtaatcccccacggcggtcttttccgccaccatcttgctgatggccgttgggatgccggaggtggagatcaccagcagcgtagaataaatagggtaggccacctgatagatgcccatgccctcggtgccgatcatattggtcagcggaatgcggtaaaaagcgccgatgatcttgacgatcagcccggcaaagcccagtatggctgcgcccgcgacaaacgatttggttgttttgctcatgcttccagcctttcttgccctgccgctctccaaaggggaaagcggttattctaaatcatgggcgcgcgccctggctgcttcgccgggcgcgcaccttttcacactcatccatttatccgcccaagaggcgttatcagtattatatcattatttgccctatctcaaaaccatattttacatttttgcaaagtgcgcggctgcaaatgcggcctgcgcatctgttatactgatattaaagaagcgataaaggaggtaggagctgatgaaacgcatactagccctttgccttgcacttggctgcctggcgctgttgggctgtgcgccgctaaagagcgatccccaacccagcgccgcgccctctcccacgccgccggccagcgccgccgcgccctcccaggcgcccgccggagcgcaggccaactaccggggcaaggtggtacaggtactggataacgccctgctgttggccggtgaaggcggcgcaggcgacctttgtaccctggcgctaaaggacgtggtcctgaccgacgcttacggcgaaccgcttaaagttgggctatccggcggcatggaggtcgaggtgggctacagcggcgtaattctggagacctaccccgcccagctggccggtccggtcagcctgcgggtgattgagaccggcgaagactgggtgggcctttacgcccaagtgctgcaggatctgtttcgcgcagacgagggattaaacgcgggcatctcccgcacggtattcgatctttccgccgccggaaacctgagcgagagcgaaaagagcgcccttgtctaccgtatgggccaggtgctggggtatgaggctgaggcgggcagctatgaaaccctgcaaagcgaggggaccctggacccggcggagccctattttgaggacgggctgctgtttagcctcaagctcaaagaacaggcggacggacgcatcacctttgacgcggaaaagtggcgcagcgccctgggcgcctatgtgttctacgattgtacggccctaaagcaggacggtgtgtggcgctatacggtgggaagtcacatggtttcctaacgattctccgtccatccatacaatactgaaataaatactatgcttagggatataaaaaaaggcggcgcatcttgcgccgccccataaaagcaaaggctactgcagcatctggctgcccagaaaacccgccgccgtctgggccagtttcaattcggtattgtccatggccgccccctctttggtggagagcagcaccaccgcgccgatggcgtccccctgggagatgatgggcgccaccacctgggccgtatagttcgcctcgtcctcggcggtgatggccagcatcgtgccgcccttggccgtggtgaccgccctgcgctcgcggatggccttatctaaatccgggctgatggccttatccatataatcccgcttaggcccgccggatacggcgatgaccaggtctttatcgcagatcaccaccagatggcccgacgtggcggccagcgtttccgcatactctttggcaaaatcgctcagctccccaatcggggagtatttttttaagatgacctcgccctcccggtcggtaaagatctccagcgggtcgccctcccggatgcgcagcgtgcggcggatctccttggggatgacgacgcggcccagatcgtcgattcttctcacaatgcccgtggctttcattttgggtcctccttgctttagataataaagtctacgcccatcattatccgcaatccgcaaggtttttatgcccaaatcctgcaactaatgttgcgttttaccaaatgcacgtttgcagttccgtcaacagcgcccgcgcggcgggattatcgcaatcgcacaggcggcaaagcgccataacgtagagtgctttttcaaaatcgtctaatgccgcgccctgcgcttccagggcggcatggtaccccttggccgcctggggcgcggcctcgtacagcagcacataggtgcgcgccaggtcgaatatcgggttgcccatccgggcgttcacccagtcgatgatataaagctgcccctccccgcaaaggatattgtaagggtgaaaatcaaggtggcaaagcgcatcgccctcccctaccgccgccagcgccgcccgtgcgcgcgccttatggcaggcgtccgccagcgcccggtcgatctgcccggctagcgtctcttgcagatgcgccaactttaacccctttaccgcgtgcacccgtaggtgcagcgcggccagccgggcaaggctgccggcggggtcctcgcccatccgctcccccagcgccgggccggggatataccccattttgatgatgtgcgcatcctctgtctcccaatagcgcaccacgggcaggccggttttgcagatctcccgctgcacctccagctcatagcgtacccagctttcgggataatccggcctaaagactttataagccgcgccctcatacaggtagacctcggcctgccggccccggccgatcagggggcagcggcgcagcagttcccggtttggcattgcggggtcctcctttcatctaacaaaaaagccggccataggccggcttttactttacaatttaatagcggttttcgtacacctgcacatccatccccttgcgccactcttccacctgggtggagagcttttcgttctgcttgtcgctcagcagggaggagcgcactgcgtctttgacctcgttgagatccaccgggccgggtttggcatccgataccttgcggatgatgtgatagccgtaatccgaggccaccagatccgtggtatcccccacctcgctaagccccagcgcagcgtttaagaactcggtcacaaagctggacttttcgcccaccaggtaacccttttccttggccggggaggcctccatacccttatccgcgccgtattcggcgatcagggcgtcaaaatcttcaccgctctgtaccttttgcagcaccaggtcggcctgctctttgatcttggccagctcctcatcccgcagcgcatccgccccagcggtgtccccatccgtgcgcagggcggcaatctcgctttgcttatcctccgggatgccgatgaggatgtgcttgacgtagaagaagccctctggctggtagtagatggtgtagccatagctttgctcgtaatagaactggtcgatgctctcgtcgtacttctccttagcctcttccaccaaggtatcgtacttttccttgatctcgtcgtcagtgacttcgatatccttaaacagctcatcctgcatcttctggatggccgtttccatcagctgatcttcgatcagggattcccgggtcatcttatttttctccatcagctcggccagcttctcgtccgccctggcctccacgtcgatggaagggtcctcctctttttcggcctgcgcttcggtcacaaactgctcgcgctgggcgtcaagcatctcatccacctgcttttcagcggcggcctgctcttcgttggtaaaatcggtatagccctccttttcggcctgggcctccatcacgtgctgggcgatgatggcgtccagcaccacggtcttaaactccttgacctggtccggactgctcttttcataatcctctgtaatgccgtagtaggccttttgctggtcgtaaagatccagcagctcgcccttgaggatctctacatcccccaccttagccaccacctgctggcggtccttcgtctcatctacctcgacgatgttacacccggtaagggaaaaggccatggccaccgccatcaggccggccgcacacttggctccccacttcttcatcaggatcatcctttctctatcgcaactggggcccgtatcagcgcccctttatggctgcccgcatccgggcctttaaccatacaagaatagcaacattatacagaatccgggccggttttgcaattcaaaacttcttccatcaggcgcgtcatctcctctagcagcgcctcggccgtggcatccttaccccgcagctgtagcgaggggggcaccgcggcgctgagcttggcgcggcccttgtagcggcccaacacctcaaaaagggcctgggggtccagcttggcgtcttcgtaaaatagcagtgtggcaaagccgggtttgacgctgagcttctgcgcgcccatcttggtggccagcgtccgggccagggccaccgccagcaggcccatcacgggttcgggcgggtcgccatagcggtcgatgatctcgtcgatcacatcgtccatctcctcccgggaggcgatggtggcaatgcgctggtacatggcaatgcgcccggcctcgccgcggatatagttggaggggataaaggcgtctacccgggcctccacctgggtctcgggccgtttttcctccttgggcccgccgcccagggcctgcacggcctcctcgatgagcttaacgtacatctcataccccacggcggccatgtgcccgtgctgctgggcccccaccaggttgcccgcgccgcggatctccaggtcccgcatggcgaccttaaagcccgagccgaactcggtaaactcccggatggcccgcagccgcttttcggccacttcgctcatgatccgatccggccggtaggtaaagtaggcataggccagccggttggagcggcccacccgcccccgcagctgataaagctggcttaagcccaatcgctcggaatcgcacacgataatggtattggtggtggggatgtccagcccgttttcaatgatggtggtacacagcaaaaggtcgatctcatggttcataaaggccatcatcacgtcctccagcgccccttcaggcatctgtccatgggctacgccgacccgcacccccggcatcagcccccgcagccgggcggcaaaccggtcgatccccgccacgcggttgtagaccatatatacctgcccgccccgggagagctcccggttcacggcctcgcgcaccagcgcctcgttatactctatgacgtaggtctgcaccggataccgctcctcaggcgggttctccagcaccgaaagatcgcggatgccgatcatggacatgtgcagcgtgcgcgggatgggggtggccgagagggtgagcacgtcgatattctttttcagctttttgatcttctccttgtgcgccacgccaaagcgctgctcctcgtctacgatcagcagccccaggtccttaaagcgcacgtccttgcccaacaggcggtgggtacccacgatgatatccacctgcccgcttgccaggcggcgcaggatgtccttttgctcggctgcggtcttaaaccggctgagcacctcgcagcgcaccggcatctcccccaggcgctgcaccagggtgttgtagtgctgctgggccaggatggtggtgggcaccaaaaaggccacctgtttggaatcggccactgctttaaaggccgcgcgcacggccacctcggtcttgccatagcccacatccccgcacagcagccggtccatgggccgggggctttccatatcccgcttgatctcctcgatgcaggccagctgatccgccgtttcctgataggggaagttatcctcaaactcccgctgccagggcgtatccggcgagaaggcgtaacccggggtctgcgcccgctgggcgtacagggccaccaggtcctcggctagcagggcgaccgactgggagaccttctttttggtgcgcttccactccgacccgccgatgcggctgagcttgggggccgccccctcgtccacgccgatgtacttttgcacccggtccatctggtccgtgggcacaaacaacttatccccgccggcaaagctcaagtccagataatcccgggacttgccctccaccgtgatgcgctggatgccgtggtacagccccacgccgtgcagctcgtgcaccacgtagtcccccaccttcaggtcggtaaacagcgagccgatcttttgccccttgcccgcgtggcggctgcgcagggtactcttttgctgccggggcgcggaaagcacctcgccggtagcgatcaccgcgaacttcgcctgcggatactcaaagccgtggcttaagccaaggggcaaaatcacgatctcgccgctttgcagcggccgctccagcccctcggcatagacggcctctactccctgatccagcagcgcgctttgcagatgcttgccccgggccttctccccggcgagcagcaaaacagcatactgctgggcgtgccaggcgcgaatctcctcggccaaaagttcgatacggccggggaaggcgggcaccgaacgcaccaaaaactggaaggtctcccgggcgtgcagttccggtacagcccgcaccagtccctgaaaggccatcaccgggcaaagggcgatctccccgagcagttgctcatagctgcgctgccctttggcgatggcgggcagggcctgcccctgctccagctgcatggtcagcatttccgaaaaggtcagcgccacatcctgggcccgctcgcggatgcgggcaggctcatccagggcgacggcgacgttctcccgccaggcgagcaggcttgcgggctgctcataaaacaggcccagatagtgctccatcccctggaaaggctcccgggccgtcacggcctccgtcatggccttggccaactgctccaggcgcagggctgcgtcgatatagctattgtcctgggcggtctcctggtccggcgccgcctcatccccctccatctcggggaaggcgtcccgcgcacgctctttttccagttggtcaaaccgccgcttttgccggcgcttgccctcccgcacggcggaagccagttgggttttggccctttcccaagccgcatccccgggaatcacctccagcgcgggcagtacggaaagcgcctcccgcttttcccgggagcgctgggtatccgggtcaaaggtacggatggaatccacctcgtcgtcaaaaaactcgatgcggctgggccattcctcctgcatggggaagatatccacaatgccgccgcgcagggcaaactgccccggcgcctccaccatctcctcccggtggtagcccgccgccaccaaaagggcgcttagctcctcctgggccaggcgcgcgccggaaatgatcttcagcgtatggccggcaaattcctcccggggcatcacgctttgcaatagcgcatctaccggggccaccagcacgttgatctctcccgtggcccagccgtacagggtgcggatgcgctgggcggtcagctcccgcgaggctgcggccgcgcggaaaagctgctgctcccgcgggggcagcacgcccgtgcgccggccggacagggccgccacatccgcggccagcatgtgggcctggggcagggtatgggtgatcagcaccagctcccgctcctgctctaaggcgcatagcacgtgggccttttgtccctcgcttaggccatagatcatcagcggcgtacggcccgcccggtaggcctgctccaaccgcaaaaactccggctgtttttcaagcggctgccgccacagcggcgaaagttctggcatctttttcctccaaacgcgccttacccggcaaggctgtttaccgtccttgccgggttcatgcatcatcgcgatcttcattttattttatgccttttcgcgaggcttttaaagggcgctaaaatcaggcaatatgtctaattttgtccgctttcagcgggtattatagcggttcatggcaatatcgatgccgttttccacaaaacagcgcgcggcctcggcgccggcggtaaaggccagctccatttccgcccggctggcgggcggatagctgcccagcacgtaatccaccaaattccactggggcggcggcgcgcccacaccgatgcgcacccgggggaagttttgcgtccccaaagcccccacaatggaacgcatgccgttatgggtgcccggcccgcccttggcgcggatgcgcaccttcccctcgggcaggtcgatatcgtcatagatcaccaaaatgcgctccggcgggatcttgtaaaaccgggcaatggcgctaatggcccggccgctctcgttcatataggtcatgggctgggccaggatcacccgcctatcccccacccgtccctcgcccagcagcgcgtcaaacttctggcgctggggcaggatactcagcagccccgagagcttttccaccacctcaaagcccgcgttgtgccgggtgcgggcatactttacgcccgggttacccaggcctgcgatcaggtacacgtcctgtttgctcctttgccatggcagcggcattattccgcctccaatacttcgtcgataaaggcttccaacgctgtataatcgcccccgcggcagggcgcgacctctccccactcgcccaagggctgctcgtttaaaaagaaggtgtgcatccccagcgacataggggcgagcatatcctcgccgatatcattgcccaccatgcagcactgccccggctccaggcccagcttggccatgatctcctcataataagccgcgtgtggcttggcggcgcggctattttcataggtcgtaatcaaggtaaagtcctccgggtccagccccgcccagcgcacgcgggcgcgcagcgccgcctccggaaacaccggattggtggctaccaccagcgtcttgcccgcatcttttaattttttgacgacgcctgccgcctttggatggggcggaaagtgcacccccagcttggggaagcgcttggaatagtaatcgttgagcgggccctcgtaggccgcccattcccggcccgtgcggcgggtaaaggcggatataaatccctgctcgttggtcatcccgtcgtgaggctgggcaatcatatcataggtggcccccaccaccggctccaccagctgctcgcccgggaagtgcggcgccagcgcctgacccaggtcccccagatacagttttaaaaaccggtctacctccatgggcaaaagcgtcccatccaagtcaaataaaaacgccttaatcatagtctccttccacatccatttactgtccagtcgccagcgcggccctactcgtaaagggtagagaccggcaggtcgttataaatgcgctcgatcgcctgggagaataccgaggccaccgacaacaccacgatcttatcgcagcgcttatcgcccagcggcacggtatcggtaatcaccagctcccgcaggggcgattgtgcaatgcgggagatagcctcaccgctgagcaccccatgggtgcagcaggccgatacttctttggcgcccatcttcatcagcgcctccgccgccttgaccagggtgccgccggtatccagcaggtcgtccaccaggatcgcccggcagcccttgacctcgccgatgatgttcatcacctcgctgacgttgggccggggccggcgcttatccacaatggccagccgcgcgcccaggcggttggcaaagttgcgcgcccgggtgaccgagcctaagtccggcgagaccaccaccagatcctccccggcataacccttttctacatagtaggtggccagtgccggcgccccgcgcaaatgatccaccgggatatcgaaaaagccctggatctgggcggcgtgcaggtccatggtcagcacccggtccgcccccgcggcggtgatcaggtccgccaccagtttagcggtgatcgggtcccggggcttggtcttgcggtcctgccgggcgtagccaaagtaggggatcaccgcggtgatccgtccggcggatgcgcggcggaacgcatcgatcatgatcagcagctccatcaggttctcgttgaccggcgtgcaggtggactggaccaaaaacacgtccatcccccgcaccgtctggccgatgtctacgctgatctccccatcggaaaagcggcccaccttgctctcgcccagcggccgattcagcagacgcgcgatgtctgcggccatgccggggttgccgttgccagaaaagacgacgatattcttaccgtgtgtgatcattgccccaagccccccgttgcttctcttttactttttttgccgtttttgtgcggcccatcccgcttttaccgtctgtctgcagcgggcgatggccagcgcgtccccgggcacatcctcggtgatggtggagcccgcggcgatatacgccccgtcttctaccttgaccggggcgaccaggttgacgttgcagccgataaaggcgtcgttccccacggtgcaacgctgcttgacctgtccatcgtaattgacgaacaccaccccgcaccccaggttgacccgctcgcccacatcgctgtcccccacgtacgtcaggtggctgatcttggtaccatcgccgatgttggcgtttttcagctccacaaaatcgcccacccggcagccctggcccacgttggccttaggccgcaggtacgcaaagggccccacctgggtatgcgcgcctaccgcgcagtccagcagcacggaggactgtacctgcgcgccgtcccccacgcggctatcggcaatgcggttgttttgcagcagcgtgcagccgctgccgatcacggtctccccctccaggatattgcccggatagatcaccgtgtccacgccgatgcgcacctgcgcgtcgatataggtggcgttgggatcgagaatggtcacgcccgcaaccatccagtcatggttgatgcgcctgcgcaagatctctcccgcctcggccagctgggcccgggtgttgacgcccatgcattgggtaaagtcatccgtacaataggccgccaccttttgcccatccgccaccaaaaggccgatggtatcggtcagataatactcgtgctgggcattgttatcgtcgatccggtccagcgcccagagcagcttatcggtctcaaagcaatagaccgaggcgttgacctcgcataccgccagctgctcgggggtcgcgtccttctgttcgacgatgcctgtcacattcccttcgccatcccgcagcacgcggccatagcccgtggggtcgctaagcttagccgtcagcagcgtcaccgccgcgccggcatcctgcgtctgctggcagagcgcccgcagcgtctccccgccgatcaggggcatgtcccccgccaggatcagggtatagcccttgccatcggcaatataatcccgcgccatcatcaccgcgtggccggtgcccttgcgctcggcctgcaccgcgaactgggaccggccctccaggtgcgcgcgcacccgctcagccccgtggccgataatcgccaccggcttttcatccgaaacctcgcccgcggcgcacagtacccactccaccaggctacggccgcacaccttgtgcagtactttgggcagctcgctcttcatgcgcgtacccgcgccagcggccatgatcaacgttttaacgtccatttttatcccccttaaacaaagcgatattcctattaaaagcgtgattgcaagaatacgatatccttttcaagtttaggcgaaaaggatgggcctgtcaagggaagtgtaaacccctaagcacataaaaaaagggatgcaccgtaaaggcgcatccccctatattgccgttcaaatcccccaaagccctttaggattggggcgttttcagctgctggtacttatccagaatcagctgttgcagttccgcccgtgcggaggtgttgatcgggtgtgcaatgtcgcggaagctcccatcagagagcttgcggctgggcatggcgataaacatcccttcctgtccttctacgatcttgatgtcgtgcacgacgaagctgttgtcaaacgtaatggatgcaacggccttcatcttgctgtcagtctgtacttctctcacacgaatgtccgtaatgttcataagtacacgccccttcatattagccttttctcctttgtctgtctctgtctacgctaggagtttagccaatatttcgacgtttttacagaatattcctgccgtgagaattctcgattttttcacatttattccactttttgtactattctaaaaatttgtcaaccaggccgccgggctgaccttgaccaggctgcgcgcctcgtcgatctcgtcgagcaccaacaaggatttataattgtctaccagcttgtgctgcggcagagccgtggccatgaccacgcctacgcccaccacggtgacggcgaactccttcatcatatcgatcatgcccttggcggtgccgccgcccttcataaaatcgtcgatgatcagcgcgcgctggccgctgcccaccaggcgcttgggtagcgtcatggtctgcaggcgcttggaggaggcggaaacgtagttgatggtgatgaccgagccctcggccacccccgcgccccggttgcggcgggcgatgatcatgggcacgttgagcacccgggcgcacatcatggccaccggcacccccatggtctcgcaggtcagcacaaaatccgggctgttgcgataaaactgggccgccagtatctcgcccatccgctcgatatgcccgggcgtggagagcacatcccccatataaaggtagcccccgggcaggatgcggtccggcgcgcacagccgcagggccatctcgtttgtaaaggccagtgccttgtcccgggccggcaccggcaggtacttgaccccgccggcagccccggtcaccgtttccatctcgcccagcccgtattttttaaagatatcccgaacgatatcgatatcctcgctgatggtggattttgccgcgccaaacatctcgctgaaataagaaagggtaaatatcctgttgggggcctccgtcaaaatcttgatcagcgcgccgatgcgctcgttccgcttgaccttttccacattgcacctcccacaaattccgaacatttcttaaacctttactattataattcactttttgtaataatgaaagcattatcgataaaaaagttgataatctagccccgggagaagtataatgatatgagctttaggaatatccaaggaggtttaaaacgttgcagcccagtataatcgatttttcaggcaagcgcgtccatatgatcggtatcggcggcagctccatgagcgggctggccaccatccttcaaaataataactttatcgttacaggctcggatatgagcgcctcgctggcgtgcgaaaagctgacccgccagggcatcaccgtttttatcggccacaaggccgagcaggtggacggcgcggacctggtggtctacaccgccgccatcgcccgggataacccggagtacctgcgcgcccaggagctggacctgcccatgatggatcgggccacgctgctggggcagatcatggaccgctacagccgctccatcggggtggcgggcacccatggcaagaccaccactaccgccatgctggccaccgttttggagttggccggggccgaccccaccatccatatcggcggggagctggagctgatcggcggcagcgtcaaatccggcaagggggatatattcgtcacggaggcctgcgagtacgtcaaaagcttcctcacgctgcaccccacctgcgccatcgtcaccaacatcgaggcggatcatctggacttttttaaggacatcgaggatatttatagcgccttttacgcctatacccaactgctgccgcccgatgggctgctgatcggctgtggggatgaggagcgggtcgtccgcctgatggcgcaggccgggcgcaaggccatctcctatggctttggccggcacaacgactattatgctaccgacattgaatttgacgatatgggctgtgcgggcttttccattatccatgaggatcgttctttgggccgcgtacagttgcaggtacccggccggcacaacgtactggacgcactggccgcctttgtggccgccctgcagcacggcatcacggtggaggccgcgcttagcgggctgcaggcctttgccggggctaaccgccgcttccagaccatcggcacgccctgcggggtcgaagtggtgcaggattatgcccaccatcccaccgagatccgcatgctgttggaaaccgccgcgcgccgcaagcataaccggctgatcgcggtatttcagcctcacacctttacccgcacggccgcgctgtttaacgaatttttaacggcctttgatcaggccgacgaggtgatcgtcaccgatatttacgccgcgcgcgagcagaacaccattggcatcaccgcccaggccctgtgcgacgcgctggcccaaaagggcgtaaactgccgttacatcggcccctttgcgcagatcgtatccgacatccagggccgctggcagcccggggatctggtactggtcattggcgcgggcacggtagagcgggtggcccgcatgctctgtggcaaggcgtagtccatccttacataaaaaggccgtggcttttgccacggccttttcatatctcctattaaacaaacgcagataaatcatgtgcgcccttatcctcgcctactggttttgcgcctcgcgcccatccagccacgcctcaaattccggtatgggcagcggacgcgagtaaatatagccctgcacactatcgcagtgcaccgcccgcaggagttcaagctgctcggtcgtttcaatcccctctgccacggtatccatcttcagctcccgcgccagagatacgatggcgtccaccactttacgagtcttggggttatccacgctgaagaataagcgccggtccagtttgatcacgtccacgtcgaactccatcagcagccccaacgaagaataacccaaaccgaaatcgtccagtgagcagccaaagcccaagcggtgcatctcgcgtatctcctctttgacgtatgcaataccccgatcctcaaagaagatggattccgtcagttcaaactcgatcatgccctttggaatttggtactggcgggcggtctgcgcatattcctgcaaaaagtttcggtttacaaaattctggcgcgacaggttgaccgataccacgattggcgcgcggccctcatccatccatcgccgcaggaccttgcagacctgttcaaacacgtaaaaatccagccggcaaattataccgctgcgctcgaagagcggaataaaatccgaggggaagatcggccccaatttgggatgaatccagcgcaccagcgcttcggccccgtgaacatgcacatccgtcagcgataccttgggctggaggtagacctcgaactcctcattcgccagggcagcctcaaacaaaacgttcaattcatgttccctttgcagcatctgcgttaacgcctggtcgtaaaacgcacaaacctcctggctatcgggcagatggttccggcaggcggtcagcgccctgtcgcggataatggtggtatcctgcccgggttcttctacgatatagacgccctgctgaattctgagataatatggttcccgcaggtctgtgttaaaggcattgatgcgctgaaccagctccgccaggcggcgcgagatactctcgggatcgccttcccgcaggcagaggaaaaaatagtccctggccgcatatgccgcggcctcatcctggtttacagcgccttgcagcacctgcatcacatagcgcagggttttgtcccgctcaacactgccaaagctctcgttgatcaaggtaaggtcgaaaatattcagcgccaccacgcagtagctgttcggcggggcgggttcgatcagttccttacagcgcaggctgaaagcagggccattcatcccctcggtcacgggatccacaaaggcgatccgctccagcttgcggtaatgggtctggtaatttttgagcagcaacactaccagcaccagcagcaccagcactgccgccgtaatgatgataaaggattgatgaatgtatagatcagtctcgctggagatgatgtctgcaggagccaatgcaagcaacacccaattgtaactgtgcagcggctgataggataagaccagccgcgttccatccaccgcagtaaaggaaaacacaccgctttgcccgctactcatatcctctttcatttgatggatttcctgtgcggtctgtccgccggtgccatcttgaaaaatgctttccagctgcataaagtcgtccagctcggtgggcgaaatgatgacctcgccctgatggttgatgatacaggtaagccccctgccggaaaagctggacggctggatcatctgctgcatgttggtcttgtcccgcacgccgctaagcgcaccgatgatctcatccccatcgtgcagcggaaccgagtacagcaggctttgctggtcgagaaaagaaacgccgttttccccctcaagggccgcctgcaccccgggataacccacaacactctggtccacaagagtgctgtccagcggctgttcatcttttagagtgatgacgattttattaaagcctaaaagcgccgcacgctcttcaagataggcttccaactcgttattgtcctccgacggatcgcccaggctggtcagcaacccatcctccatcagcgtcaggtccaggatgttcttgcccaggcgatagtcgatatcgtctgctaattggttggccacatccgaaacgtagacttccgtacgccggtcgacggcctgtccaagtcccagcgcgttccagatcatcaatcctgaaaccgccgctaccattaggagcaataacaagatcttattccactgttcaaaaaggatcctccgaaagccgccaaacgctgcggactgggacccgccctttccaagacccatgcctttcactcctgctatcctttaacccggcctgtgaagcgccattattcttgcgagccctctccgttgccgccgttttcgttcgggttagtatctccgttatcgttatttccatccttgctgggcgatgcggtggccggcgtgtccgcgccgcgctctttcacgcccacataggtcttgccgcggatggcctcgtagttatccgtatgcagcagctcgcgcttgatctcctcgccatcctttttccaaatgcgccaggctttgaccacatagccgtcccgcgaaaggacgacctccttcttttcatcggtataggtcacatacttgccttcggtatcctgcacgatctcgggctcctccttgggcgtggtgttgaccagttcgctctcaagagagatggacaccccttcttccagcggctcgccgtaaatctccaccaccacgtccttgccgctgacgtaggtcttgatgtaaaagggcagatcggtatcgttgataaatttataatcctgatagccgtagtttaccgtcgcgtcaaatcccttatccacgtaagaggaagggaaagaatggtgcgcgcgcacggtggagttgagccccgccttcaaaatggcgttatagatcgtggtggaggactggcatacgccgccccccggcccatcctgcagcgatttatccgaggcgatcagcggcgcatcctggtaaccgttctccgccgtacgggggccggtggtatcgttaaaagaaacctcctgcccggggttgaccaccatcccgttaaactgcttgagggattctttgacattatgggtgcgcgcagcggagctgttgcccaaattggtgacaaaccggccgcgcagcttggtggttttttgcaggtcgctggccaaaagcgtcggctctatggtcttggtggggatctccagctgcgcctgagggtcgctcatcagcgcagataggatgttggtatccagcgcctcggtatcgatctggcggccctgcacctcggcgactacatggaacatctccgagccgctcttgttggggtcaaactccatcttggcgttttgcatgggcacgttgaccttttcggccacctgggtgatgatagcgtccaccttctcctcgtcatagctgaaggtgaccgggctggaaaagccctgtccaaagcccagcaccatcttcaaatggtcaaaccagctcatctccttggcctggttaaacgcctgatcgatcaacgcctgtgcgtccgaggtgacccctaggctctcggcatcaaaattccaggattcctcctcaaaggtcaacgtcaagttgatctcggccaggcgcgccttctcctgctcctgcaccagcgccagggcctcctgcggcgttttgccacccaactccacaccctcgatcactacgccccggtgcagcacctggctctcatagctgcggccgatctggatatttaatacgatcaccgccgtgataaccgccaccagcgttacgcccgcggcgatcaacgccttagcgttacgcacccggtactttctcttcttgcgcgtgcttgaaaaacgaaatttattcatgaacaacctctcacaatccccatactttcagcgcgtacgctaatcattcagcaggcagtccgggtaaccgtccggatgccagacccccttttgcgccgtgcccaccggctgccccggccggttctctccgtgaaaatcgctgccgccggtagccaccaggccgtatttttcacacaagcccacacaccacgcggtaaactccggcggatttttggggtaatagcactccaacccccgcatccccgcctgcgccatctcccggatcaggctctcggtctggtccggcggcaggtgcatcagccgggggtgcgccagcaccgcagcaccgcccgaggcgcggatcacaccgatggcttcccgcgcgtccatgctgcttttgggcacgtaagcgggcccgcccaagccgatatacttttcaaacgcctccttgacgctatctacatagcctttttccatcagcgcccgggccacgtgcggccgggcgatcacctcccccgaggcaaacttgcgcacctcatcgtaggtgatatccatccccagcttttgcagtttctcgaccatccgcgccgtgcgctccagccgcagagcctgcatcctgccaagcaggtcgaccaggggacccttttgcgtatccacaaaataccccagcatgtgcagggtaaaggcgcgctccacgctcagctccactcccggtatcacccgtacccccaacttctccccggcgctcatagcctctgccacgccggatacggtatcgtgatcggtcagggcaagggtagttacgccctggcatgccgcctgctgcaccacctggcctggcgtgcaggccccatcggacgcggaggagtgggtgtgcaggtcgaaaatagggagttgctctgtcaatatactaccgcctttactcatagggtatgacaaattcagccatgtatttcattatagcatgtcaagccctggcgtcaaaccatccttcacctttttttacagatattaaacaacgttaacctttcgctaaaaaactgttaacattttggcccgtacccccaggttatgaacgccgctaaaacagctgaagcgcccgagtgactcgggcgctcccctattttcagccatacagcacgttttaatccttctcgatcttaaaattcttacgcaagtattgaacagctgcgctcccggtaaggccaactgcttccagcgttatgctgcctttttgtcatctcccttctctttaaaggcaaaaaatcgctggccaatatagttgagcgccgtaaacaggcacatgccaaagagcatggatatctgctcgaccacgctggtctcccaccccgtgttgcgcaggattgccgtcaccaccggctgggccaggctataggcgatcacatagcatatcgctacattcaatgcaaatttaagcgctgttttccaaatggaatccttatttttaaaggtataggtcttattgaggacaaagctcaaaatactccccagcacataggagatggccgacgacccccagtacccaaagtgcgccagattgtagagcaaaaacatgatcaccgcgctcagcagggtattggccacgcctacgaggataaacttgatcagctttatatcaaatattttggccatcgcctacttttcctctccgcccttttcgtggctctcatttaaaaattgctcgataataaagcgcggccgcgccttggattccaggtagattttgccgatatactcgcccaccacgccgatggacagcagcatcagccccccgatggcccagaccgatacggccacgctggcccagcccgccacggtggcgcccatgcaaaagcgcacgaagatatagatcagcatgatgatactgaccataaagaccacaaaccccagccctgtgatcagccggatgggcttgacgctcagcgaggtgatgccctccatggcaaaggcgaccatctttttaaggggatacttgctttctccggcaaagcgctcgctgcgctcataggtcacggtatccgtgcggtagccgatcatgggcacgataccgcgcaagaacaggttgacctccttaaactgagccagtccttccagggcgcgcttgctcatcaggcggtaatccgcatggttaaagaccgtattggcccccatcgcgttcatcaaccggtaaaaactctcggcagtaaaacgcttgaaaaagctgtccgtagtccgtttggagcgcacgccgtacacgatgtcgcacccgtccaggaacttgtccaccatctcgtcgatggcgttaatatcgtcctgcaggtccgcatccatggagatcaccgcatcggccaggtcctttacggtcataaggcccgccagcagcgcgttttgatggccgcggttgcggcttaaattgatgccgctaaagagcgggtcctcttcgtgcagggcgctgatgatcggccaggtcttgtcctttgagccgtcgttcaccattaccacgcggctctcaggcgagatcttgcgcttttcaatcagactattcattttgactttcagacgtttagccgtttccggcaatacttcttcttcgttataacaggggatcacgatgtaaaggatattgttcattagaatccacctttttgaaatggtatacattttggttgaatgatgctctttattatagcattttaaaaaacaatagacaagctcttctccttacagcggcgaagcgtaaccgttgccaaacagcggatccgtttggccggctgtatccggtcctcaaccaaaagtgcctgcaaagcgcattcatatgcgggtgaatagaaaaagcgctgcggaaaatccgcagcgcttttatcaatgctgtttggttttgtgtgcagacttatttgcccatgaccacggcctgcgcagcagccaggcgcgcgatcggcacgcggaagggcgagcaggacacgtagttcagcccgatgttgtggcagaacaccaccgtgctcgggtcgccgccgtgctcaccgcagatgcccatcttcatccccggacgggtctcgcggcccagcttaacggccatcttcatcagcttgccaacgccaacctggtccacgcgggcgaagggatcgctctcgaaaatcttcttggcatagtaatcatccaggaagttgccggcatcgtcacggctgaagccgaaggtcatctgggtcagatcgttggtaccgaaggagaagaactccgcctcggtggcgatctcgtcagcggtcagcgccgcgcgcgggatctcgatcatggtacccaccttgtagtcgatcttcacgcccttttcgtccatgaccttctgggcagtctccaccacgacggccttaacgtacttgagctccttgacctcgcctaccagcgggatcatgatctcgggcaggatgtcatagcccttctccgccttcacctcgatggccgcctcgatgaccgcgcgggtctgcatctcagcgatctcgggataggtgacggacaggcggcagccgcggtggcccagcatggggttgaactcatgcaggctctcaacggtgcccttgagctcatcaaaggtcaggcccatttccttggccagcgccgcgatatcctcatcgttgtggggcaggaactcgtgcagcgggggatccaggaaccggatggtcaccggacggccctccatggcctcgtaaatgcccttaaagtcagccttctgcatgggcagcagcttgttcagtgccgcgcggcgctgctcctcggtcttggccacgatcatctcgcgcatggcggggatgcggtcctcatcgaagaacatatgctcggtacggcacaggccgatgccctcggcgccgaacttgacggcctgacgggcatcgcgcggcgtgtcggcattggtgcgcacgctcagggtacggatgtcgtccgcccagcccatcagggtggcgaagtcgcccgtcacagcggcgtcgatggtctccacggcctcgccgtatacgttaccggtgctgccgtcgatggagatatagtcgccctctttataggtcttgccagcggcctcaaaggtcttggcttcttcgttgatgcggatatcgccgcagccggcaacacagcaggtgcccatgccgcgggccacaacagccgcgtggctggtcatgccgccgcgcgcggtcaggataccctgagaagcatacatgccctcgatatcctccgggctggtctccagacgaaccagaacgaccttgctgccgtccttggccgcttccacagcctcttccgcggtgaagtaaactttaccgcaggcagcgccaggggaggcgggcaggccgcgggcgatgacttccgccttcttcagcgcgtcagcgttgaactgcgggtgaagcaggctatccagctgcttgggctcgaccttcatcacggcctcttccttggtgagcatgccctcgttcaccaggtccacggcgatcttcagcgccgcggcagcggtacgcttgccgttacgggtctggagcatgtagagcttgccgcgctcgatggtgaactccatatcctgcatgtcgcggtagtgcttctccagggtgttggcgatctcggcaaactgatcgtacacggccggcatggtcttatgcaggtcggcgatggggttgggggtacggataccggcaaccacgtcctcgccctgggcgttgaacaggtactcgccatacagcttgttctcgccggtggcggggttacgggtaaaggcaacgcccgtaccggaatcgtcacccatgttaccaaataccatggcctgcacgttaacggcggtaccccagtcgcccgggatgtcgttcatgcggcgatatacgttggcgcgggggttgtcccaggagcggaacacggccttaacggactcgagcagctgaaccttgggatcctgcgggaactccacgcccatctccttgaggtacagggccttgtacttctccacgaccaccttcaggtcatccgcgctcaggtcggtatccactttggcgccgacggaggccttcacctcgtccaggatatcttcaaacttgcgcttgtcgatctccataacaacatcagagaacatctggatgaaacggcgatagctgtcataagcgaagcgctcgttctgggtcagcttagccagacccttaacggccacatcgttcaggcccaggttcaggatggtatccatcataccaggcatggacacgcgggcgccggaacggaccgataccaggaaggggttctccagatccccaaactttttgccgttgatctcttccgtcttggccagagcctcatagatctggtctacgatctcgtcggcaatgactttgccgtcctcataatagcgcgtgcacgcttccgtcgttaccgtaaagccctggggcacaggcaggcccagaccggtcatctcggccaggttggcgcctttgccgcccaacaggtttcgcatctcggcgttcccttccgagaacaggtatacgtacttgttagacattcaccaattcctcctcaaaattttccatatgcaaaaccgggcaagcccggtttgttaggcaaaaaagcccgattttccgacatccgccggacaagtcgttaatattttaatacaattgcccgctaaatgcaaccattttagccgccctgcggggtatttctttcattattcataaaggtttgcaagctgtcctccacctgctcgatcttttcgataaagcggccaaggcgccgcgccccgtccatgcggtgggcggcaaagccgcgcaggatggcccccagctgctcgcgcgcccggcggctcaggcgcagcacgttcatgcgcgccgggtcgatggtctcgatgtattccatcatcttcaaggtgccccggtccacggccagcgcctgcggggcgcgcacagcacaggccgcgcacagcacgccgcccgcccggggatcaaaccccacggcctccccctcctgcaccggccggccgcaggccacgcaccgcccggtttcgatgcggtagcccagcatggccatcagctggatggtatagatgatggccacatcctgtggcggcatctgcgaataggccagaaaggccagggcgtgcagcgtcagggcaaactcatccaccgcctgctggcggggttggatggcttccgccgccatggcggtaacatagctggcgtagcttaagcgcgttaaatcctcccgcagaggatagtagctctcctgcagctcaaactgccccagggcatagcgctgcccccgcacattaaaggcaaactcccccatggcaaagggctgtgccgcggcggacaaccggcttttgggcctgcggcagccccgggcgatggcgtcgatccgcccctcggtaggggtgagcacgctgagcatccggtcgtaatccttataattggcatagcgcaccgtaaggcccagggtcttaagggtaggcggcacggcttttcacctcaatcctgatagcccagctcttttaaggccagcggggaattgcgccagttctcccgcaccttgacccagagctgcaggttcacctggcagcccaacagcttttcgatatcgtagcgggcctgtgccccgatcttgcgcagcatgctgccctgcttgccgatgatgatgcccttatggctgccccgctcgcaaaagattgtggcctggatatcgacaagcggcttatcctggcgctcatgcatggccatcagctccacgccgatgccgtggggcacctcctcttgcagcaggatcagcatcttttcccggatcatctcgcagatcagtcgctgctcgggctggtcggtgatcatatcctccgggaagtactgcggcccctcgggcaggcgcttttgcagcgccgtttccagttccccaagccccttgcggcggcgggcggagatgtagaccacctcgtcggcgctgcccagggtgagcaggtgcgccacctgtgccttggccgtatcctcgttggccgcgtccatcttgttaacggccaggatcaggggggccttgcggttttgcagggattggaacagcgcccggtccccctcgccaatgccggcggccgcgtccaccagcatcaggatggcctccacctcgtccagcgagcgccaggcggtcttgaccatgtattctcccaacttatttttgggctgatggatgcccggggtatccaaaaatacgatctgaaagccttccccggtgagcaccccctggatggtgttgcgggtggtctggggcttgtgggagacgatggcgatcttctcccccaccaaagcgttgagcagcgtggacttgcccacattgggccggcccaggatcgctacgaagccggaacggtattgtttctccaaatctcttactccttttcctcatgtcctggcatatccgccgccttaaaggcgtggggcaacagctgatccagcgtcgtctccagccattgcccgcccgcgccgccgcaatagacctgcatctccgcttgcgcggcaaactcgctgagcacctggcggcacactccgcaagggtaggtcgccccctggctgtccgacacgatagctacagccgcaatttcccgcgcccccgccgccacggcagagaataccgccacccgctccgcgcagcaagtggcgctgtaggcgctgttttcaatattgcagccggtataaatcgcgccgtccgccgcaagtaccgctgcgcccacgcggaagtgggaataaggcgcgtatgccccctgcatagcctgcagggcccgcgccttaagcgtttcgatcctctctagtgtcatcatattttcctttccgggccttgcgctacaccagcgccaccgtggccagctgcatcagcaatatcgtgaccagtacgccgatcaccccgccggcgatcacctcaaagggcgaatgggtatggctttcgatgcggctctgggccaccagcagcgccagcagcagccccagcgtggccaccagcggatcgcccgagaccacggtcatcgcggtaaagagcgaaaaggccagcgcgctgtggccgctggggaaccccccgcttaaaaacgtgccccgccggttgatccccagggatttgaccgcgatcaccaccagcaccaccacggccaggctggcataggtcacgtgtactggcaggttgcgcaccgtagtgatgcccaccagggcgatgttggtgatccgctcgaaaaagatcaggtagcccaccccgatggccaccacagcggtgaccagcaccgccccggccgccacgtccttgaccatttccgccaaggggtggtactccttggtgaccatatccaccaccccttcgatggcggtgttgatcatctcggcaaacaccaccagggcgatggtcagcatcagcagcaccatctgcacccggctgatgcgcagtacgatgcccgcgatcaccgccatgatggccaggataaagtggatgcgcatagagcgctgggtgcgtacacagtacaccagtcccgcgatagcataattaaaatttctaaactgctttttcaggccgtccatgccctaggcctcccgggtcagccccagatcggtcaaaatgacctcttcgcgctggcgcatcagggcccggtcctccaggttcacatggtcgtaccccaaaaggtgcagcatagcgtgcaccgtcagataggccacctcccgggaaagagaatggccgaaatcctcagcctgcaccttggcccgctccaaggagatggcgatatcccccagcatgatctccccggtctccgggtctgtactctcctgcagctcctcggggtccagcccctcgtcgtccgcctccagtccgtcgtactctaaaagtgggaagctgagcacgtcggtggcccggtcgatcccgcggtactcgcggtttaaagcccgcacgccctcgtcatccaacagcaggatgctcacctgaacccggtcggtctccccctggagctgcagcgtacgcgccacagctttgcgcaccagcgcctcggcctcctgcccaaagggcatctgcgccacccggttttccaaatccaccgtcatgtttaagcatcccctttcttttcttcgtcctgtttgccgccggcatcttcctgggccggcacctctactgccgttttctgcccctccgtttcagtctggggcttttcctggggcgccctgcggggcgccgcctcccgcgcgggggccgcctgctgcccggacaggggtggggtacgcggctgttcaagttctgctttggcaggcgcagccacctcgggctttgcgctgcccttcttttccacctgaggataggccacccgctcgtgatagatgccctttaaggcccgcacgaatacctcgcagatggtatctaagtcccgcagggtcaggtcacactcgtccagctgcccgtccatcagcttttcgcgcaccaggcggcggatcatctcctccacctggccctgggtgggcttctccagcgagcgcaccgccgcctccacggtatcggccagcatgatgatgccggcctcccgggtctggggcttggggccggagtagcggaaatcccgctcgtccaccagcgccgggtcggccgcggccttgcaggccgtggcgtagaagtaaccggtcagcgtggtgccgtggtgctgcaaaataatatccccgatggccttgggcagtttaaactgttgggccagcgccaacccgtcgcgggtgtgcgcggtcaggatgctggccgatacctccggggccagcccgtcgtgggggttgactgagcccacctggttctccttaaagaaatagggggccgaaagcttgccgatatcgtggaaaaacgcgcccgtgcgggtgagcatcatatccgccccaacggcgtccgccgcgcgctctgccaggttgcccacgatgatggagtgatgataagtgcccgccgcctccagcaacagccgccgcagcaacggatggttggggttggccagctccaaaagcttagtgggcgtcaccacgtcaaaaaccgtttcccacaccggcagggtacccaggcagagcacggcgcttaagatcccgctgcccaggctccacagcccgccgatcagcacctcttttaggttgctggtggtgatcagccccagggcgataaccaccagggcgttgatcaccccggcgcccaggcccgcaatgatcagcccgctgcgctcgcggatgttgcggcgcaggataaataccccagccataccgctaagcatggccgagatcagaatgcctaaggtggtgatggtcatcagcccattgccgcccgagagcatcatcgccgccataatggaggcgaaaaagttgatgaccagcgccatgcgcgggcccaccagcagcgtaagcaacagcgcgcaggtggagatcggcgccaggcgcggattgatggtgctgatcagcagactgatcagcagcgtaaacaccagcgtcagcccggtcatgatcagcttggggatactggtcagcaccttggtttcaaaggcgcgcaggtactgcatcatcagcagtaccatgacgatgaccagcagcgcaatgcccgcgtacagccacaggtccatcttctggtcggccagcacgcccagggaactcagcgccgcgatctgcacatccgtcaccacatcgccctcgctgacgatcacatcccccttgcgccagacctgggcctccaccgcctgggcggcctgctcccgcgccagctgggtgccctcctcgtcatagatcatgttcgcccgcagggattggttgatgatcaggttgccaagggccatcagggcctcggagaagcggttgtcctcctgctctaaggccgtgcgcagctcctcgcgctccttggccagctgatcctcctggatgccgctgtccaaagcgccacgcatgttgacctccaacagggtctgcaaccgggtcagttcgccggcgctggccgaaagcaccgtataaagctgctcggtgctgagcagccggatcatctcgtcgcttttcagctcggcgataaattcatccgggtaagggaaattttcgccggcaggcacctgcagcttgctgccgtgctcctcctcataggcggcctgcacggccaggcgctcattctctgccttggtgcgcaccgcctcaaaggcggtaaaaaagctgtccaccttttgcagggcctcgtcggtggcggcctcgtccttggtgtacttttcgttgacctgtttgcgcgcggcctctacggcccggtcataccccagcttgtcctccacgtccttagtggcgtaaatggtctcccgggcgatggagccctgcttgaggtcataccgtttgggcgtcatggccatggacaggatcgccgtgaccatcaccaccagcacgcagtagatgatcagccgcatcagcggctggcgtacccgccggaccgagcggccctgggcgccctttctgccgctgtttttcggcggtatttttttgcgtttttccgcacttttcatctgcattccctcctgccgtccgtccgcacaaagtccacatatgccatgggacggacgcgcctgctgcgcgctggcgcaaaagccacggtgcgcgcggtaaaaaagtccaacttaattataccccattttgccgcccggtgtatagtgcaagctgaaaaccgtaaatacgcaggccgcccgcgccctggcaacagggcataaaaaaggcaggggagcttcccctgccctgtcattttacagttcaaacggcctactggcctactccttggaatcctgcggcggcacgccctttttgcggcgcacggccagcacgatcaacaccgccgcgatcaccaccgccgccccggcgcagacaaaaagcagaaccgtgctggtatttgattcccccgtctgaggcatcagcgccgcgtccaatccggctgcataagccggagaagtgagagcggccacgcccgccgctgccgccagtacaccgcttagaatcttgctccacttgctcacaagaatctcctcctcgcgctagtaaaggccggtggttatccagccctaaaccctgtccttattctatcacattttaggctatacagcgcagcaaaattcttaatcttaccttaattttacaactgctagaattaaattagccgccgctcccgccagcgcccggtgcggtagcgtaaaaaggcgatggcaaagcccacggcccagcccgcggggatggcccaccacaccgccgaagcgcccaaaaccgggcttaaggcataggccagcgccacccgcacgcccaggttggccatggtggccagcataaagtaaaagatatcccccgcgccgcgcagcacgcttgcggccaccttcatggcgcccatcgcaatgtagaagaccgagaccacccgcaggtactccacccccgccgcgatcgccgcgccgccgctttgcgcatccaaaaacaggcccaccagcctgtcgccaaacagatagagcgccagcgtaaccggcaggctgatggccgcgatcacgcccatgctgatgcgcagcccggcgcgtacccgctccatctggcccgcgccgatgttctgggccgtaaaggtggataccgcgttgcccatggataccatgggcaggatgcagatcgaatcgatcttgatggcggcggtatacccggcaatcaccgaggagccaaagccgttgaccaccgcctgcaccaaaaacatacccgccgagactacgctttgctgcaccgtagagggcaccgccacccggcacatcttggatagcaagtcccccgaaaagcggggatagggcgcctttgccggaatcgccgctagcctgcggcgcagcacccaaaacgagagcaggcagctgacgccctgggcgatcagcgtggcccaggccgccccggccacgccccagcccagccccgcgacgaaccataagtccagcgcgatattgacaagggagcttaccagcaaaaatataagcgggatgcggctctcccccagcgcgttaaaaaccgaggtgaggatattatataagaacagaaataccgcgcccagaaagtagatgttcaggtaggtctgcgcctggccatagatgtctccgggcgtgcgcatcagctccagcagccccgaacttgacagaaatccaacccccgtcagccccaggctgagggcgcccgtggccagcagcgccgtggagaccgcgcttttcatccgttccatctgcccggcgccgtacagctgggagatgatgaccgagcagccgatgcccgcccccgtggcgatggcgataaacagctgtgtgaccgcataggatgcgcccaccgcggccagcgcctgctcccccacaaagttgcccaccaccatggaatcgatgatattgtaaaactgctggaagatattgcccagcacgatgggcagggcaaataacagcagcgagcgggccggtcgcccggaagtcatgctctctttcatatgcgcttgctttgcatctcctgtatctccaatgctctctgggtcccttccccgttaagttgcccggggccgcggggcgccatcccttttatgatacccaaaacccgtcccatttgtaaaccacacaaaaagggcggggaaccctccccgccctttagccttaaaggctttatctgctctgcttttctggctattctcccgtcccgaaggccgcatccagctgctgcgccggcgtctttttggtaaacaggctgactaccggtaccgccaaaagcgaggcgaacatggccatgcacccgctaaagggcgcctgccccggccccaggataaaggccagtaccagcgatacgcccacccccgcgatcacgcccgcccaggcgcccgcacgggtcgcgcccttccatagcacgccgaacaggtagggccccaggcagcaaccggctaccgtgccccagctaaaggccatcatattgacgatggcgttgtttttgcccagggcgatcaccaccgatatggcgatgaacagcagacagaacgcctgcatcacccgcttggtctgcttatcgctcatcttagggaagaacaccccgcggatcaagtcgatgctgatggtggaggccgaggccagcaccagcgagctgagcgtagacatggaggccgagagcaccagcactacgatcagccccagcaccagctcaggcatggtattcatcagcatctggggcatgatcatgtcgtaattggcggccatcgtcgctgggtcgatgggtacctcagtaaaggccacccggccaaaggcgccggcaaagtaggccgcgcagcccacgatgaccgcaaaggccgtagaaacgatggccccggtcttgatggctttatccgagcggatggcgtagaacttatgtaccatctgcggcaggccccatacgcccaggctggtcagcataaacagccagaagagattgagcggatccggccccaggatggtaacgttttgcggcgcaatagccgccagcttgctgatggcctccgccccgccgccaaagctgtttaacaggcagaaaatcatagctaccacgcccacgatcatgaagatgccctgcacaagatcggtcagcaccgtggcaaagtacccgcccgccagcaggtagaccgccgtcagcaccgccatgccgatcatgcaatactcaaaggggatgttgaaagccccttcaaacaggtaggccagcccctgatagaccgaggcgctgtaaggcgttaaaaagataaagatcaccgcggcggtgacgatcttaagccctttggaaccgtaccgggcggcaaaaagctcgggcatggtgcccacgttcagccgctgggtcatgcgccgggtgccgggccccaggatgcgccaggccaggtaactgccgataaaggcgttgccaataccgatccatgtggccgccaggccaaagttccaccccagcttgcccgcgtagccgataaaaatcaccgcgctaaaatacgccgtgccataggcaaacgccgagagccaggggccgatggagcggccgcccagatggaaatcgtctaaatttttcacctttttggatgcgacaaaagaaactacgactagcagtacaatgtacagcacgagaaatgcgtacttcaactaaaccatccttccattctacttgtacaaaaaacaccccaaagctacaaaatactactgcggccgcgcacacgcagccgcgctacggaatttattatagggaattatcgtccaaatgtaaagcagatttctgcccggcgcgcggcaagggcgcaaataagtaaaagccctccaatgaagaagggcttttgttactgcttgtatttttgctttgcacgcctaaaaacctcagcctagcgcacaggctaaatctggcgcttggagccggcgtacgcgtccgtccggggcagccagtccataaactcggcgatgttctcatcccagcaataccactcgtgcccatagtccttttcaaaatccaccgtcaccttgagccccagggacttgagatggtctgcaaaggccaccgcggcggggaacaaaaagtcctttttgccgcaggccacgtaataatccggcagcgggccgccctcgccggccgcctgctggatgcgtgcaacatccgggctaaactgggcgcgcacctcctgcgggctcatagcggcgtaatccggcaggccgccgccctcgttcatggatttggggatctgcatcagcggcccggagaacgagcctaccgcccggaaccgctccggatggcaaaaagagtgtagcagagagcccatcgaacccatggaaagccccgcgatataggtatcctcccgcctgtcggacaccgggaaattggcctgcacgaactcgggcagctcgtaggcgataaagtcaaactggcggttacccccggggccgggctggttgcggtactcctgattctcgcccgcgggcatcaccacggcgatctgtcgctcctcggcgtaacgctccacattggtatagcgcacccagttggtctcgttattgcccatgccgtgcagcaggtagagcaccggcagcggcgcgggacggctgtggctggcctttccgcccatccccaagctctcaggaatggtgggcgagggaaggatcacatccacatgcacctcgcgccgcaggatataagagataaagttggccttgatcagcgccataaaaaactccccctttaatctattgtattaaggacagtatacacactgtcatccccttttgtaaagcggcccggcataaaggggacgggcccgccgtacaataaagggacagccccgaaggctaacaaggagggaaccttttatggaagataagaccaaaaagatctgcctgatcgccattaccgccgcgctggtaacggcgttggcgcttacgcccatggtggttgggaaaggggtagagcgcggggtggccgctgcggccgagcacttcaggccccagattgagcaacttctaaacgatagcatcagtgacctgaagggccagatcgccgccgagatcgccgcgcgcctggacgataacctgcccaacctgcaggaccccgagacccttaaagccgttaccgaggcgctggcccagtccttcggggagcttacgatctcccgggaggagctgatggaactggtgggccaggtactgcgggaaaaaatgggtctgtagggcccctgcccgcaggtagcaaaacagcagcatccgcccttgattacaccgtgtaaacgtgatatgctatcctcaaaacttaggcagcaaatgattgaagggggatgctattttgacagaacaggcaagaaggcgaagagagcttgtccgcatgatggagcagtataccgaggcgctgatcgaaaaagcgccagacgccctgcccctggccgcgaactgccgggccacgtataacgggcgcgaaatcgccgtaggggataacgaggtttggcacaacaccctggtgatcgcacagcggcagacctttgtggacccggtcagcggagaaatggtctttttcggcgtaatgaccaacgaaaccgtggagcgcaaccaggattttgagatccgcacccatgtttacgccgccagctaccactataccgtgcgcatcaaggtggtcgacgggctgatcaccgagatcgaagagctggcctgtaaccggcggttgcgctactttttcagccagattgaggagatcaaactgccagatctggagtttgagatccccatccccgaggaagagcgcgccacccgggaggagctgatcgccatcatcaacgcctattgggatgcgctggaccgcaaggagggctgggaacagctgcccatccatccggatgcccagcgctatgaaaacggctaccgtaccaccaaccactcccattccttccggggggattttaagcacaacccgcccttccgctggcccacgccggcgagcacccgcagctttcctgtggtagaccccacccggggattggtggtcagcgagtgcatgctggagggtggcggaaacatcgccgacggcggccggggcatgatgatcgtcgaggcctttaagatcaaagacggcgccatctgccacctgatcgcccacttcccgctcctttccggccccactgggtgggaaaaataggggtttccagacaaaaaagcaagcgtttccgcttgcttttcttttttattatgaggatggatataccgtcttcccgcctagccttccttgcgcacaaaccggcgggaggcggctttgccccctccgctctgggccttttcgtacttttcaaaggcgttgacgatgtctttgaccagcttgtggcgcaccacgtccttattggtcaggtacacgaccgaaatgccctcgatatccgccaggatatccgccgcctttttaaggccgctggcgttctcccgcggcaggtcgatctgggtgatgtccccggtgaggatcaccttggatccctcgccaaagcgggtcagcaccatcttgagggtgggcagcgtggcattttgcccctcgtccaggatgaccacactgtcgttgagggtacgcccgcgcatgtaagccagcggcgctacctcaatggtgccgttttccagcaggcggttgaactgctcctgccccagaaagtcaaacagcgcatcgtacagcgggcgcaggtaggggtctaccttgctttgtaggtcccccggcaaaaagcccagcttttcccccgcctccaccgccgggcgggtgaggatgatgcggctgcactccttgcgctttaaggccgccactgccatggcgatggccagataggtcttacccgtaccggcagggccgatgcaaatggtgaccgtatggttcttgatggccttgatataccgcttttggccgatagtgcggcacttgaccggcttgccccggtaagtcacggctaccacgtcgctcatggcctcgatggcgtcgtcggcgttgccgctgcgcaccatgtccatggcctggcccaccatccactcgttaatctgctcgccctttgccagcatctttttaagggtgcgcagggtctctgcggcgatacgtacatcctcgtccgcctcgcccgagacctccaccacgttatcgcgggatttgacggccacgcccagcgccttttcgatggccttgacatattcgtcatatgggccgaaaacgctcatcacctgggccatatcgtcaaattccacctgaagcatctgcaaaaaacccctcctttaggcttgcgcgccctgcacatcgggcacgtatcttgattatagtattccaaatggaaacttgcaagattcatccgcgcccctgcccggcaaaaaaaggcgaatcttcccccgccgccgcccgctcgcccggctttggaacaggatgcataaaaatccagctacttgtgtaaggccactttctacccattattatgttgtcatactgttaagcccgtgtaaaaagtctggcagcaggtccaatgcgggcaggaacggacatgaccgccgcgttttgatctcttttaaacgccaaggcacccttttacccgcaagcgcgctttttgcgcgtataaaacgaaagcgccggggcgaacgaaaaagtagactttttcgttcagtgcataaaaatcaattcagcaccccgacgcggataaaccttttctataatcccatagaatcgaatataaattaccaatttactccttgtttcagtatacatgatagcgaacgaaaaagtctactttttcgcgcggacgtatccgactcagcggggcatatccccatgcgcccggcaggcggaacctaatttgacctagcgcgcgctgtttggcgcctgccccggtgcggcgccaacgcttttcgcttaaataaaaggaagaggcacatgaacgggcaaacgaaccatccacaatctatgggcgcggcgcaggactgcgggctgatcatcctgcgccaaaaggatctgcacatcctttacctaaaccccgccatggcccgggccgcgcccgacgcgcggcccggcctgccctgccgccagatatggccacagcttttcaccccctcgggtgagctggccgcctctctggccatagatgatggggcaaaccggttggaactatgcgcggccccgctcgaatgggcgggagaaccggccctggccattacgctgcgtccgcccgctgctgtggcgcgggaagaaacgcagcgccagctaaagcaggcccagcacctgtaccgggccgccatcgaatcccgcgccgaagtgctgctggagtatgacccggctacggacagctttatcgcccatgccgaaacggctggggaggccatccgcaccgtagtggtgttcgattatgacttgacccgggatcgggccagcttttccgcgcccttctttacccagtttggacgggcaggcgagatagatagggcagcctggcgcatcgggcaaagcgacctgatccaccaggcggaccggcaggtggcgctgcgcatcatcgaaaaatgccgccaagagccggtgggcgtcaaaggcagcctgcgccttaagacccgccaggggcgctacgcctggttcgagctgtacgccaccgccctttgggatgagcaaaagacccggtgcctgaatatcgtgggcaagctgatcaacatcgacgagctgaaaaccgaggccactcagtggcgcgagcaagccaagctggacgcgctgaccgggctttataaccgtgccgcgctacaggagctggccgccggtatgctggcgggcaaaagcaaaaaaccgggcgcattgatctttatcgatatcgacgactttaaggccgttaacgataccctgggccacgccgccggggacgaggtgctgcacactattgcccagcgcatccgccggtgcttccgccaggaggatctgaccgctcgctacggcggggacgagttcgtggtctacctgcaaagcggcctgacccgggaggcgctggagggcaagctgcaccagctgcaggccatcttccatggcgacccgctgctgcggcgctttaacagctcggccagcatgggcgtggcccgcttccctgaggatgcgggcgattttgccgcactgctgcagcgggcggaccgggcgctgtactgcgccaagcagctgggcaaagaccggtacgccttctatgccgattgcgcgcaggccggcctggtgtaaagcagtaaacaactagctataaaatataaaaacaggcgtgcgggaaatcctgctccatggcctagggccccgtacgcctgttttttgcttctatggtttaatattcaattccctgtgccagttgttcattcaccagacgctccagcaccagcggatttccccggccggcggtttcgcgcatggccgcgcccatcagggccttggccgcatttagtttgcccttgcggtattggtccaccgcctgggggttttgcgccagggccttgtgtacggcagccagcagaatctcagggtcgttcacctgcgctaagccctcctgctccacgatggccttggggtcctcgtccgcctcccacatccggccgatcaggcgcttggccgtgccggagttgatataggcgtcggccaccatctgtgcgaccgcccccagatgctccggcgcgatggggatgcgcgtcccctctccctcgcccatcaggcggaaaacctcggagatgatgaggttacccagggtctcggggctgcgggtatagccggcggcctgctcaaaatagtcggcaatctcctttttctcggtcagccgctcgcttaagatggggctaagccccaggcgggatacgtaatccgccttgcgcgcgtccggcagcttggggatctgcgcccccagcgcgtcgatatgggcgcgcgtaagcacaatgggggccaggtcggggtcagggaagtagcggtaatcgtccgcatcctccttgcggcgcatggaataggtcttgccgctttgctgatcgtaacgccgggtctcctgggcgatggcctcgccgctctccaacgcctccacctggcggcggtattcgtaggtaatcgcccgctcgatggactgaaaggagttgaggtttttcatctcggtacgggtgccaaagggggcgccgggtttgtgtacggataggttcacgtcgcaccgcagcgagccctcgttcatcttacaatccgatatgccggtgtacagcatgatggcccgcagcttttgcacgtatgccaccgcctctttggcgctgcggatgtccggctcggatacgatctcgatcagcggcacgccgcagcggttgcagtcgatcagggtgcccaactgctcatcgtgcaccagcttgcccgcgtcctcctcaatgtggatgcgggtgatgcccacccgcttttccccctcctgggtctggatggtcagatacccatgctcgcaaagcggcaggtcgtactgggagatctggtaggccttgggcaggtccggataaaagtaattcttccggtcctgcttggaaaagccggcgatggcgcaatgggtggccagcccggccttgacggcaaaatccaccacctggcggtttaaaaccggcagcgtcccgggcattcccaggcagaccgggcagacctgggtgttgggttcggccccaaaatcggtcgggcaggcgcaaaagatcttggtcttggtcttcagctccacatgcacctccaggcccaccaccatttcataacctttaagcatgcttttccgcctcctttgcatcatcctgttcaaacgcgtatcccagctggtagagctttttctcgctaaagggcgggccgatcagctgcatgccgatgggaagattctcttgatccctgccgcagggcaggctaagcgcgggcaagcccgcaatgttcactggcacggtgtaaatatcccccaggtacatcgccatggggtcggccatcttctcgcccaggcggtaagccgtggtgggcgctaccgggctaagtagcgcgtcataatccttaaacagggcctcaaactcccgcaccaccagggtgcgcacctgcagggccttgttatagtacgcatcgtaatacccggcgctcagcgcgaaggtgcccagcatgatgcgccgcttgacctcggggccaaagccctcgctgcgggtgcgctcgtacaactcatccatatccgcgtagtccctagcgcggtagccgtagcgcaccccgtcaaaccgggccaggttggaggaggcctcggcactggagatcacgtaataggcgggcagggcgtgctttaaggtgggcagggataccggctcgacccgggcgcccagcttttcatagcgcctggccgccgcaagcaccgccgctttgacctgcgggtcgatcccctcctccaagaactcccggggcagccccaggcgcatgccggccacatcttccccgagctgtgcgccaaaatccccgtaagtccgctttagcgaggtggaatccctgggatcgtgcccggcgatagccgaaagcaccagcgcgctgtcccgcacatccctcgttagtgggccgatctgatccagcgaggaggcaaaggccaccagcccatagcgggaaaccgcaccgtaggtgggcttcatccccaccacgccgcaaaaggccgcgggctggcggatggacccgccggtatccgagcccagggcaaaggccgcctccccggcccccaccgccgcggccgagccgcccgagctgccacccggcacccgggttgggtctaccgggttgcgcgtggggtgataataggagttctcggtagaggagcccatggcaaattcgtccatattggccttgcccagcagcacgcacccggcctgctccagccgctgcgccgccgtagccgtatagggcgggcggaagttttgcagcattttagagccgcaggtggtcttgatccccttggtacaaaggttatcttttaaagccatgggcaccccggccaagggatgcagctgctccctcgccgcgcggcgcgcgtccacctgcgcggcctgggccagggcgacctcccgcgtcacatggatataggcgcccagctgcgcctcacacttttctatttgctgtaaataggcctcggccgcctcctgggcgctgacctggcccgccgccaattcttgcgcaagcgccgcggcgctccaatcgatgatccgttccactttcatccctcctattccaccacgcggggtactgcgatgtagccctcggcccgggtgggcgcgttacggagcagcgcatcccggtccatctgctcgccggccacatcctcgcggaacacgttttgcagcggcaccacgtgggccgtggggggcacgcccgcggtatccagggccgccaagctgtccgcaaaggcgatcacgtcctgcagatcctttttaatggccgccttctcctgctcctcaaagcgcaggcaggccagctttgccaccttatccacctgcagcggcgggcgcttgggcgcattgccgccctgctggggcgcctcctcacccgcaagggctatgcccagcacctccagctgctctgcgtccacccggccgggggcctgggtcagcgggcaggtagcatccttggtcttggggaaggcgatgacctcccgcagggaagaggcgccgcacagcagcatcaccaaccggtccaggccaaaggcaaatccgccgtggggcggggtgccgtagccaaaggcatgtaccataaagccaaagcgctgctcgatctgctcctcggtaaagcccagggccgcaaacatcttttgctgcacgtcctcccggtggatacggatggacccgctacccagctcgataccgttgagcaccacgtcgtacgcctgggcgcgcacccggccggggtcgcttgtgaggtagggaatatcctcaggatagggcatggtaaaggggtggtgcatggcgataaagcggccctcggcctcggaatattcgaactgggggaaatcggtcacaaaggcgaattgaaactctccctcgcccctgaggcccatcttttccgccacgtccagccgcaggccgcccaggcagcggcgcacggtggagagctgatcggcacaaaagaggataaagtccccgttttgcgcccccgtccgctccaggataccctgcatctcgccttgggtaaaatacttggtcaggatggagttgatctccccatcctcccggagcaatatccaggccataccccccgccccgtagcgcagggcccgcgccgtcagctcctcaatatcgctgcgggtgagcgccgccccgcccggcacgcggatagcccgcaccacgcccccgcggtcgcacacccggcgaaaaacggtaaagctgcagcccgcggcaatgtccgtcaggtccacaatgggcaggtcaaagcgcagatccggcttgtcgctgccgtaggtatccatggcctcgagccaggtcagccgcctgaaggggcgatcaagcggcctttccatacaatgctcaaagatgtggcgaaacagcttttccaggtgatccagaatatcctcctggtcgacaaagctcatctccatatccacctgggtaaactccggctgccggtcggcccgcaggtcctcgtcccggaagcagcgggccacctggtaatagcggtccaccccggctaccatcagcagctgcttaaagatctgcggggattggggcagggcgtaaaagctgcccggatggacccggctgggcaccaaataatcccgcgccccctcgggggtagatttggtgagcatcggggtctcgatacacagaaagcccgcctcatccaaaaattgctctgcacacttttgtacccggtggcgcatcttcaggttttgcagcatttgggggcgccgcaggtccaggtagcggtattgcaggcgcttttcctcccgcaccttatccccctcctccagcgaaaagggcagcggccgggcctgggagagcagctctacatggtcggcccgcagctcgatggtgccggtgatcagcttatcgttataggtctcctcatcccgcttacagatggggccggaggcggcgatcacgctttgcaggcgcagcccttcggctagggcaaattcctgcgccggcaggttttgcaggttgaacaccacctgcaaggttccctcccggtccttcaggtcgataaagatcaccccgcccatatcccgcttattgagcacccagcccattaccgtctggcgcgtgcccatctgcgcttcccgcagtgcgccgcagtagcttgtgcgcttcatatccatcctccttgctctgtctgatgctaaataaagtaacaaaaaaaaagcctttcatccctcaacgggacgaaagacttcacatcttacgcggtaccacccaattttgcggaggctacgcctccaacctcttttaaggcaactgtcccattccatataaaaaacaggctccattgcccccggctatcacgcgccggccgcggcctgccctacttggggatgctccccttttggccaggcggctctgggctgttcttcctccggcgccccgtgccacgcttacaccaaacgcgccgctctcttaccggggcgaacccgggctacttttgcccttcatcgcttttcaactttcgccgctatgcggctatggacttttcttaaatgggattatagccgtacggcaaccatttgtcaatcccagtttgtgccgagccatccgagattatgcaggatctttgcagaaaaatgcagctttccccttgcccgcgccgccaaaaccgtgatataatccgtttataaaagcaaaggcgcttttgggcaaactgtccaatagcgtctttttttatttttagacaagctgtatttctatgtattggctccgcactcgtgcagggcctatttgggcttcctattggcggagatttcggcgcacatgctgctcgattcccataaaaagccttctgtctgggatatgtactgtccacgccgcaagatcagtataaatatactataaaaagaatatttatttttccagcaaccaagtgcgcgccgccccggccaggtagagcgagccggcaaccaccgccgcgccccccagctcccgtgcacggttaactgcataggccaccgccgcgagggcgtcccgctccacggtgatgggtttatccgcaaaatacggggccagctcctgcgcagacagcgcccggtccgtccccggcgggtcggtcagcacggcctcggcggcaaaggcgctaagctcttccatcacgcccgcggcatccttgcccttgagcgccccacagcacagcaccaccggcatgcctttgggcagataggaggccagtccctgccgcagggcctgggcgccctgggggttgtgcgccccatcgatcagggtcagcggagcctgccccaccacctcaaagcggccgggccaggcggcctgagccagcccctcgcggatatcctgctcggtgatatgccagcccatcttttgcagttccagcaaaaccgccgcggccaccgccgcattataggcctggtagcggcccagcatgcggatatgaaggcctaagagttcttccccgccggggccgcgcaggtcaaagcgcacgccagagaggctctcttgatggatggcgatctgccagtttgccaggtcgataagcagcgcgcccttctccctggccgccttgcgcaccactgcgcgcaccgcctccccctgggggtagagcaccaccggcacgccgggcttgatgatgcccgccttttccgcggcgatctgctccagcgtatcccccagcacccgggtatggtccaggccgatggcggcgatggccgtaatggcgggctgcaccacgttggtggaatccaaccggccgcccaggcccacctcgaccaccgcggcgtctatccgctctttggcaaagcccaaaaagcccatggcggtaatgacctcgaacatggccgggtggataaagcccctttgcagccgggcatccaccgccgccttgacctgggtggcccaggatgcgatctgctcatccgctgcattttctccgcggatgcggatgcgctcgttaaagcgctgcaggtagggggaggtgtaaagcccggtttgatagcccgcccggcgcagcaccgtatccacatagcagcatacgctgcccttgccgttggtgcccgccacgtggatcaccggatatcccagctgcggctgtcccaggtcatagagcagcccctcgatatttttcaacccatccttattgcccacaaaccgctggcacccgtcaatataagccatcgcctgcacataatccatagccgcactccctttgcctttttctgatgcgtatctccattgtaagcccatcgcccgcccatgaaaaggggattctccgcccaagttgcgaagaatcccctttattttgggttcgtcccgtctttagcgcatttcctgcagggaggcgatgcgctcgtccaggcgctccagcttatcctgattcagcgccagcttttcccgctcttcggcgacgatcttctccggcgccttattgacaaagccggggttgtttaacttcccctcggcccgggccacttctttttccaggccctggcgctctttatccaggcgcgcaagctccttatccacatccaccagctcccctaaggggatgaacacctcgcctgcggcgcacaccgcggagaccgatttgtccggcacctgccccttatcggcgataaagttgaccgcagaggcgtaagccaggcgggtgatgtacacttcggcggctcgaagcgcatcgccccaatccccctggggcagcaccgtcaggctggtgcgcttgcccatggacacgttcatctcgcttcgcaggttgcgtacggcgcggatcagctccatcacgccttccatcctggccgcctcctcggggaaggagagcgcctcgtccacctctggccaatcgcttaccataatgctgccttccacgcccggcaggtgctggtagatctcctcagtcaggaagggcataaacgggtgcagcaatttgagcataccctttaacacgtgcagcagcacacccagcacgcccgcatccccgttttgcagccggggtttgcaaagctcgatgtaccagtcgcagaactcgctccagataaagtcgtagatcttggcggcggcaagccccaggtcgaacttctctaagaaatccgtcacttcctgcacggccaggttgtaccgggtgaggatccactggtccgccgcgtccagctgcgatacgtcgatctcggggatctccttcccctcggcgttcatcatcacaaagcgggcggcgttccagatcttattggcaaagttccggctggattccaccttttcccagtaaaagcgcatgtcgttcccggcggagttgccggtggccaagctaaagcgcagcgcgtcggcgccgtacttatccaccacctccagcgggtcgatgccgttgcccagggatttactcatcttgcggccctggctgtcgcgcacgatgccgtgcatgatcacgtggtggaagggcgccttgccggtctgctccagtgccgagaagatcatccgcgccacccagaagaagatgatgtcgtaccccgtgaccaggatatccgtgggatagaagtacttaaagtcctcggtctcctccggccagcccagggtagagaacggccacagcgccgagctaaaccaggtgtccagcacgtcctcatcctgctttaagttgtggctggcgcacttggggcagctttccggcgtctcgcgggcgacgatgatctccccgcaatcctggcaataccaggccgggatgcggtggccccaccacagctggcgggagatgcaccagtcccttatattctccatccagtttaggtaggtgcgctcgaaccgctcgggcacgaactgtacgtccttattcttggccgcggcgatcgccgggccggccagcggctccatcttgacgaaccactgctccgaggcgatgggttctaccaccgttttgcagcgctcgcaatggcccacgttgtgggtatagtcctcgatcttgaccatgtagccggcagactgcagatcctctaccagctttttgcggcactccatccggtctaacccggcataggcgccggccttctcgttcatggtgccattgtcggcgattacgcgcagcacctctaaatcgtgccgcatggccacctcaaagtcgttggggtcgtgggcgggggtgatcttcaccgcgccggtaccaaagtccttttccacgtattcatcggcgatcacggggatctgccggttgcaaaggggcagctccaccatcttgccgatcaggtccgcatagcgctcgtcctccggatgcacggccacggccatatcgcctaaaatggtctcgggccgggtggtcgccaccacgatctcgcccttgccgtccacgcgggggtagcggatatgccacaggtggctggcctgctcctcgtactccacctctacatcgctcagcgaggtctcacagtgggggcaccagttaatgatgcggttgccccggtagatcaggcccttttcgtacaggcggttaaacacctccaccacggccttgttgcagccctcgtccatggtaaagcgttcccgctgccaatcgcaggaggagcccaggcgctttaactgctccacgatgcgcccgccgtaggtgcgcttccactcccaggcgcgctctaaaaacttttcgcggcccaggtcgcgcttattcagcccctcgccgcgcagctgctccaccaccttcatctcggtggagatgctggcatggtccgtgcccggaagccagagggcggcatagccctgcatgcgcttaaagcggatcagcgcgtcctgcatcatattgtctagggcgtgacccatgtgcagctgccccgtcacgttcgggggcgggatgacgatggtaaagggctttttatccgggtcccgctgggcgtggaagtagcccttgtccatccactctttgtacagccggctctcaaccgactgggggtcgtacaccttatccatgggtgcgctcgccataaaaaacatcctcctttaaaaatcagaaagctaaaatcgcgtacattgtgtatttatatttttaagcgcccgttaaccgcgctgatgggcctatctttacccgaggcccggggattagccgtcattcagagcgaaggccacaggccgcagcgaggaatctcctgcattgcctctcgcccgcgcttgacttgcgcggttcgggtacgcacttgacataagtcttttttcctaaaacccagcgcgcaggtcgccgtgagattcttcgctccagctgcgcttccgctctgaatgacagggagcagactccccgccttgacccgctctacccctcgctgcgcagcttatctttacccggccaaggcttgcctccctcttcccgtcattccgtccttccgagctacgggcgaggaatcgcctacattgcccctaggcaggccctttgaatcatccctctaaaacaccatgcctagcagcacgcttgccagcaccagcgccagcgcggccagcttggtgtagagcacgtactgcgtcagcttctcgccctcataacccttcctctcccaaaaggacttggccccaaaggccaaaacgatgcccagcaccagcaatataagcgccgggtagccgatctcctccagacgctccaacagataattcatgccttcctccatcaaaaaagccgtcctccgccctttgaactcaggacggaaaacggcgttttccgcggtaccacctcagattggcgcaatgtgatgcgccctccttgaaagcgacgataacggcgtcaccggcccggcgctactgctctttcacgcgggcgccttgcgggcgacccgggcgcaaactgccaccccgtagagccctttcagcctgggggcccctctcttttttaccctgggatgcgcagcccatgccctcctcccggtcatcggctttcaaataatattaccgatttcgcccttatttgtcaacctcccggtcgttcatcggggcggaaatcttgatcttaccgtgcttgggctgccagccaaacaggttcagcgccgcgtactgcaccagcgccagcacctggaaggctacgccgatgtacaaaacgatgctgcccgtcggccgcacccacgggtccagaaacagcagcacgatggccgcaaaggtgcaggccgtggcgatcttccccacccagttggcatatacaacctttttacgcttgccaaagataaaggaggccccggcgatcatcgccagctctttaaccgcgatgattacgatcacggccgttggcaccagatgaaccgaccacaggcaaaaaatggcggtaagtaccatcaacttgtcggccagcgggtccatcagcttgccaaagttggagatcatattatatttgcgggcgatatagccatctaaaagatcggtaatgccagccagcacaaagacgatgcacgcccatatccactcgttggaatgaaacagccagtaaaatacgcctaccatcaaaaggcgtatcacggtcaaaatattgggtatcgtcatagggctttcggcacatcctttgctaacaatcgtccttaggggcctaacgaaccccagtttatccaaaatacgccttattatagcacatttgcggcttttcgcctagaggggccgggccgcttccccgaaaatgttaatccccccctggttcaattcatccagcgtctggccaaacccctggccgaacagctgcaaaaagcgttccacctccggcagccccatcgcctctatatcctttagggtaaccgctttggccgatcggaattcatcgttgccgctgcgctcttcctccacgcactttaaataggcgcacagcttatccgccgccttgaccagcgcgtgcgcctccccctcccggggctggagcagcagcggctggtaatctgcgcgcagcggttcgggtagcatgtccagcaatctatggcaggccacgtcctctatggcatggtatgctttgcggatctccgggttaaagtacttgatgggcgtgggcatatccccggtgatcacctccccggcctcgtggtaaacggccagtgccatcacgtgctccgggtcggtctggccgtcaaactcccggttgcggatcaccgccagcgcgtgggccaccatggccacctgcaacgaatgctgggcgatgtcctcctcccgggtgttgcgcatcaaaccccaacggcggatcagcttcatccgggacatatatgcaaaaaagggactggttttctgtctcatcttattcctccatatgcgtctgcggccctcaaaagccgggcgcgtacttgacaaagcagcgcccgtttccctatgatacggggagcggggccgcccaacaagccccctgaaaggagctgtgcgtttaatggacctatcccaaatattctccggctttggccttgttaagcccgaggtatggatgacgcttattgccctggtggcgctggcctttttgctggccctgggccgcaataggtggaacgcccgcatgttgacctatgccgccatctgcatcgccctggggttcatcctaagctatatccgcttttaccgcatgccccagggcggctcggtcaccccgggcagcatgctgccggtcatggtgttcagctacatcttcggcgggctgccgggcatactggccggcacggcctacggcctgttgcagttgtttcaggatttttacgtcactcatcccatggggctgtttctggactatattctggcctttgcctgtctggggctggccggtttcttccgcaaaaacctggccttgggtatgctcgtcgcagggttggggcggtttgcctgccattttctggccggggtgttcttttttggcgcctacgcgcccgagggggccaatgtggccctgtattcgctgggctataatgcctccgtggtggggccggacctggctatctgcctgatattagcgctgctgccgcccacccgccgcctgatcgagcggctgaggctgcaggccaacgcagggcgccggatatagattatcctacaataaaaccgcataatttgcaaaaggcccagctggagcggcgcttcacctgggccttttgctatcgtttacattattttccagcaaactacgaaaactcctcaatgttttatccaccgctgcattacaattatggggcatacttaatggtaacaaatattttggaggatgagaaatgcgaccaatttttgtgacccaaaagagcctcgcggcctttaggcgttatctggtggaaagcgaaaaatcgcgcgcgacggtggaaaagtatctgcacgaggtgcgggcgctggggcatttcctggccggcaaagcgctgagcaaggctgctatcctggcttatcgagagcaattacagggtatttttaaaagcagcaccatcaacgccaagctctccgccatcaacagctatctggaatttatgcagctgcccctttgcaaggtgcgcctgctcaagatccagcgcagcgcctttattgaggaaaagcgcgagctgaccgccgctcagtaccacaggctgctctccgccgccaggtccagcggcaaggagcggctttaccacctgatgctgaccatcggcagcacgggtatccgggtgggagagctgtgctacatcacggtggaggccgcccaaagcggcagcgtggagctctacctcaagggcaagtgccgcaccattttgctgccccaggagctgtgcaaaaagctgctggcctatgcccgtaaacgcgggcttgagggggggcctatcttttgcaccaaaagcggaaagccgctggaccggagcaatatctgccatgagatgaaaagactgtgcgcgctggcccgcgtcatccccagcaaggtgtatccccacaacctgcggcacctgtttgcccgcagcttttacgccatcgagcacaacctgtgtcatctggcggatattctgggccactcgtccattgagaccacccgcatctatgtggctgccagcacccggcagcacgagcgcacactgcgcaagatgaagctggttatttagggaaaaataaaaaaaccacagaataaacattctgtggtacgcgtgtatagggttttgctgcacagagtacacattggacgtttttagtatagcgccacctcccgtaaaaatcaaccgacgccgctggaattcgacaagtttcgccgcgggttccagcgcaaataagcctgaagttccacatatttacaggctgtttttttcatgctttttactggaaaaatattccataatgcctcaataattcagtctttctaaactttccccgacccgaaggcaccacagaatgtttattctgtggttttgcaaagcagcccattgcccaacgcgcgtgtatgcaacacaaaccgctgcgcaggaggcggcaagcgcgatgaagggggcaaagacagagcatgaaccaaccgattacgttgctggaatacctatcttataaaatgcagtgcgattatctgtcggacctgcggtgtaaacctcagcgacaggataagctgtatgccctgctggcggataccgcgctggaggatttctccgccgaccagtggctggacgcctgccaataccttacgcaaaagcgcgcggccaacccgcggcaggccagagcctacctcctggcccgctttaagggcggggcgcagcctgtcccgggagccggagagggcgagagccatcgcgccctctaggggccggcgccggcggcacagcggaaatataaacgccgcggaataaaaaaagcggcatggcttaaagccatgccgcttttgctttgctcttttgtctattccaggataaaggccgggtccttggccgggcgggcatccagctccgcctttttctcttcaaaacccgggcggcccaaaagcgcataggtggcaaccttgccctcctcaacgccgggctggttaaaggtatcgatacccagcagcgcgcccacgaaggagacctgcatctcaaagaaatacagtagttcgccgatggtaaaggcgttgacctcgggcaaggtgaccttgcagctgaggcgcttggccttataaagggcgtactcggtggcgttcatctcggcctccagcagctcggccatggtgtgcccgcccaggaaaccgacggccgggatatcctcatggccgtgggggatcgtcacatcgcagcggaacttctccaccgccaggaaggtgaccaccttgtcaaagggcccctcggtatacagctgcacctgagagtgctgatcggtcacgcccagggccttgaccggcgtctgcccggtgaacacctcggtcttgccgtccagggcgtactgcttgcccagggactcggcccacagctgggcgtaccagtccgccatgtagcgcaggctgtcggcatagggcatcataacggtaatgttcatgcccttttgcatggcgatgtattgcagcaggccgcccaggcaggcggggttttgcataatatcggtattgctggcgatcttatccatcgccgccgcgccggctaacatctcgcggatatcgataccggcaaccgccgcggccagcaggcccaccgggcacatctcgctaaagcggccgcccacccccgcggggatgacaaaggccttaaagccctcctgcgcggcgatcttgaccagatagccgttttcagcatccgtggtggccacgatatggccggcataatcctcccccagcgcgccctttaagatctcgcggaaaatcagatactggctcatggtctccgaggtggagccggacttggtgatgacgttgaacaccgtctttttggggtcgataatatccaaaatgccgctgatgcgctccgggtcgatattatccagcacgtacacgcgcgggccgccccgcttttcggcgggcagctcgttataatttaaatggttgagggcctgctgcacggcgatggggcccagcgccgaaccgccgatgcccagcaccacaaaggtatcgcacttttcgcggatggcctttgcctcctgcaggatatccgccaccaccgcatcctggttgtagggcagctcactccactccatggtgcccttgccccggttctgggcgatgaactggaaagcctcggccgccttatcctttaacgccgcgatctcctgaggggtaatggccgccgcggccttggagtagccggccagcatattgttataatccaccttcagccgcatcgccttttgccaattcgcatcctcgtagcgcatgaacatacatcctctctctacttagaaatatcaattttacaattctttttcaaatgaatattatagacgaaaaaccgcaggtttcaaagtgcaaaatccatttcgcaatataattttacgattttactacataattttactatcttcttaaggctatggcactataggccgcgcatatagtagaaaagactgtgatacggaaggggtatagatatgcatctgccaaatcgtaagatcctgatcgtcggttcggccgcgctgtgtgcagcggtgatcctcctgtgccttggggttgcctggctttcgccgctgggcggcttaaacgcccccgaggcccagacgcaggccacgctgcgcatccgcgtgcaggacgggcacaccggcgccgacctgccgggcgccgaggtggtgatcgccgagaccggggagcactaccataccgacgagcagggatacacccccgacatacccgtccccatcctccgggatacccgttacgaccagctgcacccccaggagtggggcgaaatcagcgtgctggcctactgcgaagggtatgaggactacgccctattccacctgcaggtagaacccggccaggcccgcacagacccggtggtaatgatgtttgagcgcgaccagctttacagccagccctttgcactagtggaaggccccaaggccgaatgggtgcaggagcttttggaccggttccgcccccgctaatccccggggcagaagatctcccgcatgcgctgtacgctgcggcccagttgggcataatcctgataattgctggcgtacacctccaccagcagcgggcccttgtagcccgccccgtccagcgcggccttgaggcagccaaaatcaaacccgccctccccgggcaggcgcagcgcgccgtcgctctcaaaatcgcacaggtgcacgttgttcagccttttacccatggctgggataaactgaagcgggtcgcaccccgcctgcatggcctgtttgatatccagggtaaacttgaggccggggtggtcgcatacctccaggatgcgcgcggcaaactccggccggcagaactggcaccagtgcacgttctcccaggctacggccatgccgtatcccgcggctacatcacacagctcgccgatgcgctcccccaaaaagggataattatagtggatcaccggcgtgcgcttaaggttggccgggccgtggaacacgtaattttccgcgcccagccgttggccaatggccagcacgcggcggaagaaccccagcgcgtccgcccgctggcggggcacgcgggcaaacagttgcggctcaaactgggtcgagagcgtgtgcacattatgcacccgcagcccccaatggcgcacccggcggtacagttcctctccaaattcttttgtatattcgctgtaagtggataaaaatatctcgcaatccctgatccccaggcggccgatctcctctacggcctgctcgttatagatcagcgggtaaaagctggcggtggatagcccgacctgcatgaaaatgcccccctttatctctgctacaagtatagcagagcgcgggccgctttgcaaaggcgcaagggggacgaatgcccatggaaaaagatgggaatttattagaatctctccacgccttcttggttccgcagatcctccggtcctacagggcgagcaccgctcccctgccaacgcatgagattcttcgctcggccttgcggcctccctctgaatgactgggctgcgtattcaagtagacttttctgctcatccgtagagatactgcgccattgtcattccgagcgtaagcgaggaatctccttacgtcctgttggccttgtctgcaccgccccgcccaggttgatcgccgctttcctgcccatgcatgagatccttcgctcggccttacggtctccctctgaatgacaacgtagcgagtactaaagtatacctttccactcatcaacagtatgctgcacatgtcattccgagccactggcgaggaatctcttgacgccttcttggctgcgcacgtcctccagtcctacagatcaagcgctgctactgtgccgacgcattagattcttcgctccggcttcacctgcgctctgaatgacaattaaacgaacgttaaggtatacttttccacccacccgacaccatacaatcccgtcattccgagccttaggcgagggatctcatgataaccaatagggtgggctcgcttaaaatgggatgtaaaagcgtgcctcccttcatcaagggaggcagaaaaaacatccgggcataaacgcatgaatggatatttttcagcgcagcggcacctgcaggcgcctggcgcgtcggcggtactgcgcccactgcagcaccaggctgagcgcaccggcagtggccacagccaccatttgggcgctgaaggcgtccccaatggctaccgataccccgcccgcgcccgcaaatatgccatagacgatctggctgaccggcgggccgatcaacgcgcagctcaccgacccgatgggggtcagccccagtccgaaggcgaatacgccctcgatcagccccagcatccagaaagaggggtagaaccactggtccaaaagctcggcaaagcccacccgcaaaagcgtgcccagcatgatggcaaacaccggccccaacaggccccgcacgccctgtttgcagatcagcgccgcgccaaagcctagcaccagcgcaagggctatggggttgaaccacagcaggttccccaggttcactccccgcgcaaagccagagagcgccagggccgccagcgcggccagcagccatatctttttgacgtgcagccgcgcatcccagtccggcagcgcgtcaaaagcgaaaaggattatcagcaccacaacgattgtatagcctaccggcatcgtatcacctcggcgctagtatgcccgcctgtgcccgccgccatgcgttgggctgtaaaccctttcttcatatcgctatggtttggctgtaccgcattctcttcgcgactatatgaagcgaaccaagccgtacatcccttacagcatgattgaactttgcgaggtaaaacccgcgcggggtatcgtaccccgcacgggtttaccatactaatctgccaccttcacccaacgcccgctctcagaggatttttttaccgcctcgcaaacccgctccacagcatagcccgcggtaaagctcgtagatggctgtttgccctgggcgattgctttcatgaactcatacatttcaatcgccttgagctcgccatagccaatattcatgccgggaatattccaggttgcctcgccatggaaatgcgccgggcctgtaaaaatcgtcttaaaccctcttctatcatccggatcgtttgcaaaacatacctgcagttcgttaagcctctcataattaaagtaaaggctaccctgcgttccatgaatctctaccgtgataaagttattgcgcccccaggcgtttctggtcgcctcaatgctgcccaccgcgccatttttatattttaccaggaagctatcctcatcatccacatctaccgggctttttttcgcatccgcgcccagcttgacagtgcccagcaggtccgccccgccctcctgcaccggcctttcggcaatataagttttcatcatgcccgtaacttcgtcaatatcgcccgcaagatactgcgcaatatcaatcacgtgggaggcaatatcgccaagcgttcccgcgccggcaatatctttctgaaatctccaggaaaggggcgaagccgggtccgccgaccagctctgcagataagtgcacctgacattgagaatcttcccaatagagccctcatcaataaactttttggcaagatcaatcgccggtacgcgtctatactgatatgcgttcatgctgataatacccttggaagccgcctgctcagctgcttctaccatcgcttttgcatcctccagggtagaggcaatcggtttttcgcaaagaacatgtttacccgcatttaaagccgcaacggcgatttccgcatgcgagttattgggcgtgcagatacttaccacgtcaatttccggatcgttgacaatatcctcccagttcgtgcagtatttctcaaagccaaaccggtcttttgcatccgccgcaatctcaggcacaatgtcgcaaatcgtttttaacaccggtacagccggagccggccagaaaagcattggcatcatggacaaaccgaccgaatgtgcttttcccataaatccggcgcctactaagcctacgtttaatttcttcatattttttacccccatcattcttttgtgaaattgctttgctaaagtcaatcatatccagttaactgaaccctgactgaccgttttcaacgccgttttaaaccagtttgccttttagaaaatcgtaagatgttttgcaggcctgcacggggtcgcccgcgtatccatcaacctcaaccagataatcgcctgcgtaccctttctccttcaggaagttgagcacgccgtcaatatccacgctgcctgcacccagaggcgcaaaaccatttttgtccagatccttgagatgaacaaaggagattctgtcataatactttttcaccatttccaacgggtcgctgccgcccgccgccaagtgtgccagatccggacaaattttaatatcgcttacagaaaagagcctatcaatctgctccggtttttccgccatggacccaagatgaggatgataactggcctggattccatgtgccgcaaaaatcgtttccgcttccttcagtccctccgccagaagtttataatcgccatcctgaattccttttccgcgaattgcgccgccgcaaaaagctacataggaaacgccgactttttcagccagtgctgcaaccgtcttcatatgatacatttcatcttccaacgcatccttataaataaagtttgcccccacgcatacgctcatcatttcggcatggtatcgctcaagcatatctttgagcacctgaatatccgatccataccgggtcagattgccttccagcacttcaatctgcctaaagcccacgtcggtaatctttttcaaaaccgcctcatcgtcacaaagggtcaaatatcggatgtcttttacgctggtaaccccacctccgtctcctactaaaggcccgaacgcatttgtcatgtaccctaatctcatggcttttcccctccttgtttttatatatttgcgcaaattttatctatttcaattttactccgctttacaaaccttgtcaatcacccaaaacacctttctttatcctcggggcaaattttatatcgcaacgcgcggcatatatttgcgcaaatttatacccccggcagatattgccgatcctccccctccatcaagatgcaagccctgcgagcagatgccccacgaccatttccgcgtgcaggcagcaaaaagccccgccgaagcggggccgtaattcttgccgggtctgccttgtactgcaaaagcggcaaccgttgctggctattttgtttttaccgttcgcgcgctgtctgtttaggctgtatgtgatttgggttttgctttaccgcgttgcacaaatccgccggcggctcttctttaaatatgcttctccagtttttcagcagattgtcctgcgtcacgccaatgggctccaccccaataaaggaaggcacttttttccctaaaaggccgttcgccgccgccagggcgatcgcctccccctgttcatacgggcactgcgcactgagcatcttcaccatcccgccctttgccatattcatagcgatggcataatctaaatctccggtaacgatgacgatgtccgtacgctccatttccaccaatgcctttacaacctcaagcgccgggccgtcccaggatacatataaagcctgaacttccggataaaatttaacaaaatccagcgccttcttataggcttctgtttccgttaaaaaattcacctttccgcacacgtgaatttcaggatattcctcaaccaaaacctgctctgccgcgccgtctctttgcttagtcgcaaaaaaattctgttctccatggcagatcaggcctacatttttcaacccgtgtctcatcatgtattcgcccagcccatgccccatgctgttgccatgagagtgttcgttgaccgaaatacatgaaatatagtcctttcgggtgaatccatccgggatattggtgatcagaaccagttttgtatcgctatccgcaatctcccggaaagcctgcgccgtatccttcacatccacaggtatggaaatcagaatatccggcttcaggaacgcaatgctttccagttgcttgcattgcagttccgcatcaaaatgcgcatccgtaacggcgataaccgatatgcccagttcatcaaatatctttttgatgcctttttcctgcaaacgcatccaggccttgcccgtatagtggaaggaaatagcggccgtataatttttctgacgaattctttgtttttcatcatcagataaagccaaagtattggcgctttccgccctttccccaaaggggcctcttccaatgccgcaggtagaatctcttacatttaaaagggagggcagcgtttctttacggtatacgccggacaaggctccgtttacgctcttgccgccagctaatctcttcaaaagaatatcgaccgccgcacaagcaaatttttcgggttgtttgtccacgcaagtcagttccggcgtcatcaatacagcccactcaaggtcgtttaaactcaccacggatatatctcttggaaccacaatatggtgtgcgtccaaatacttaaataccggaaccagcggcagcgaatcggcaatgaccaatgcggtaggcttgggttctgacagcatggcttttttcatggattcaaagacgtcctcttcggttttaagatttgaaaagatcaaatcatcgtccatggttattttcgaatcttccaacgctcgcctgtacccctcaaatctacgcgtgttgcgatcgcctgactcgcacaaaaacgcaaccttttcatgcccgttctgagtcaaatgcctcaccgcgcgatagcagccttcaaacgtatccggcagcagcgtgtccgcatcaaactgatctatctgatttccgatcaggacagccggcacgttcagcccctcaaaaaaagccttggataagaccccttgccgatccggaaaggcaacgacccccgccagatctaacggccccgccaaggcagactttatcagcgccaagcgctgcccgtccacgtcataaacctggggaatggcaatataggcttcctttttcagcagctcctccagcttttccctgacctgattttgaaatatgctatgtctttcggacagcaagattaatatacatttttggggcggcttcactttagtcttttttgattttttgataataaaattcggaagttgatccagttctcgaatggctttttctaccttctccaccttttcagggctgacataacgggtgccgtttactacatgggaaaccgttgatacagaaacccccgccattttagcaatatcatttattgtcgccatccactcagttcccctattcttgcttttatcctatttcgattatacgcacacgttcaatcatagtcaataaaattggcgcaatcgttgtacggcatcaagatgaaaagcctttacgccttccggcgggggcgttgcgaaatggatttctatttcgggcagcaaaaataacgcaacccgccaaagcgaattgcgatattgattgcgccaacccgccgctgacagaattctcacgatatggatattgacttgcgggcataaaaaagttcacaaaccacataagcggtttgcgaacttgggagcggcaacctgccgctggcaaaggctgacggaatggatatatcctttcgagcgaccatttcgggcaataaaaatatcgcaacccacaaaagtgaattgcgatatcaggcgcggacaccgtccgctggctggggaacagggatttgaaccccgacgccgtgagtcagagtcacgtatgctgccgttacattattccccaatgttcaccggaacgatgattattttaccattccggtgaagggcctgtcaagcccattttgcaaatttcctgcaatctcctaagatctctaccagccgcgcaccgtaagccccaggggatagcgccccgcaaggcgcccgtacagggccagcccgccgtgtacgctgctgggcacgcggatctccacgctcatctcgcccttttcaaggatggcgggcagcaggcggctgggcacctttaagcggcaaaggtatccgtacgagcccgcgtcctccaatctgcgcacgttgcgctgggactggtaggtcagcacccctcgcgcgtccgccggggcgtccggcagatagcaccggccgatgcactgcccttccacgtagacccgcacccgggaggggaagcgctcttcatcggtcatataataactgttggggttggtctggcgcacatcccccagatcctgcacaaagtactgcaggtcgtccgcctgggtgtagtttgtccccaaatccttttttaatacctgccgtgcagaggcctcgaacaaaacctccagctgcgtgcagccggcaaaggcggcggtatccaccttgaagataaaggcgccaaagccgcccgcgctgagcttctcgttttccagcgccaggtaagcgcgggcaaacccgcgcgccgtggcactttccagcggcacctccaccgcgcggcccggccaggggtgcttttggccgctggcgctgcgcacgtcaaaggtggtgtaattgcgcataaccacttccccatccggggccagcagggtaaaggccgccacacacagggcgtcgcaatccggcatgctaaaggttacggttcccagatcctgcacgccgtagcccggccagggcagctctttttcgccctcctccaaagtgacgcggcccagcaccgggtcatcaaagctcagcgtccagccaaggcgcatggtctgcccgtgatgggccggggaaaagctggagccgtaaagcggcacctgcacgctctccccgcaggatacgtgggtgcagggagcgatgtccactgctacaaaatccgggctgtgcaggtcccgcaggcccatgcccggcacaaaggcgtcgtacccaaagtccttatccgtattgtcgatgcggtaatagccgttaaactcgttggtcacatcgtgcagctcggtaaagataaagccgcacatagcctcgtgcaggcggtattcgttgatcatataatggtactggtagcttaaatcgctatccccggcggagtgatccaccccccagaccgcgccgcactcgctgttcatcaacggcgcgccgttttgcctgttcccgccgatatagttaaaggccgagcccgcgtaggtctgcccgacgacttcgcggatatggtcccgcaccacctcgtagccgttgcggtaaaagtgccaggagttaatatcgctttccacatggtcgttattgcaaggggagttatcctccaccaggcgggtggggtcaaagcgcttggtccagcggtagcgcgcccgcacccacgcctgcgtttcgggcagatagcatttttcctccccctggccggtgaaaagcccccaggtctcgttaaacaccacccagctgacgatggaaggatggttgaaatctcgctccagcacagcctgttgctcccgctcgtaggcggcgcgggccttgggcgtgggctcgccccaaaaacagggcatatcctccatcaccattacgcccagcttatcggcccagtagagcttgactgggtcttccggtttgatgtggatacgcatcaaattcagccccagccgcttgacccgccagatctcatcgcgcatatcctcattagtgggataggtaaagtgccctttttcgtgataggcctggtccagcacgccgtttaagtacaccggctggccgttcagggtgatccagctgtacttcccgctgggagacgggcaggtgccgattgtgcggcagccaaaatagcacgccaccgcgtcctgcgcctccccatccgaaagggtaagtgtgccctcgtacaggttgggcgcctctggcgaccagaggcgtgggttttcaatatcaaaggccatctccaccggcagcacccccaccggggcatgaatggtcttttccgcgcgcacatccccaaaatccgcccgcagggtatactcgcccgcccttttcaagtgcagcgcgccctgcatcgtcacatggccctgcatatccgcggcaatgcgcatgccgccgataaagctctccggccgggcttccaggtacacggtctgccacacgccgcggatctccccataggcctgcttgccccgggtctgatccgccccgtcggcatcctctatccgcaaaaggatctcgttttcctccccgtccttccaggctggggtaacctcgcagcacaccggggtataaccgcccgtatgcctggcgcagaaccggccgttgacgtaaacatcgcagatataatccgccccgccgatgtgcaaaaacagccgcggcttgcccgccgggggcgcataaaccacccttttgcggtaccagcccacccccggttgatcgatcgccaccccgcttagcgggcagctccaggaaaagggcaccgtgatctcgcccgtcagctccgggcaagcgcgtgtggcagcgctaaggggctggaaggtaaaatcccaggcgccgttcaaattcagccaatcggcccgctgccagtccggccgcgggtgctccgggcgcggtatcgtttgttgcatagcttttccccctattcttccaaatcgaccggccagcgacgggcgggcaacccctcatcagccgcgttttactatgaaaccattatagaacatatcccgccgcttgtaacgcaccaaaattttgatttataaaaaggtttacgattttgctaatagttttaacctttctcaaggtgcttgggtggatatgctataatgataaaaaaggagggcggaaacatggatatttggcaaaggctttatgaggcggcccgggccgtgcaggcggaccgcgccctctccccctttatccaggcaggcggggtggcggcggctattttgacccgcaaggggaatatttacctgggcgtgtgcatggatacggccagctccttggggatgtgcgccgagcgggcggccatcgccaacatggtcacctgcggcgagcaggagatcgacaaactggtagccgtaatgccggacggacgggtgggcccgccctgtggcgcttgccgggagctgatgatgcagctgggcccggacagcgcctgcatcgagatcttgatggattaccccgggagaaaggccgtgaccctgggggcgcttgtccccgactggtggggcggggaaagatttgccgcgctttaaaaaggaggggacgcatttgaaacgatgtttgatcgcctgtatggcgctgctgctctgtttgccactgggggcctgcgcgggcgggcagcccccggctttgggttttgaccccgcgcaggtggaaagcgcgacggtctacaccggcggggtgcctgcggccgcaatgaaaaaagaggtggaggacgcccggcagatcgcatccctgctgcaactgttagagcaggtgcagctagggcgggaagccaccgaggcggacacggtggccggctctatcgggctgcaatttgaatttcgcctgcaagatgggacgcgggcgctggtgcatctgggcgcagatggcgccaccctgcgcacaccgtccggctttagggtcgtcaccgcctgccctgcggcgctgcgggacgaggatgcgttttttgccgccctgcccggagaggcccagcccgtgacggaggccgagctgcccgaattttaagctacagcgcggagcttctcagaacctaaccctgctgcaacgagtaaaacataaaaggcggcgcgttttttatcgcgccgcctattgcttttgggctaaataaagagaatataaagagattaggccctctcgtctatctccccctatcccctgatcccgatcagcccggccagggtgccggtatgcccgcgatcccgccggtgggagtaaaaggtctccggatcgcaactggtgcacaggttggccatggcgatctgtgaagcaggaatgccgttttgcagcatatcctcccggttgcaggcctgcaggtcgatatggaacttgccgtttccgtcctcatggatatggggggacgcgccgccatagctttgcgcaaaggcgtcccgcaccggggcatccacctcaaagcagcatgggccgatggacgggccgatggcgcagtaaatatcctgcggccttgagccataggtctgccccatgctttgaatggtcttgccgccgatacgctggaccgtgccccgccagcccgcatgcgagatggcggccacccgatgcacggggtcgtaaaaaaacagggggacgcaatcggcaaagtgtttgaccagcgtcacgccgggcaggtcggtcatcaacccatcgtattccggggcgatgtcgccatccgaaaggcccctgccgcacagcgagcgatcccgcaccgcgaggatcgcatccccatgcacctggcgggtgagcaccaaaccctcgtaaggggcagcggccgcggcggtcaagcgccggtagttctcccgcaccacggcggcgctgtccgcccgtttaaagcttaagttcatagtggcccgttctccatcggacacgccgcccacccgggtcgaaaaggcgtggtacagctcggggaacttttcctcccaaaggggaattttaaaaataagaaccccggcgtagttgcggggctcaaaatcgcttttttgcatcttctcttccatccttatgtttaaggtctatcctcgcccagcaggcggttgagctcatcccggaaggtattgatgtccttgaactggcggtagaccgaggcaaagcgcacataggccacctcgtccagctccttaaggcgcttcatcaccatctcccccagctgcagactggtcacttcctgcaccatctcgttgttcagctgcatctcgatggactgggccagcgcctctacgtcctttaaggggatggggcgcttttcgcaggccttgatcagcccggcgcgcagtttggcaatatcaaacgcctggcgtcgcccgtcttttttgaccacatagatgggcagcgtttcgatcttctcataggtggtaaagcgccgcaggcagttggtgcactcccgccggcggcggatggccccgtcctccgtggggcgcgaatcgatcacgcgcagttctgtgcagccgcaatatctacatttcatacgtgtactccttatgctgcttcttttgcctattatacaaaatattgcccgctttcgtctagtcccgcccgcggggcacgcaaaacgcgtcgaacttgaccaggatcacatcgtccccgatcttgacgatattgccccaggggatgatgatatccttttccggccgcagaaactgcagcatcttggtggaacccggcacgatcaggctcaaaacggtgccgtcgcccacgtccagttccagatccacgatgttgcccatgcgccggccatcgatcacgttgatgacctctttttgccgcagctcgttataggtggacagctgtgccatcaaaccacccctccatagacgctttttggccgcaatccggccttaagcattctatgccctgcggcggaaaatgataccttattgaagcgcccagcgccatccaaacggatatttccagcccgaggcgaggaagcttgcggcggccacttgtctttccacgcaggttatcatttctcattctgtcattccgagcgccagcgaggaatctctttacgccctgttggccccgcttgcactgtcgagcgccactttcctgcctatgcacgagattcttcgctcggccctgcggcctccctctgaatgacctttaaacaaacgttaacccataccttttaggtttttttgataaacttgttgccgcacttggggcaggtgatgttgatgcggcccttgccccggggcacgcgcacctcctggcggcacttggggcagcggaagtaccggtgcgccgcatcctggctgcgggcggcccggcccataaaccacttgccgatgggctgccagaatttaaggaaggcccggttctccgccgcgcgccgctcaatattgcgcgagaacatgcggaaaaagcagtaccccagcggcaatagcatgatcagctgcaaaaaaggcacgcggaacaggttcatcagcagccccagcaccagggaaaagattaccagcgcataggtcagcgcgtcgctgccgtagcggccggccataaaattgcgaaagccaaacatcttttatttctcctcttcttaaaaccttgggatatttaggaaccattatatcatcttcccccgggaatgccaaatcccaccgcgtggcatctgtctaatataaaaagggccgccgttcaatatcggtcggcggcccgcaatttcatctgccctgctctccggcgcgctgggcgttcagctccgcatccatggcggcgcggcaatcctccatcaacatatcgatggcctgcttctgcccgataaagggcttgggatagatgggcgacaggatggtcagcttcaggcagggtttgcgcttatacagcctatagagtccgcgaggtttgcgcgcggcaatcaccataggcaccaccggcaccttattttttaccgccaggtaaaaggcgccccttttaaaaggccgcaggccctgataataggggtgcagcaccccctccgggtagacctgcacaaaggcccccgcctttaaggctttgcccatctcttcaaacatgcgggccatggcccggggctttttggaaagcggcaccccgccgaacacccgtatcaggtgccgcaccagcgggatgcggaagttgctctccagggtcacataatacatccgccggttccaaagggcctggtcgatcatcgaacagtccatcatgtgcacgtggttggatacggtgaccgccccccgcgcgcccaggcctttgaggttttcccagccctcgatcttcaggcccagaaacacccggtccaccaccgaaaggatgaccgtagccgcgccgcgcaaggcaaagcccatcgtgcggcgcaaaaagccgtcccgccggtaatcgtaatccggcgcgacctcgaaggaaaacggctgccacatgtgcaccacgtgctcgtcctccatggcgtttggctcccgcttgtcctgtacggcattcatgccgctaccctcccctctcctaaaggatatttatacctcccgcatcgcctcgcggaacatctcctcggcctggcgcacgcaggtatccaggtcgtactttttgcccagcgcgctgtaggcatgctccatttttttgcgctcgtcctcatgctcgacccagtaatcgatcttgcgggccaggtcctgcgggtcccccgcccggaacaggctgcgctcgtccagggcaaactggggcgtggcgcttttatggctgttggcgatcaccggcaccagtcctccggcaaaggcctccatacagctcatggcctcgatctccatatccgccgcgtgcacgtacaggtcgctcatggcgatcatatccagcagatccttcttttcaaaaaagcggatggtggccggcacctccaacttgcggatcaacctttgcagctgctttttgcgcggccccttgcccgccagcaccagcgccagcctgtccgcgtagcgggacagcttgatggcgcggatcagcacatcctgccgcttttcaatggacagccgcccgatcatcaggatgatgaacttatctgcataggccgcgattttttccatcttgcggtaggtaaaatccgggtcgatcccgttggagatcacgtgcagcttgcccttgtagccgtgcttttttagctcccctgcgataaaccggctggggcagtggatatgcgcgcaatccttataaatatagtggcggtaccaggcatagatgccatcgtttacgaatttgacgttgcccaggtgcagggagctggaaacattctccggctgcacgtggaaagccgccgtgtagggcttgcccagccgcttacagatgcggatgccgtggcggctcatggtaaagggcagcaaaaagtgcgtcacatccgcccaggagatcgcctcttccagcagcgcgtcatccggcttggaaaaggtcatgccctgcgcggtgaccagatgatcgaatatcgggatatactgcttgcgcatcaggtacgcccgctcgccctggctttgcatatcccccatggccgtgcaggccacccgcacctcgtgcccatgcgccatcagcaccccggcaaaccgccgggccgagatggtggcgccgttgttggcgccgtagtattggtccatgaccaataagatcttcattcgtccctctctcctattcaaaggggattaacccctatcggccccaacctttaagaacggccgggctgaaatgtcgttatccatacaggtctgcgcaaggccgtcagggccttgtaacgggcgggccggtttaaagttgcgccaagccgcggtgtacagctactgcccagcggttttaataagattcctcgctaatgctcggaatgacggcgttggggggggctagctgcacacaaacgcgcgttgccgttccccaggcattgtcaactgacattcagagagcggccgcaaagccgagcgaaaaatctgccgtatgtgtcgctgcgccttgcccgtcgccagaccgtaccattccgggcatagcccagtggttgccgtgagatcccccgctgcgcttcggcatgacggcatgaagagcctggctgcccggaatggcaggaataaaattattcaacaaaaaaacatacccttgtttattattgtagcaaaaaaagcgggattttggtacttttcttcccaaaaccccgcttactctgcctgaattgtcggctttacgccgcacggtaaaggcccatgcgccttacagggctattcgccgatggcatcggtcctatagataaacttgacgctgccctgggtgccctcagccaggccggtaaagctctggtaggccttggccgcgttggacagggcggtaaaccggtcgatcagcccctgcaagtcgccatcgaaagcctctaccagcttttggatgccctccgcatcaaactgggccataccctctttcagggtaaaggcgcccccctccagctggcctacgccgtccaccagcgcgcccgagccgctcttgagcgcgcctgcgcccttggacagctctttagcgcccgcaagcagcgtacccgccccactggacaaggtttctgtaccctggctgagcgcggcgctgccctcataggcggattgcacgccggcggtgtattcggccagcccgtcgtaaaacgccttgtaggcgtccagctgcgctttcagggccgctacgctgcccgcaccggacttggcctgcgccaaggcagaggcgatctgctcttttaccgtatcgctttgcatgttctgctcgatcagcgcatccacctgctgcgccacggccgcctcgatcttgccctgcacggcggaggaggccatctggtcgctgacattctgctctaccgcggcgatcacggcgctatccaggctgcccgcctgcacagcggcgcggtactgctccggcgtcatggcaaggccggcgccctgaaggactgatgctagcacctgttcgcgcacagcggattccaccccggcgcggatggtaaccaggttctccttgacttgagcggtcaccgcctctttcgctttctgggtcgccagcgtacgcaccttggcctcgtccaggtcgcccagcaccgaggagagcacctggctgtagttttcccgcgtcatcgtgggcacttccagcccagcggccttgagctggctctgcgccgcagccagcagcgaatcaaacacctctcccgcgccgccgtttagctgatcgttattggcggccagcgtacttaagcccgagttcaactccgccgcgccggtagcaagggcatcggcgccctgttttaaatctcccgcgccgcttttaagctgtagcgccccggccgaaagctggtcgatacccgttaccagctcgccggacttgctcatcagcgtggccaatccatcgtacagggccgaggaaccgtctaccagctgtccagaggcctcctgcagatcctgcagcgcatcggtcagctccgcggtatcctccacatcgcccaggtccagctcgttaaacatctccccggtgaccagggtcatcacggtctccagcgtaaaatccctggcgtcgcaggtgatctctacgctttcggggatgtccagatccacatcctcatcggaaaggcccaggctatcctttagccccggcagggcaaagcccatgacgatggacttatccccatcgtttatcagcttgccgcccgtgaccgacacgttgctaaagtgctccccgtccaaaatggccccggtcaccgccacaaaggggacgtaaatctcctgttgctgcccgccgatctccacggtgcgcttttcgtgattgacgtagtcgatgtggatagtcacccggccgctcttgcttgccagctcttccggggcgatgggctgtccatccagggtgtagctcaagttcacctctaccggcggggccttttcggtcgtgccctggtagtacacatcctcccctgccgcctcccaggcgatgccatccccatccttttggtagccgccctcgcccttgacgttctggggatcttcaagctcggtgtaatcttttatggtgtccagaccatcggggtttttcagccagtcgctgacgatgactttatttacagcgccgtccgccccggtgagcacgtacaccgtttcatccttgccggagacaaaatcgctcagcaggcttttcacctgcttttcctgcttagagaccggcgcggcggcctccccttgtgcctgggcctgcagcggcccgtagcttacggcgcatacccccatgcacagcgccaacgcgcccgccagcgcagcgctggcccatttatttttatttttgaaatttttcatggttgaccctccgttcaagcgttcttgtttttaaagcccaggctggtgtgcacgatcaccttatcaaacaggatcagcatcgccggcaggatgaacagcacgcacagcatggatacgatggccccgcgcgccatcaggttgcacatggagctgatgatgtccacgttggaatacagcgccacgccaaaggttgcggcaaaaaagcccagcgcgctgaccaggatggacgggatggaggccgaaagggcgacgtccaccgcctcgtgccccgatttacccaagcgccgctcgcgcttatagcgggtggtcatcaaaatcgcgtaatccaccgtggcccccagttggatggtgctgatgcagatcggcgccacaaagggcagcgagaccccagtatagtaggggatccccaggttgataaagatggccagctcgatcaccgccaccaatatcaccggcagggtgatggactttaagaccagggcgatgatgacaaagatagcgatgatggagatggcgttgaccaccttaaaatcgtgatcggtcacgtcgatcatatccttggtgcagggtgcctcgccgatcagcatgccgctgggatcgtactttttaagcaccgcattgatctggtcgatctgattgttgaccgcgtcggacgccaccttatactgggatgaaaccagcatcagctggtagcggtcccctttgagcacctctttgagggtatcgggcacgatctcctcgggcacggcgcttcccagcactgaatcaaagcccagggcgaacttgacgccctccacctgcccgatctcgtccagcatctcccgggcctgcttggccggcagattcgcgtctgccaggatcatgtgggtggaggccatgtcgaactcctcctgcagctttgtgttggcgatgacgtactccatatccttgggcagcgcctcgcccaaatcgtaataggtagcggtattcatgtaaccgtaaaaggcgggcaccagcagcaccacgaacacaatgaggaacacccagctgcgccgggtaaccaggcgggccgccttatccatttttggcaaaagcggccggtgctgggctttttgcagggccttgtcaaagagcaggatcatggccggcagggtggtcacgcagccgatcacgcccaggatcacgcccttggccatgaccatccctaaatcaaagcccagtgtaaagctcataaagcaaagggcgataaagccggccaccgtggtgatggagctgcccaccaccgaggtgatggtggccgagatcgcgtgcgccatggcccgttttttatccccctggaaccgggtcagctgctcgccatagctgtgccacaggaagatggaataatccatggtcacggccagctgcagcaccgccgagagggccttggtgatgtaggagatctcccccataaagtagttggtgcccaagtttaagaggatggccatgccgatggaacccaggaagaggaagggaaccaggtagttatccataaacaacatcatggccgcacaggccagcagcaccgccagccccacgtagatgggctcctcccgctcgcacaggtcctttagatcggtaaccatggcgctcatcccggagacaaagcactgtttgccggcaagggagcgaatgtcggcaatagcctgcatggtctcatctgcggaggtagaggtgtcaaagaacacagccatcaatgtggtatccccttgattaaaggcatcgtacaccttttggggcagcacctccatggggatggagatgtccgccagggaatcgtaccagagcacggtttccacatgggggacctgctccatctgcgccttgagggcggaaacatccttggtgggcatgccctccaccatcacaagggagaaagcccccttgccaaagtcctccagcaggatattctgccccttgacggtatccatatcctccggcaggtaatccagcatatcgtagttgatgcgggtgcccaatatgcccaataccgaagggatcagcaggatcactgccaggatcaggatcggtatccgcagcttgacaaccgccttgccaaatttgatcattcttcttggcctcctttaaggtccagtttctgccgccaggccgcggccagatcctcctgctcccagggtgcgccctgcgcccccgggccgaagcgtccgcacactgccagcggcgtgtacagggggcggcgcaggccaaagcggcggatgatggctgccggccgcaggtccagcgtctcgctgaccaaccgccccagccgcgcctgcccgccctcgccaaaggtctccacctccagggctaccgggtctgccaggcctagagcgtagcacagcttgacccggcagcgccgcgccaggcccgccgccaccaggtttttggcgatgtagcgggccatgtacgccccgcaggtacgggtggcgtcccgcccggcaagggagggttggtccagcgcatcgccatagccgctttccagatggctggagttgccggcaaaggccgccggtccgccgcaggtaaaacggccggccgggttgataaagacctgcgcatcctcccccagcagcctcccgggcaggcagggggcgaccaccttttgctccagcatcgcgcgcacctggtccagcgcaatctgcgcgccatgctgggcgcctaacaccagcgcggctaccctgccatcccgcagcgccacaaaggcccctccatcgggtagcagaccgggcagggcatcttcgccgcgcaaggcatccattcgttcgcaaatcccctgagccagcgcggccgccaagggaaagcgcgccgccccctccttacaggcatagcccgcgtacagcccctggcaaagggcgccgctgtccccagcgtccgcccggcgcaatccagcctccgcctccggagcgaagggccgcagggctagctccacctggcagcgctgcgccagatcgggatagccagcctgcaacagggtctgccgcgccagggcggcgtagtcgatctgcgcgtcggcgctcagctcgcctccgatccatacctgcgcgccggccagcgccacatccacccgcacccgcgcgcccgggtcctgggaaagggccgcatccagtatccggtcggccatctggccgcacagactgtcgctctggcccctgcaaaaggcacgggccgtttgtaacgtcgccatcctgtcaccccctgaatttgaactccaaagcctattatagggaagcagctacgggattaccgcagacaatcaaaaagccgtgtgcgaaattcgcacacggcacaaacattgtctgaattttgggcatttcccgccctatgtctaatttttaggcatctcccccggcgcgtctgaatttctgcggccgttcttttccagcatggcgcgcagcgccccttccgacagccgggccaggttgaggatcatcggctcggcctcggtggtcatatcccgccggatccactcgatgaccatgccgcttagggcgtgcttataaaactcggccagcagttcgatatcctcctggcatacgttcaggcccctggcctcctgctgcacgtattccaaagcgaccttggcgatcacatcgtccaggtaggtgcgcagccgctcccggcccatgctattgtagatatggtagatagcctttttgttctcccgggcaaaggtgatggcgtgcagcacgccctcctgccaggaggtaaagggctgcccctcttccagtacggcgcgggtctcttcctgaaagacctcgtccagcagcgcgtaaatatcctgaaaataatagtaaaaggtattgcggttgaccccgcaatcctccaccacatctttgacagtgatcttatcaagcggcttttgccccagtagtttgacaaaggacgccacgatggcctgcttggtaaactgtgccactttcttcctcctcacgctgcgcaatccattaacatattataatacaaagaccggttttatacaaacgccaccccggcgcaaagaaaaaaagcccagccacatggctgggcctttgcatacctatacgcttatttatgccggcggataaaggacggaaggccgttatcgtcggtctgcggggcctggcggggcgccgggttagacggctgcgcctgctgggccggcgcggccgggcgcacggactggggcggattcataaagttgggcatgttcagcccatcgctggcctggcgggccgaacccgcggtcgcccggggctgagagaagatgggttccgccgcgcggtcctgcttggcatcggcataaccggtggcgatgaccgtgatgcggatctcgtcgcccagggtatcatcaaagccggcgccgaagatgatattggcctcaggatgcacggccgaggtgatcaggctggccgcatcgttgacctccatcagcgtcagggtatcggcgttgccggtgatgttgatcagcaccgcggtagcaccctcgatggtggtctccagcagcggagactcgatggccccgcgggccgcggcgatggcgcgatcctcgcccgaagcggtgccaatgcccatgtgggcgatgccctgctcgaacatggtggcgcgcacgtccgcaaagtccaggttgatcagcgccggcatcgtgatcagatccgagatgccctgcacgccctggcgcagcacgtcgtccgccacgcggaaggcctctacgatggaggtggccttgcttacgacctggagcagcttatcgttggggatgatgaccagggtatccaccttgctcttaagctcctgaatgccgcggtcggcattgagcatgcgctggcggccctcaaacataaagggcttggtgaccacgccgatggtcaaaatacccatttctttggcgatctcggccacaacgggggccgcgccggtgccggtgccgccgcccataccggcggtgatgaacaccaggtccgcgccctggagatgtttcatgatctcttcacggctctcatcggccgccttcatgcccgcatcggggttggcgcccgcgccaaggcccttggtcagcttttcgccgatctgcacggtatcgtcggccttgctcatggtcagcgcctgatgatcggtattgatcgcgataaagtcaacattgcgcagctggctctcgatcatacggttcacggcgttgttgcccgcgccgccaacgccgattaccttgattttggcaaaagacgcgtttacagcattgtccaattccatcataggatgtttacctccttagcatttaaaaccgctttcgaatgagtttatggaaaagcgaagatcgctcctccttttccgggtcttccgtttgttgcagcgccaggtgcagcccgcctaccgcagcggtatccatgggggtattgagcaccgcgcccaccggaatgggcatggacaccttgcgcccggtgacataagcgcaccaggccttggccccccgcagtggtgcgatagcccccccggtcaccaccaggggcttgtccgccccgacggtgtaaccgctaagcgatacggcccgcatcgcctcctggacgatctccatcgcccgcgcttcaattatagcacacacagcgccatagtcaaagcggctgacgcggccccctgccacctggacaaggatcgcgctgtccggcgcctccgggtccagcccaaaggcgaacctgcgcttgatccgctcggcctgggccagggagatgttcagctgcagtgccagatcggtcgccatgtgccacccgcccaccgggatggtggaagagaagatcacactatcggcatagaccagcgaaacgcagctttcgtgatagcccgcatccagcaggatgcacagcccgtcccgcacctgggctggaatcagctttaacgcctgccccagggcgctgggcacaaaccccgccgtttcaagacccagggcgtccatcaccgcgcctacgcgctggacgaagaaccgatccgccagggtaagcgccgcgcgcacccgcagatggcccgacacggctcccgccgggtccagcagcttttcgccgctgtccaatgtataatacatgggggtgcggtgggccaccgcgtaccggtccggctggtaaagagaggccgcctgatccagcaccgtccgcatatcccggggggtcacccgctccccggtgacggacgcgctggcgtttaaacaggttacccgggagtaaggcccgggcagcaccagataggccctgtcaaacgatacgccagcgcgcgcttgcgtgcgctccacggcctgggccgcggctacctgccagctttgcgggctggcgctgtccctcccgatggcgaaatcccggtaataaacagcgtttgcccccctgatctgcaccgcacggccgggggcgccggtaccgtaggcacaaatcactttggaactgccaaagtctaaaaccgcagcgccgtgatccacgcccgcttccccctctttgcgcatggccgggcctgcctttagcttccctagcctatatcaaccattatcatatcagaaattcgcccagaaataaaccgttaattgtgctttttacagtttaaatacaaattatttttatgggaattgttgcctgcaccgttgggctaaacgcctgcccaatgcgcggcgcgcgctgacgcgggatagcccacatgccagcgtcggaagggcttccggcttgtatgcaaaagcacaggttatgcggaacgggccgcgcgctatcgcccgcatttctccttgagaatggagttaaaacccagagcaacggatctttattccttcttgcgcttgtaaactctaacggatggcacttccatgcaaaggccattggttgtcatgagcttcttcacttcggcttcgcctccgttctgaatgacaacggagcgggtgttaaagtatacttttccgctcctcaatagcgtgctgtcattccgagcgcagcgaggaatctctcgaccaccgcttggctttgtctgcatcccgctgcatatggcaagtgcgccgctccctgccaacgcattagattctgcgttcggccttacgccctccctctgaatggcagggctgcgtatacaaggcatacgtttcaccatccacaaaccgctttaagacgtgcaaaaacgccccgctcttttagcggggcgaagcagcggctattttggtggggcgcgcttaaaaactcagctgaccggctcttcgcggaagctggcaccggtctcggcggcggtcacatccagcgtgcccaccttgccctcggcctgcagctgggggatcagggtgcgcacccaggtcaccttcttttccacatccttggcctggccaaagcgcacggcgatgccggcggtggtcttgagggtgatgtcgtccgggttgctcaagtccatctcgctgatcagctcctgggcgttttgggtataaaattccgagagcaccatgccgcaggcctccatctggtaggggttgctcagctccgcctttttgccggtggtaaaggagaccacctccacgcccttgaccagcagttccggcacgtcctcccccttgcttttcagctccagaagcgtgccctcctcgtcgatgaggatatagctggacaggtactccagcaccgcgcgggccttgcgctcgtgcaggacgatgctgatcttatcgggcagcttgtagccgatatgatccaccaccagataggggttctcctcaatattggccttgaccgcatccaggttgactttaaaaatgttctcccccagggctacgcccgccatgcccacgatgtcctcggtggccacggtctcgttgccgtagacctgcacgtcccgcacgatcagcacctcgaggttcaaaatggcggccagcgtcagcgccagcagcaggcccagcagccaggtgaccagcgcgctgggttttttcatcttctttttttctttggatgccttggccatggctctaatttctccttcgtaccttcgggtttgtttatccttcgatgcgcaccgcgtccgcgcccagggcttgcagatcctgctcaatgtgctcatatccccggtcgatcaggtccacccggccgatgcgggtctccccctcggccgcaagggccgccaccaccagcgcggcgccgccacgcaggtccggcgcggtaacgccagcgccggtcagcttgctcggcccgtggacgatggccgtccggtcgctcacccggatgcgggcgcccatgcgtgcaagctggggcaccacccggaagcggttctcaaagatattctcggtgatgacgctggccccctgcccccgggtgcacagcgccagaaacagcgcctgcatatcggtggggaagcccgggtagggttgggtctcgatggattcgatggccgcaagctttgccggcgcgcgcaggcgccagagcgaaccgtctttttccaatgtgcagccggcctctttcagcttagcctccactgcccagagctgctctaccggcgcgccgcgaagggcgatctccccgccggtgatggccgcggccaccaaaaaggtgccggccacgatgcgatccgccgcgatggggaagctgcacccggaaagcttctccacgccgataatggtgatggtttcggtccccgcgcccgagatatccgcccccaaggcccgcaaaaagtcctgtagttggacgatctccggctctcgggcggcattggtcagccgcgtggtgccggggatcagcgcggcggccatcatcaaattctcggtagcgcccacgctgggatagtccaaatgaatcatgccgcctttcagggcggccccgtcgctgaatatgtaacccgcctgctcggtaatgcgcgcgcccagggtgcgcaaacccttaaggtgcaggtcgatgggcctaaggcctatgtcgcagccgcccggataggtggctacagcgctgccaaaccggcccaacagcggacccagcataaagatggacgagcgcatcaccttggccagttcctcgggcatttggctgacgcgggcgttttgcgcgtcgatggtcagggcgtccccctcccagcgggtctggcagcccaaatgccgcagcagtgcaagcatgttctccacatcgctcaaatgcgggcagcccagtaaggtcaccggaccctggctgcacaggatggaggccgccagaataggcagcgctccgtttttagaaccgggcacggtatattcaccgtgcaggggcctgccgccccgtatccggatcatcgccatgattccaccccccacgaacaatctatccacatcctatgtcgggggtggaaattgtgttacaacgcatacgccctaaggcgtggagcgggtagaccttgagatattgagcaggatgccgatggcggccataaagatcatcaaactggtgccgcccgcgctgataaagggcagcggcacgcccgtgggcggcatagagccggtgaccacggccacgttgatgatgacctggatggcgatgaccgcggtgatgcccgccgccagcagcgacccaaacaggtccttacaggtcagtgccacgcggatgccccgccagatcaggaagataaagatccccagcagcaggatcgaccccaccaggccaaactcttcccccacgatggagaagataaagtcgctctcccggtagggcaggtagagatacttttggcggctgttgccaaagcccatgccgaaaagcccgcccgagcccagggcgtaaagggattgcaccagctggtacccggtatccgaggcgtccgcccaggggtctaaaaacgcggtatagcgtttaaagcggtagccgtccttatccaacagcaccgcggccaccatggcccccaccgcgccggtgaggatcaccgccaggtgccccaggttagccccggccacaaagagcatggccagcatcaaaaagccaatggaggccgccgtggacaggttgggctgtaaaaagaccatcccggcgatcaccccgcccaccagcaggatgggcagcaccccgtttttaaaactgcggatgcgcttgcggtccttggctacaaagccagcgatatagagcaccaacgcaaatttggccagctctgccggctgaatggagatgcccgcgatattcagccagcgggtcgcgccgttggcctcggtccccaggcccggcacccacacgcaggccaaaaggccgatggccgccaggatgcccacggtcttgaacttttccagctttttataggggatgcgcatggtgatcagcatcagcaccaggcccaccgccgcgccgaacatctgctttttgaaaaagaacatgccgtcgtaattatacagtttggactggctggcggcgtaatagctggcatcatacaccagcacgatgccaatgcacaccaaaagcagcgtgacgaacaaaatggaataatcgtatgattttttgcgccccgcccgttctgccgctcgcccgcctccctggcgggattgggcctgtggcgcgcttgccgcgcgactgcgggcaggtaccctaggattgggattggccatctagcgcctccttaagatgccgcacttcctctttaaacacgcggccgcgttcttcataatcgctgaacatatcaaaactggcgcaggcggggctgagcagtacgctgcccccgggctgggccacgcggaaggcggttttgaccgcgccggccatatcgcccgcgcgcatcacccggtcaaacccgcactttttggcggcggccaagatctggtccgccgtctggccgatcagcaccagcgtctggatctgcggggtaaaggccttgaccatgggcaaaaagtccgcgtgcttgtcgtacccgccgcagatcagcaccgtcggccggtccatagcctggatggccttgatggtggaatccggattggtgcccttggaatcgttgataaagcgcacgccccgcacctcggtgacaaactcgatgcggtgctccaccccctggaaatcccgcagggtctttttcacggccttggccggcgcgcccagcgccatgcaaagggatacagcggccagcgcgttttccaggttatgtgccccggggatgaagatctcctctaccccgcagatcttggtggtctgctccccatcggcaaagtacaccgcgccatcctgcgcataggcgccaaaagccaccggccccttgcgggagaaaaagcccacacggcagcgggcgcttttctctacgccgtgcagcgccggcgcgtcggcgttgaggaacagggcatcctcgccctccatattttcaaagatacgcgatttgacgcgcaagtattcttccatggtgccgtggcggttcaaatgatcctcggtcaggttcaaaagggcggctgccgacggccggaaggtggatacggattccagctggaaggagctgatctcggccaccaccacgtccccgggggcgatttccggaacccgggagataaagggcgtgccgatgttgcccaccacatgcacccgctgcccggcggctttaaagatctccccgcaaagggcggtggtggtggtcttgccgttggtgccggtgatggcggccaggcgcaccccttcaggacagagcctaaaggccagctcgatctcgccgatcacctcgatccccatttggcgggctttcgcgataaaggggctttggatgggcacgccggggctgatgaccatcagctgctggctctgtaggcaatccatagccgggcagcccagggccctggcaatgggcaggctgcgaatctcctccatcacgccgggcagctcgccctcccccttggaatcgttcaacgtcacctgggcccccagcgcgcacagctgcttggctgccgccacgccactgcgcgccgcgcccacgatcaaaacctttttccccgcgatctcttgcttaaacgaacccataggaagacctccatttcccattcgcctcccgcccgggggcaaaaggcgccctatccttagtaaaatgtgtaaatttgccgggccctgtcgaaacccgtctatagcacaagcgccgcctgaaggcggcagctagcgtaaaggcactattgcagcaacatgatggccgccaggcaacacaccccggtaatggacatgtataaaacgccgatctgcgtttcgctcatgccgcccagttccaagtggtggtggaatggcgccatgcggaacacccgctttttgcgcagcttgtagctgcctacctgtataatgtcggacaccgacgagatcacatagcagatccccatcagcggcagcagcagcatggtgcgggtggcgatcgccatggccaccacggccccgcctaggacaaaagagccggtatcccccataaataccttggccgggtgggcgttaaagcgtaaaaacccaaggcaggcccctgccacgcccccggtgaataccatgaggttgcggatattcatggccagcgccggctcgatgtccggcaggttcagcatggccatgcagatgatgccaaaggccgccgctacgatcatggtcacgccactgaccagcccgtccaccccgtcgcaaaggttgacgctgttgaccgtgccgatgatcacaaacatggtgatggggatgtaccacagccccagatcccactcgatattggcgatgggcacaaaaatcgaggagccgatcaacggatgctgataggcgtaccaggcaaagatcagcgccagcccgaactgggcgatgatcttttgataggccttgagccccagcgagcggtgcttgcgggccttgatatagtcgtctaagaaacccaccaggccaaagcccagggtgaccaggacgctaaaggagagaaagtcgatatccccgcgcatcaatatggcgcagggcaccagtagccccaccaggatgatcagcccgcccatggagggggtgccgctctttttcaggtggctttgggggccgtcctcccgctcggtctggcgcactttgagcttgagcagcgccgggatgacgatggggcccacgatcagcgccaccacaaatgcgatgaccaccgcaaagctcagcgcctgtatctgctcggggatggtgattgggaacatggaatgatctctccttaaaccgttcttctcttgtggctgcagcccgccttatcctttgggaaagcgcgcatccagcgccgcgtgcgcggcctgtctatcgtcaaagtggtgcttttgcgtgcccacgatctggtaatcctcatgccccttgccggcgataatcacgatatccccatcctgggccagggcgatggcccgctcgatggccgccatgcggttttcgatcatctcatagggtttgcccgtctgctccagccccgggcggatcatctccaaaatggcgtaggggtcctcggtgcgggggttatcgctggtggcgatgcaaaggtcgctcaattccccggcaacctgccccatgatggggcgctttttgctgtcccggtccccgccgcagccgaacacggtaatgatgcggttatgcttgagggtgcgggccgtactcaggatattttgcagcccgtccggcgtgtgggcgtagtccacaatcacgctaaagggcgcgcgtgggtgctccaccacctcaaagcgaccggccaccccgcttaaggcgtcaaggccgcgggccacatcctcaaggccgatgcccgccgcccgcgccaggcccgcggcggtcagcgcgttatgcaccgcaaacaaccccggcattttgagaaaaaccggcagggcctcatccccctcctgcagggtaaagcgggagccgcgcacatccatttccacgccctttgccacaagatccgcctccccctcgatggagaaagtcagtttgggcacagttacccgctgcaccagggcccacaccgcctcgtcgtccaggttgagcacggccttttcgcacatatccccttcaaacagccgggccttggccttaaggtaatgcgccatatccccgaagaaatccaggtgatcctgcgtcaggttggtaaaggctgccgccgcaaagcggatgccctctaatttacggaggtaaagcgcgtgggccgaggcctccatggccaccagatcaacccccgcgtccgccatctgccgcagcaggcgctgcagctcgatggggtcgggcgtggtcatatccgaagggatggtctgctccccgatcatcaccgcgatggtgccgatcagccctaccttgaatccggcggcctgggcgatggacttgagcatgtaggtcgtggaggtcttgccgttggtgccggtgacggccagcagcttcatcccctgggcggggcggccgtaaaagttggccgctacagtgctcatggcccttcgcgcgtccgggacgatcacctggggcaggtcggtatccatctcccgctcacaaaggatggccgcggcccccgccgcctgggcctggggcacgaaggcgtgcccatctacccgggtgcccgggatgcagatgtacagcgcccccggggccaccttgcgcgaatcgatggtcagctccgcgatctgggtctggccgctgccgcgcaaacgggcgccgtccacgtcccggatcaattcattaagctgcatctgcatggcctcctttgcccgtttatttccactcttttatgctactctctaaaatccaccgcgatctgtgtgccgatggtcaccgtagtgccgggcgagtggctctgtgccaccgccacgccgttgccccgcggcagcagctgcagcccgtaggtggtgaggatgacattggcctcctccggcgtctttcccgtcacatccggcacctgcacggcggtatcgttcgccggaggcgagggttcgcccaatagcacgttgatggtggcgcccttggccacctcggtgccctcgggcaggtcctgctcggtaacgctggcgcccgtgccgtcggcgctcatcacaaggcccacatcctccagcgccttgcgggcatcttcagaggacttgcccaccaggttgggcaccgctaccagcgcgtccccctgcccctcgccctctttatactggggcttcaccttcatatattttagggtatcctcgatgatctgccgggcatagggcgcggccagggtgccgccaaaatcgctgggcacgccggtggcctcgtccacgatgaacagcacgcaaatcttggggtcgtccgccggggcaaagcccacgaaggaggccacgtgcttggtgttatcgatcttgccgtccacatacttctgggcggtaccggtcttgcccgccacgcggtacccggcggcgtaggcgtttttcgagccgttggtgaccgcgtcctccaggatctggcgcatggtgtccgaagtttgagaagagatcacctggcgcaccaccgtaggggtggtctcctccaccacgttgccctcgctatccgtcatggatttgaccagatagggcttcatcaggttgccgccgttggccacggcggatacggcggtgatcagctgcatggggctgaccgcgatggactggccaaagccgatgcgggccaggtccacgtttttcacgtacttctcggcccggacgatgccgccggcctctccggtaaaatcaaggtcggtagtggagccaaagccgaagttatagatcatgtcgtaaaagttttccttccccatggccagggccagcgccacaaaggccgggttgcaggagttttgcaccgcctgggccagggtctgatccccgtgaggattgtaggagcgccagcacttgatcttttccccatccaccatggcgtagcccgggcagttaaagtgcgcgtcggtactggtcacgcccagctccagggcgctggcggtggtaatgattttaaaggtagagccgggttcgtacacgtctaccacgcaggagttacggctcaaggcctttagggtatccaggtcgtcccgcggcgggtcgttgaggtcaaaatcgggcttattgcccatggccagcacctcgccggtctgcggatccatcaccacgcactggatggccttggcgttgtacttgaccagcgcgtcctccatggccttttccacaaagctctggatgacgtagtcgatagtcagcgtcacgtcgtacccgtcctggggggcgatatactggctgacggagtagggcatctccctgcccttggtatcggtctctgaaacggtgcgcccatcggtgcccgccaaatacttattgagtttgagctccaggccctcttggccctgcccatccaccgagcaaaagcccagcacctggcttaaaaaattgccccggggataatagcgcttgctgtcctcggtaaagaccacgccgcttaggttcagctcgcgtatggcgtcggcctgctcgctctccacctggcgcttgagccagacctcggaggcgtccttggtcagcttttgcatcacctcgtcccggtccatctccaatatctcgctgagcttatcggcggtatagtccacatcttttatttgggaggggcgcaccaccaccgtatcggcgctggcgctttgggccaggatgttgccgttacgatcctgaatatccccgcgcttggcggataccgccagatcccgcgtccactggtccgccgccttttcctgcagccactgggcctgcaccagctggatatagcccagcctgccaaagagcacaaaaaaaagtaaggttacggctgataaaaaagcgagtaacctttttttattcatcattccgggagatgccatggggtgttccctcctttatggtttgatggccgcccctgcgccctaatcaagccaggagaccacgcgcgagaaaaactccccgatgggcgaggtgctaccggctaaggcgctttcgcgctcctgctgctgggcttgcgcctgggcctgggcctcggagggcgtcatgggcagggaaacatagcgcacttggtcctcgctgggcgcgttcatcgccaggctcttggaggcctcgttcatcaccacgtccagattttggacggagtttagctgatgctccagcgaagcggtctttttctccacctcgctcagttcgtttttcagggtgtggatctggttggcgttttgggcgatgatggaaaaccgcgtgaccaccacgatcgccaaaataaagcccaggatcagcagcacgatgggcttggccttggattggggtttgaccacccgcccggcctggggcatgcgcgcaggcggctcggccagacgcagctgcggccgtttttcgttttgatattcgattttacgagccgtgctccctttttgtgctgctaccatgattattctctccacgtgttatttagaaccccggcccccttttcaaacgcagggtacggggcggttccgctatagcttttgcacgacccgcagctttgcgctgcggctgcgcgggttttgctccacttccgccgggctgggcaggatgggtttgcgggtgacgacctgtgccaccggcagctttccgcaggtgcagaccggcgctttgggcgggcaggtgcaggggttttgcaggcgcttaaaggtctgcttgacgatccggtcctctaaagaatggaaggtgatcaccgccagccgtccgccgggggccagcagcgagaccagttcctccagcgcctgggatagcggccccagctcgtcgttgacggcgatgcgcagcgcctgaaaggtcctgcgcgcggggtggggcccatcccgtctggctcctttggggatggctgccttaatgatggaaaccagctcccctgtggtctccaccggctttttctcccgcgcctgcaggataaaggccgcgatgcgggccgcccagcgctcctcgccataatcgcggatgatccgcgtcaattcctcctgggtcagggtgttgcaaagatccgccgcggtgcgcccgcagctttgatccatgcgcatatccagataggcgtcctcctggaagctgaagccccgctccccctcgtcaaactgaaaggaggagacccccagatccagcaccacgccatccagctgcgcgaccccctgagccgccagcagggctttggcatcgtgaaaattgccgtgcaggggcttaagccgctccccaaaggcggccagccgctcgcccgcggcccgcagcgcgtcccagtcccggtcgatgccgtagaccacgccatccggcccactctggcgaaggatcgcctcggtatggcccccgccgcccagcgttccatccaggtaaactccgccctgcttgacctgcagggcctctaccgcctcttgcagcaatacggtaacgtgggtaaactcgcccatggctaaatccccaactgggccatctgggccagcacttcgtcgtactcatccgccgcagcattggaatattccttccagcggtctcggttccagatctcggcccgggtcatcgcgccgatgaccatgacctctttttccagcccggcaaattcgcgcaggctggccggcagcaggatgcgcccctgcttgtccagctcgcactcgcacgcgccggcgaagagaaagcgtaaaaagatctgggccgtcttatcggtggtgggaagcgcgcgcagcttgtccgcaaaggcgttccactcgcccatgggaaagacgaacaggcagttgttgatgcctttggtgaccatgaacttctcgcccagctcctcgcggtagcgcgcgggcatgctcatgcgccctttggcatccagcgtatgggcatattcgccgtaaaacatgcttcccaccccctttcatcctttgggattgaattttacacccctagtgcgggatgtaataccactttacaccacttcataccacttttcaagtattatatcccaaaatttaagattttttacctccactttacccccaattcacccggtttttctatattgtaaattccgtcaaaatatactataaatgggataaaacccatatcttgtagaatgttgccccaaaagcaggggaaggcgtacaatttgttgtgtttttggggatttatcccacgccgcgtgctgtcagggttgatgaaaccaggggtagtaccccggaattttcccccgggtgggagaaagtggggcctgccgccacagttttggcagcacggtatgcggtttgttcgccggggtggggcttctccccgcatttttagatgtgatacaataccggcacagagaaagtgaaggtgatggatttgaagaaggaataccacatcgccgcctgcagcggaaaggccattgaggtattggcagggcaacgcatcgaggtgatcgacttggagggcagccaggtggtggattttttggcggaaaatttgagggaaccagaggagtttctctcccccggcgtgacgatagactgcaacgaatccctgcggctgcgggtgggcgatctgctctactcgacacgctaccgccccatgttccagatactggcggatacggtgggcgagcacgacctgctgcacccctgctgccggaaagagatgtacgactttttttatcacaacggctcggggcaccccaactgcctggacaacatcaaccaatgcctgggggaaagccggccggtcattcacccggtcaacctgtttatgcatacccgcatcaagcccaacggcgatattgccgtcctccgtccgctctcccggccgggggaccagatcgttttggaggcgaagatggacgtccggttgggggtggcggcctgcagcgtagccgaaagcgactgcaacgccgggcggtgcacacccatcaaggtgatcctcgaggattgagcggcgagtgaccgccgcgggcggggcgcgggccaagccattgcaattaggcagggccaaggggttcgcataagattcctcgacttcggctcggaatgacgggattttggggcgattttggtgcgtgcaaacgtaggggtttttgttcggtgtcatctctctccagcgcacctaaaggtgcgccacctccctcgccagagggaggcaagagaaagggaaaacaagcagcggagcactagcgaaacggctggagaatatgcctttttatctgcatcggagagtttgaaaaacctccgtccccaccacttcagtggccgtttcaaggggttaagggattgttaagggaaatctatagcgagcgcgtccggtggagtacggagtgagtgccgccagtggcggaagcagcgaacgcagtactctgtaagtacgtggtaagtccaagcggcgttaaccgcgcaggacgaacccgtaacgaacagaggctgacggacccgcggagccgaagggcgcggtgatttctgtgagggtacggaacgagcgccggcagtgccggatgcagcgagtgcagtacccggtgagcgtaaggtgcgggcgaacgccgtgaggcgtgtaggccgaacccacagcgaaccgagagttgcctggttttgccgttgccggagaaagtactaaagttaagccccagcgagcttcaggggctttagcctaagggggaaatcggaatcccccttcccccttaacatatataatttgttccctaacgcccctccttgcttcgctttatcttcgttttagctttgaacaaaaacctatactttagtactcgctacgttgtcattcagagggaggccgtaaggccgagcgaagaatctcgtgcatgggggagaaagcggcgatcaacctgggcggggcggtgcagacgaggccaacaggacgtaaggagattcctcgcttacgctcggaatgacaatggcgcagtatctctacggatgagcagaaaagcatacttgaatacgcagccctgtcattcagagggaggccgtaaggccgagcgaagaatcccgtgcgttggcagaggagcggcgcttgacctgggcgtgcgcaggtgcgggcaagacaagcgggtatcaagagattcctcgctgacactcggaatgacagtatttaggattacgctttgcgcacacaaacctatatcctctaaactaaaaggcatccccctccctgcaaagatgatacacgcgccctgtcttacgggacggcagagatacaaaaagagccggaagggttgaccttccggctctttttaagagacgtttgattaaaagctagagcaccttttgcaaaaagctgcgggtgcgctcgtgcttgggggcggcaaagatcgcgcgcgggtctccctgctccaggatcacgccctcgtccataaacagcaggcggctgcccacctcccgggcaaagcccatctcgtgggtgaccaccaccatggtcatcccctcgtcggccagctgtttcataacctccagcacctcgcctaccatctccgggtccagggcgctggtgggttcgtcaaagagcatgatgtccgggctcatgcacagcgcccgggcgatggccacgcgctgcttttgcccgccgctaagctgcacggggtagttatccgccttgctatccagccccacgcggcgcaacagctccatggccttgtccttagcatcgcttgccgaaagcagcttgagcttggtgggggccagggtcacgttgtccaacaccgtgcgatgcgggaaaaggttaaagttctggaaaaccatccccatcttctggcgcaccttgttgacattgcaccccttatcggtaatacattcgccctcgatgtagatcttgccggcggtgggctgctccaacaggttcaagcagcgcaggaacgtggacttacccgaaccggacggcccgatgaccacgaccttctccccaggggcgatatgctcgtcaatacccttgagcacctccaggtccccaaacgatttagtgagtccttccacgcgaatcactgcggcgcaacctcctttccatgatggccaaaagcctggtcagcgtaaagatgatgataaaatagatcaggcccgctgtgatcaggggcaaaaacgcctcgaacgtgcgggagcggatcacgtccgccgccttggtcagatcctgcatgccgatataacccatgatggaggtctccttgatcagcacgataaactcgctggccagcggcggcaggatatttttgatggcctggggcaggatgatgtacatcatggtctgccggtggctaaggcccaaagagcggccggcctccatctgcccctgatcgatggacaggatgcccgcccggaagatctcggccacgtaggcgccggagttgaagccgaaggccagcgtcgccaccagaatccgcgggatattgaccgagccgaacaccacaaagtacatgatcatcagctgcaacaccataggcgtaccgcgtaccacgtcgatatagatgctggcgatggtgttgagcgggcgccagcggccgatgcggaactggcttagccgcatcagcgccgcgatcagccccagcaccacgcccagcagcaccgcgtaaagcgccacctgcagcgtcatccccaggccgtccagcatcagggtccatcggtcgtccttaataaaattcagatagatcgaatccgataaattcgtccaaaaatccatccatttcaccgtcccatcgaaggttttcttcgtccatgccaaaaggaggatagcccgagagctatcctcccactgaacttaaagcgaattattcctcaaagttttcaacatacgcgtcgatgtactttttgtacagctcgtcaaacgtaccgtcctctttgatgcgctttaaggtcttgttgatggcctccagggtggccgtatcgccctttttcaccgcgatggcgtaggactctaccgtgaagggctcagccaggatctccaggccctcgttcttggccacgaaggcgcgggcgggcatctcgtcgatgaccacggcgtcgatcttatcgttgttcagatccagcaccgcgtccatgccctttttaaagcggaagacctcggtggagccgcccaactcgctgacggcctcgtcgcccgtggtgccttcctgcacgccgatcttcttatccttcaggtcctcgttggatttgatcgccgtctggccctttttcacgatgatgacctggccagcgtcaaaataggtatcggagaaatccgcattctccaaccggtcgggcttaatggtcatgccggcggccacaaagttgaccttgccggtggaaaccgcgccgatgagggaaccaaagtccatatcctccacgaccagctccttgcccatatccttggcgatctcctgggcaatggctatatccagcccgtcaaagttgcctacgatgccgctctcggtcttgtactcaaagggttcaaactccgcattggtgcccatgatgatcttgccgtcatcctggccacaaccggtcatcagcgcagcgccacagcacaggcacagggccagcgccagggccataaccttctttttcactttacaaacgcctccatctctcaattcgtctacaataaaagacaagtgttattgtagtatagaatgtatttttttgcaatatatttgctaaaaattcctgtccatatccttacattccacaaaatccgggtcaaaccgggcgttatccccgcagattttatgcataaaatgtatttttattctatgtatacccgtcacgctgccacccggcaaaaagggggcgccgtgcagcgccccttttttcgtcaagcaggtttttacgccttgccgatattcccaaaatagcggtccacatccaaccccatctcggtgccgatgcgccgcatctccgaaagggtcttgtcgttgaccggcagcccctcggtctgctttttgcccatggattccagctctttttccccatggatatagatgcgatcctgacccttggccttgggggaggaacgcagctcctccagataggtggaaaagcgggatttgatctgcgccttatccccaaagatgccgtaatcgatggcccagaagcagtgggaggtatccgcatgatcccccaccgaggtcatatggttggcggtgggcccgcctgccaggatgccggtgcacagttcgcagatcatgccaaagccgtagcccttatagccgctgttcaactcgccctctccgcccaggggcaggatgccgccgcccaggcgatggatgatattgtgcagcacctcgctggcatccgtgcagcccaggccgtcggcgtccagcgcccagccgtttggcaggggctgctcttttttattgtagacctccagcttgccccggggcaccacggtggtggccgcgtcaaagaggaagggggtgggatctgccggcatggaaacggcaatgggatccgtgcccagcatggccttgcgcccaaaggtgggcaccatgatggcctcggtattggtcatgcacacgccgatcatatccgcatccgcggccattttggtgtaatacccggcgatgccgtaatggttggagttgcgcaccaccaccatgccgatgccggtggtcttggccttttcgatagccttttccatcccaaagcggccggccagctggcccatcatcttgtgcgcgtcaatcaccgcggagaccggggtctcaaacaccacctcgggctgggcctgcgtatccaccatgccaaagccgatctcctgatggtagcgcaccaggcgctgcaggccgtgggactcgatgccgtacagatccgcgcgcagcaacacatcggtcacctgctcgctctgctctttggtaaacccgtatttagggaacaagtccctgcaaaaatccagcgccgccttgtagtctatcgttacgtaagccatcgcactatttcccccttaaaattcgtcccaaaataacaaaactctatgtaacaggatagcacatcccgcccggggtgacaagacaaagccgtcctgcccaagcggtataacaaaagggccagccttttggccagcccttttgttacaaacctttagcgccctactccgggcagacctttaattgctgctcgatcagctgggccagcccctgggcgtcccgctgcatctcttccatatcctcgccttcgatcatcacgcgcaccagcggctcggtacccgaggcgcgcaccagcacccggccccggccggcatacttgctgtccaaaagggcaatgcgctgggcaatggcggcctctttggcaaagtaatccttgcgctcgttggagaccttggcgcccaccagcacctggggcagcacctgcatgatatcggccagctcgcaaaggggcttgcccgtgcgggccatgatgccggtcagctgcagggcgctgaccatgccgtcacccgtagtattaaaatccgaaaagataatgtggccgctctgctcgccgcccaggttatacccctcggccagcattttttccagcacgtaacggtcccccaccccggtcttttcgatcttgacgccctcgcgccgcatggccaggtccagccccatattgctcatcaccgtggccaccagggtatcctttttcagcgtgccgtggcggcgcatctccccggcgcagatggccatgatctggtcgccatctacgatcacgccccgcccgtctacggcgatgaggcggtccgcgtccccatcaaaggccaggcctacatccgcgcccagctccaccacccgctgttgcaggtgcttgggatgggtagaaccgcagttatcgttgatgttggtgccatccgggtcgtcataaaaagcgcacaccttggcgcccatggactggaacacctccggcgccacgcgggaggccgcgccgttggcgcagtccagcacgataaacaggccctccaggctggtccccatagtggattgtaaaaagcggatataatccctgcgggcgttgcgcatctgcacgctggcccccacctctgccccgatgggctggggcagctccttgcggttattgaggatgatgtcctcaatggcgtcctcaatagcgtcggccagcttatagccctgggcgttaaaaaacttgatgccgttatcctccaccggattgtgggaagccgagatcatcacgcccgcgtccgcctcgtaagcgcgggtcaggtaggctaccgccggggtgggcagcacccctaccagggcggcctcggcccctaccgagcagatgcccgccaccagcgcggcctccagcatgttaccggaaatacgggtatcccgccctaccaggatgcggggacggtggtgggtctcccccgtcagcacgtaggccccggcctgccccagtttaaaggccagctcgcatgtcaactctgagttggcgacgccgcgcacgccgtccgtaccaaaaaggatacccatatttggatgtcccctttctttaataaatggtttgacaaaaatcccgtttattatagcatatgtggcaggaagcgtaaatattaactcggacaaatggcggtgaagccatgaggccccgccgcccaggtgagaaccaggccggttaaatctgcgcgatgagctggagcttgaactccagatagtcgcaggaggtgagaaaatactgcaccccgtccatggtgccctcataggcgttgcgtagccccgccccgtgcaggtgcccatacaccgcccgctttacgccgtactgcgcgtaaagcgctgtaaagccggagggctcctgatggtcgttaaaagggggatagtgggtcatcaccaccaggttctccgtgggcaggccggtcttttggaaggccttgagggagagctccatccgccccaactcccgattatagatcttttcatcctgcgcgctgaactgccccgggttggggcacagccacccgcgggtgccgcacaccgccacatcccccaggcggatgcagtcgttctgcagggcataggtatccccccacagggccgcgcgcaccctgctcaggctggaccaccagtaatcgtggttgccccgcagcagcaccttttgccccggcatctggcagatctcatccagatccacctgggcgccgcccaaatccatcgcccagctgatgtccccaggcaccagcactacgtcctggggctgcactacctcccgccagttggcgcggatacggtcccaatgcctggcccagtgccggccgaaaacatccatgctcttgggctgcgcgcccgacaggtgcagatcccctattgcaaaaatcctcatccagtccccttccccggcccggccgtttaccgtgcgggcctgcaaaaaggaccgcctgctttgacccaggcggtccccgaaagctatcgtaaagggcaacgcaggcgggctaaaagtcctccgcgtcctcctcatcttcctcgctcatccccaggtcgctctggatctcccgcagctcatcggtggggatctcgtcgtcctcttccagggcgatgtcctccagatcctccagctcttccacgtcctccaggtcgatatccgtctcatcgtccagcatgtccgcgccggactcttccagctcggcatcctcatcctcgtcccagctctggggcgggtcttcctccacgacggcgtgcagcccctcctggtagcaggccaggcaaacgtccttccccggcagggcgggattctctccgcactccacacacatctccaccttggggtcggcattgatcttcatattcatttccttacggcacacggcgcaatactgatccgtatcgcgcatgtaattcacttcacaccgagggcacttcaccaacgccatgaacgaatcctctccttttcgcacgattgttgatttgacctacgtgtcgccatcttatgcggcaccctgccggggcatgcgcatatccaaagcggcgagccttggaaaaacttaccttggaagcccgcttccaaatttattgcattttcgtaacaatttgcgttaggatttgatcaacgggcaaccccccgccccttccggaaaggtgtcttatactttgtaccatgaagcatatgaaaaatcaagcccccgggtgaattattttaaaggagtgactttaacatgcatcgatccataaaaaccatcctcgccagcgcgctgaccgctacgctgctgctggccggcgtgcccacgggccaggccgccgcccgtggcgtaaactactatggtctgaaccgttgcgcgatccgctttatcgccatctaccgccgcccgcagctgatcctgcgcccgggctgcaccatcaccataaagcccggctgccccagcctgacgccccagcccacacaaggccccagcgctacgcctactaagagaccggaggccacgcccagcgccacggcgacgcccgcgccatcggtagcgcccacaacggcccccagcaccacgccggagcctacggagcaacccaccgccaccccgcagcccagcgcggccccgagtgcggcccccagcgccacggcaacgcctaagccttctgtggcgcccaccgctacacccagcgccaaacctaccaccacgccggacacctccggctccatgaccgcgctggagcaatccatgctgaacatggtcaatgaggagcgggccaaacagggccttagcgccctgcaggtagaccctaccgtgcaaaaggtggcccgcctcaaggcacaggatatggtcaacaacaactactttgcccatgagtcccccacctatggcagcatcggcaacatgctcagcagctacggtgtctcctaccgctcggcgggcgagaacatcgccaaaaacgccaatgtggaaaaagcccatgtggcgctgatgaactccgccggtcacaaggccaacattctgggcaagggttatacccatgtaggcatcggcatcgtgacggatgctaacggctacgtgaccctggcacaggtgttcgtcgggaagtaagcgctttgtaatgacggccggatcgcccggcagcaaaaaaagccccgcaactgcggggctttttgttattgttttgtgggatagcgatccgtccggtccggagacgctccggcccttgtcccgatgttgctttttggcaggcggcgcggataagcacggccaacggctaacgcgggggattcttccctcgcccttgcggcctcgctctgaatgacaaggcgggtgcgctaatagccgcgcgagggcgcgctggcggcgccatctcgggcgggaatactccggccactctcccgatatcgctttttggcaggcggcgcggataagcacggccaacggctaacgcgggggattcttccctcgcccttgcggcctcgctctgaatgacagggcgggcggtgcaagagaaaaacctttggccctcagtcctccagctcgccgatatagctctcggcctgccagccggccacagccccgtccgcggcggcggtgacgatctgccgcaggggcttttgcagcgcatccccggcggcgaatacgcccgggatctcggtgcgcatatggtcgtccgccaggatatagcccgcctcgtccagcgtcagctgcccccgcacgatctcggtctgagggatggtgccgatggccacgaacatcccatccgccggcagggtctgctccgccccggtcttgacgttttgcagggtgattttctctaagcgggtatccccggaaagcgcggtgaccacgctatcccagtgcagcacgatcttgggatgggcgaagatgcgtttttgcagcacccgcgcggcgcgcagggcatcgcgccggtgtaccaggtgtacccgcgcggcaaaccgggtcaaaaacagggcgtcctccgcggcggtatcgcccccgcctaccacaaatacctctttatccttgaaaaacgccccatcgcaggtggcgcagtaagatacgccccgcccgcgcaggcgcccctcgtccgcaaggcccagtgtgcgcggctccgcccccagggccaggatcaggctgcgggcctcccgccgctccccgcccggcaggatggctgccttgaccgggccattcagttccagcttctccgcctgggcgtactcgaatttggcgcccatggcctcggcctggccctgcagcagcatggccagctccggcccctccacccctttggggaagccggggtagttctcgatcaggctggtggtggccgcctgcccgccggcaaaggtcttttccagcaccagtgtatccaggccgccgcgggcggcgtacaatgcggccgtcagccccgcggggccgccgccgacgatcaaacaatccagcatggtttttcactccatctcatttgattttatccgtatgcttatcattgtagccggttgtatggcttttataccgggctggcgacctcaaggtcccggtagcggcagtggctgccctccagcacgcacaggcctacggcgccgtgcaggtaaggcgcatcctcatcctcataagcgagcagtacctctccatccaccgccagggataacgctgcgccgcgcgccgaaacgctcagccggtagcgctttgcgtgttcccacgggaaggggcagctgcacaggatacggtagccgttctggttcttcatcagcaccagttggccatcgggcgcaaagcccgccgcatagctgcgtatcgccccctgcacccggaaattcagcagatgccactggccgatgaccggctccagcgtggccgagcagctgtaatcctcaaaatccccgccggtgtagaccgcgccaaaatcattgcaggataccccaaggcaatccccctccagataggccacccccttcaggcgggtaaactggctgatctcctggtgcagcgcgccgttccagacctcgatattctcctgggcaaaatccacggtatacgccggcgttccgtcaaaatacaggtcatccacatacacggtcagcgaggagctttcgaatccctttcccctgccgcacaaaatcacgcccgcctggccgatcagcccacttccggcggggatctgtaaggacagctcataccacctgggctgatccagcacgacccactgccctgttaccacctcgcccgtgcgcccatcgcgcacgtagggctgcgcccaggccgccatctctccgggctctaggcccgggcggatgctcaggtgcaatcgctggccgggatagaccagcggcgagaaggccgggtcgtaacgcgagtcgtcaaagtcctccgggcggtaataggtttgcttgtaaaggtaatgcagctcgcccgaggccgcgttgccgatcacccagcgcaaagagcgatttccgttatgcgcctgttcttccgtattggccaggtgatacagtcctccggtctgcacccgcagcgcatgggtgctaccaggaaactcaaagtggcagcgttgctgcgggccggataaaatctcccgccagggcttaggcatctcctcccccgccaagcggtaagccatccgggcgaaaaagcccgcgccatagggaatgtcctgcgcgttgagcgcccccagcacgctggagcaggccagaaaatcgccgatgggtttgatccacttctcctcgattccctccaggccgcacagcacccccatgatgcagcccacattgcccgcattgcaatccgtatcccagccgcacatgttgcaaatagtgatggtgcggctaaaatccccaccgccatagagcatggcaagcgccatcacccccgcgttggggatgatgtggcagttgccggggtacttatcgtagccgaaattcgccttaacaaagccaaagcaggcccgccagtcctccgggtgcgcccggtaaaaggcgcttaccgcctccaccacccgggcgtattcgctctgggccgggataaaggttagcgcctgggccatcacgtcctttatatctttcagggtaaaggccaaactgatgcagcaggccacgaagatgccgccgtagacgccctcgccatcgtgggtcacgctggccgccttgcgggccaactcggccgccagcttcgggttgcccggcgccaccaggccccaggggtcgataaagatctgcccgccgatctgctcggccaccgttttgccattttgcgtgctgcttccgctgcgcggggcggggatgccggcgcgcaggttcaggtaggccgtatgctcggtagagacgccgtaaccgccccaccagaaaaagccatgctcatagggggcgtaattgagcagcgcctcccccacatcctgggcggaaaaggccgtaaggtcccggcagtcctccagggcgcgggcaaaaaagatcgggccgttgctgtcatcatccgcggcaaagttgcgaaaggccatcggataatccgtcaattccccatacaccctggcgattttttcatacgtccagccctctaccggcgcgcccagccggatgccgatgaccttgcccagccagcccgcatagactttggaaaaataatcctgtggtatccgcatctttgggttctcctctctttttattaggtatgctcatttgttcgcttatcgggtatggccctgtcattccgaagcgccagcgaggaatctcttgacgccttctgggttctacacgtcctccggccctacaggtcaagcgctgctccctgcccacgcattagattcttcgctcggccttacggcctccctctgaatgacagggctatcgccccctcatccgctctggctcctatgtttcctgaatctcttacccgccatgctctttgttccgtttcccggctccgctcctaggctgtcgcccttttagccgctcctggcttcctacgtttccatacacgctcgccacaagcgttattcctgtcgcaagccgtccttcgttctgaatggcaatgtagcgaatgttgaagtatgccttttatacgcaaacttgtcattcagaacggaggcgcagccggagtgaagaatctattgcgtatcttcttggtcatgcatgttctaagcggttgtgcctgaatgtaatgccaaatggttatcctgagattcctcgtgcacgctcggaatgacagtatgcaggatcgctctttgcgtgcaaaaaagtatgctttatcccacgccctgcggcgcccttttagcgcgtagggccgtttatacagaatagtgcttaacgcgggccaaaatgcaaggataggcgcggcgttgtcaagcgcagggcaaggcgcctataacgagcttgcgcaatggcgtgtacggcagccgccttttcccgcgccagggcctatgcgctgtatttccatcattatagcgaaagccttagggtaatgcaaaccagctgccgtggacaaagggcggcgcggaaaaaggggagcccaggatccctggcgggctttggcgcgcgtcttcagggcaaaaacgcgcccaggcaagccaaaggggcggcgcaaaacctacgccgccctccgcccacacagggtcacttcacgttctcgctgctgatgccctgcaccgcctcgcccagcggcagccagtccatcacccattcgatggcccggtcccaaaaattccagtcgtgcccgccgcttgcctggtgccaggtcactgtaaagccctgggcctccagcagatcccggtaggccgtattagccgcgaaaagcccgtcttccgttccgcaggccatatagatacgcggtttatcctgcagttggcccgcagccctggccagcgcgtcgtaatcccaggggcatccttcaaaatccgccaccttttgcaggccaaacagagtacagtactgggcgcgggtaaaaaagtcatgccccggctcctgcaccgcgcccaggatgcggtccttgatcagcgcggcggaaaaggccgcgatatggctaaaggtatccatattgcgcaggccgttgaccaaggccccaaagccgcccatggaaaggccggcgatataggtatcctcccgccgggtggaagggttaaaggtcgcccgggtaaattccaccagctcctggccgataaagcgggcgtaataatccccggaaaggtcggagtcgcagtccataacgccatgaaaggatactatgagaaagctgcgacgcaccagtatatatcccgcaaaaggttggtagcaagccgaagcgctgtgagcgcgcttgcaagcgaaccgcaaaggcgcagcatgaccttttgcggaaaaggagacgcagcggaatgagcgcgccagcgacttacataaaagtcgccgcaagcgatatgaagcttgcggcgacgcggagcaggtacagcgtcttgtacgggccacgctgagcacggccttccccgcgggctaccaccttatccgaggggatgaccacgttgcagggtaccgtacggttcagcgcctgagagaaaaagttgagggtaatcagcgccataaaaacacatcctttctaacaaaatcatagggttgcggccatgccccgctgcaagggcgcggccctattctttcccctttatactttaacttctggagcgcgctccaggtcaacccccatttgacaggggcttagcccccgcgctatgatgaaataagaaataaggcaaaaggggaggaatgacgatggaattaaaacaggcgatggccgcgcgccactcggtgcgcgcgtatgccgcaaagcagctggacgaggcggcgctggacgcgatcctgcgggcgggctgcgcgggcccggtgggcatgggccgctatgagaacctgcacatcaccgtggtgcaggatgccgggaagatcgcgcagatttccaaggccacccaaaaggtgaccggctcggaggacgacccgctctacgggccgcccgcctatatcctgctctcggccaaggcggaggtggatgcgggcatcagctttgtcaacgccgcgggcgtgatgcagaatatgaccctggccgctgcggaacagggcgcgggctcggtgattatctgggcctcgtcccagggcatcgagcaggacgcgcagctcaaggcggacctgggcatcccggcgggctacaaggccgtgctgggcgccagctttggctacccggcccaggcggacggttcgctcaaggatatgggcatgaccatctcggtcaaccgggtgtaaggcgcgggacgaagtaaaaaaagcggggcaaaatgccccgctttttgcatcgcttttgcgtttgccgcgctggcgctgctgccccacgggccgggcaaagccgtaggatagcgataacgcaagaggtttttcgcccagagctggctctgctttgaatgacaggttgtgctgccagacaattcacgagattcttcgttcgcccttacggcctccctctgaatgacaggttatggctgccagtccatgcacgagattcttcgcgaggcctttggccccgctctgaatgacaggacacacgggggttgggggcttaatgggctgcgttttcagcgcacgttgccgctgttcagccccgcggtgccgccctccaggggcagccaatccaaaaagcgcttgaggtgccggtcccaaaaatcccactcgtgcccgccggcgctctcctcataggtaaagttcacgcccagggactccagaaagcggcagtactcgttcacccgctgatagagaaaatcctccgtgcccacggcgatatacagcgccgggaaggccttgcccgccgccacgatccgccgggccaggtcctcataatcccggtcgctgcccttgaggctttctttagggccaaaggtctgctggtaaaacgcggggccgaatttggccacctgcccaagctcggtatccctgatgatgtcgtccaggatgtacccggcggaaaaggagccgatggccccgaaggtatcgctgtacttcagcccgttgaccgtagccccgtatccccccatggaaaggccggcgatataggtatcctcccgaaggggagaaagcgggaacattcgccgggtgaattccaccagctcccttccgataaactccccgtaccggtctccattttgcagattatccacgtaaaatttattatccccgctgggcatcaccacggccaggtcccgctcttcggcccagcgctggatgcgggtgccggtcagccaatcggtatagttgccgtagccgccgtgcagcaggtacagggtcttaaagggcttatccgcccgcttgggcgtgcccggcagcgggatcttgtccagcgggatgatcacgtttaccggcacggtgcgcatcaggcactcggagataaagttgagctgtaattgcgccattgttctcccctccatttttgtcagtgctctgtagggctttacattttgtaacccatctatgttttatcatacacgaaaggctggcccctgccaaggggtgcaatttgccgtccaaggtgctagaatatactttggcaccaaactaaaaggagagacccagatggaagatacccagaagacaatcctgtttgaacagaccccgatcccccgggccgtggccaagttggctgtgcccaccattttaagctccctggtgatggtgatctataatttggcggacacctactttgtagggatgctgaacgaccccgtgcaaaacgccgccgtgaccctggccgcgccggtgctgctggcttttaacgccgtgaacaacctctttggcgtgggcgcctccagcatgatgagccgcgccctgggccgcaaggattacgatactgtttaccgcagctcggcctttgggttctactgcgccgtggtgtgcggcatcctcttttcgctgggctgcacgctctttcgccagccgctgctcgcccttttgggggcggacgccaacaccgccgccgctacggacggctacctgctttggacggtgctctttggcgccacaccggccatccttaacgtggtgatggcctacctggtccgctcggagggggctgcgctacacgccagcatcggcaccatgagtggatgcgcgctcaacattgtgctggaccccatcttcatcctcccctgggggctgaatatgggcgcggcgggcgcggggctggccacctttctttccaactgtgtggcctgcctgtactttttcatcctgctgctggtcaagcggggacggacctatgtatgtatccggcccaggatgttccgcccgcgcaaagatattgtatccggcgtatgcggggtgggcatccccgccgctatccaaaacctgctgaacgttacggggatgaccatcctcaacaactttacctccgcctttggggcggatgcggtggcggccatgggcatcacccaaaagatcaacccaaactgccatccgctctgaatggcaatagaatgcgaacgttcaagtataagtttctattcaacacagtaaacaggcgcaaggcaaagggcgcggcataccctctggatgcaccaccggagggtatgccgctcaacaaaagcctatggcctcccgggcaggtaggcttttgcacttctgcccgggaagccataggccaggaattttttatagctttttaaatggcggcactccttgccggggggccaactgccgcatttctcccttaggcggccttaggcgcgcccgcagcgccctgctgggcctccaggcgcttgaacagccgccgcagcaccagcaccgccgccacggccaggatgacctccgccgtcagctgggcataggccagcccgtatagcgggaagagcaggttgagcaggtacagcgcggggatctccaacacgatcttgcgcaggatggcgaagatgaagctctcccgccccatgcctgcggcctggaaaacgcccaccgccagaaagtcgatgctcaggaagggcagccccaggcagaacccgcgcaggaactgggcgccgtaggatacgatggtctcattattcataaacatgcgggtcagtccgtccgcgccgataaagtagccggcggccaccagcaccagaaagctgagcgatatcttggccgaaaagttcagcgcccccttcatgcgctttacgttgccgctggcgtagttgtagctgatcagcggcattagcccctgggacatgcccatggcgatgtacataaggagaagccaagaacggctaaaagggcaatagcctaggagcggagccggggaacggaacaaagaccatggcggttaagagattcaggaaacataggaagccaggagcggatgagggggcgatagccctgtcattcagagggaggccgtaaggccgaacgaagaatctcatgcgtcggcaaaggagcggcgcttgacctgtaggaatggacatgaacagccaagaaagcaccaagagattcctcgctggcgctcggaatgacagaattggaaatgataacctgcgtgggaaagtatgggttttcgctcggcgttatctctccctccggcgcacccaaaggtgcgcctccctcgtcagagggaggcgagtgtggattgatccgaacggcagggcataagcgaaacggctgagaaatatatctgtttatctgcatcggagagtttgtgaaacctccgtccccaccaccagaacattctatctatccgtcaaaccgtactgggagagttgcgtatccgaaagcgtctgatttccgacaagttcctttcccttttgaatcagcgcttcggtttcatataaatggaatgaacccatctgcagttttctgccttccgtcctcgacggtacccagagaatattttcgcccgggcaatagccgtaacattgctcaacgtaagccagtcttttccaggtctttgtatcgatcaggttcagatcctcatcgaccttgagcgccagcacgtcgtcctgggtaaaattccaggattcctgacccctattgctcacataatcgttacaggtcacctgcgtattgccaataaacaggccgtcctctcgctgataccgcgacagggtcccgtcatcatacagcacaagcaaaagctcctcggtcaagcacagcgatagcggctttaatccatagcaatctatttgggcatatggctcgccctccgcagtcaaaagctgaaccgcattcattcccgtcacagctattgtgttcccgtcttttgcccagtatacctgcggcccgtccttcagctccgtctgccagccggtatgctctcctgaacctaagtctgactgctcattctgtccggaagctgtccacatccgctcttcgttccacaaaaggaattcccttttctccgaattatataaaaagtccgaaaccgccgtctctatcttgtcatatcgataaatctgcgccgatgaatcttccggcgagaaggccacacagcaagcttgttgcaatccattgatctgatacaagagttttccgtcataccatttcggtcttgcgtataggcgggcgctctcatcttcacccctatacaacgcaacggcttgcgttttgttctcatccagatcaatcttcagcaatttcgactcttcatcatcccagatatacgcaaaccgccctgagactccgagcaaatcgtaatgatacgcatcgcccttaagctgctgctcgtaaagcacaccgtctttgttcaccacggtcacaacagcgtcatttgcaagaaaaatgctctccctgtctgtactcaggctttcctgaatatcggcacattcgcccatctgctccagcttttgccactcgtcgtcatattgtccccagcgatacaggaaaaccgacggcgagttggattttaccacaaagatgtccttgccgatagcagcatatccgatgccatccacaaacgtcggcaatgtcgcgacggttccctccggcgtaaacaggcccagccgtccgtcatccagtacgcagcggatgcgatgttcttccgcctgcatgcctacgatcggggacggaaactcgatgcgcgccattacctccccgcttttttggtcgaatatcgtgcagatatttccggaagcgcataggaccgttggcacggtattaccctgcgccacgccccatttcgcgctttgtaggaaaacccagcggttcatctgcgggtatgccatttgctggcgccataaatatgccgcatcctcgggcgagatcgcatcgatgtaactggttccattgccgaaaagctcataatcgttcagctgcatcgtatattcttcatcgctgcccatacttgcggcaaaaacaatatgatcttccgagatatccaattcaagcagactatggtactcctcttgcgcttgcgaaaatacgccagtttcagtatttaaggtaaaaatcttttcatgatatagccttccgtatgaaaacgctatccacggcgaacgcccggccatcaatctgacctgtgtggaaaccgtattttcctcctgcgcgggtagcgcaaaggctttttccgtctcaccattttcgctgtcgataaggatgatctcctcatgagtagcgatcgccagcgtttctccgttaagggctgcggcagtctggtaaaactgactctcctttgcgtcaagctgccagaggatcgcgccgtcattaccggctatcctgtatatattgtgcgcgcataccaccagcagatcctcatcgagcaccagcatttccatgtattcgctgtcaaccgtcatctccgagactttcttgaaatcttccgtattccatagggtcagtctgtcgccgctgtgatatacatacaggcgctcttcagacggagataccttgatctgcgaaacgttcccggtatgagaaaaagcgtttatcgcgtcaaaaccgtcatttccgggcgctctgtaggcctgaaccgactgcgtcagcgcgtaatgcgcctccggcacaaacggcctgtcgccttccacctccggcaaggcctcaagcgcaagcagcgttgcagacactctgtccccctcgtttaaaaggttcagggcctccgacgccagatattcggattgattgatcaaagcctgctcgtagttttcctttatctgtccggcgctccatgcaaaatatattgccagcgccaatatcgccgttcccgcggatgcgcctaatattctgagccggcgttgcctgtagcgcctcaggcgctggcgcaggtcgtcataagcgcaccccaaaagcgccgctgcaagccgcggcagctcctcctgccgcgctttttttaccggcatgcggtaatcacatgaaagcggttccatcggaacgttcaccgtctcaaccgttccctcgtctgatagcaaatccatttctttaaagcgcaaaatttccggaaccacttcttcaggctctccatcggctatgacggttaaaatatgatctttatcgtgggtcttcaggaaaaatgcgatttccttttgtacccatatggattccatggtgctttgggagcatatcacgatcaagtattccgaatggttcagcgcatcttgaatatagtcattcaaatcgcttgtcagcggaagttctgctttatccctgaaaatgcggtcgatgctcttgcttccggtcagctgctgcacatctttagggatcttcatccgctccagctgcgtctggacctcagcggcgatccgagaatccaattgcgcatgccggtaggaaataaaagcattgtattgataaaacatacttcgttgctccctgctaagctcggtgtttttagggctgttgcgccatagcgattttaagcacttctcccattgccagcacgttgtccctgtctgactgctgataatttatgtgcttccctgtcaccgcattttctttttcggacagttccggcaattgctcccatggaatcagacaggcatgctgcctttggctgcgatctcttgaaatacggatattgcttgcgccgaacttggaaatctcgtccaggaaagcagccttacgctgctgccatatcttttcgggcatcgtttcataccccatggcgtaatggaaggcgcaccagcgcaggtgctctgtacgcgccatattctcaagcaattccccttcgatcttccatccatccgtcaatagctggtttgcagtcattccagacatgcgcaacattgctaaggcaaaatctgccgccgccctgctgctcatgcggctgaaatagtcacaatgcagccagtcgtcctccatgctcttacccttgctgtaggtatggtttaggaccatagccatatgatccatgtgcccgtaggtcagcgcctccctgcaatataacggatatttttcttctttcctttcgctgatgtggtgttttacaccgttatggctgacgcagaagatcggcgcgctgcactggagatattgcagatagccgcttagcttaccttcaatctcaaggttcatctgttcgtttccggtgcatatcacaatataatttaccgaatttctattttctttaaggtatgaaaacagcgcggcgcttcgcccgtcatgaccataaaaggcaatgttatattccttcaaaagggcatggtattcaaactgcatcgctccggattgatcttcgtaacggggatcgaatatcgccagggaaaaacggctgccttcaaattgtccgttcatgacgagatggcgcaaaacggcctgccctacttctccaaatcctaatatcagcgcatttatatcatttttagcccttccgtttgcgtcaaacgagatctgctggcacggaggataatggcggatcaacattctggccgccatagtggcttcgtccaatgctaggacggaggcatatccgtatttctcatcggacgcctggagcaaagcgcctgaagcctcatctcccagcaatacaagcgaaagctgatcctgattcaccccggcctgcccggctgcatttaaaaatcgatcggcatatgcaaaattttggatgctgttttctgaaagcgcatataaaattatcttgcgttttcccggacggatccctagcctatgtaaaaaacgcacctccagtttctgctcggtatcattgaactgcattacggcgtttaactgctgaatccggcttttaaaagatattttatccggctcgtccacatagaccagaatttcatgtttttgtttggagagatcttcgccaaacgtaaggctttgctcattgatcccatacaatacggctacaggccttcgccgcagcaggagcaaccgcagtctgctcagcagacctgttccaaaggtagtaaaaacaatgcccgcgctcatcattatcgcaatgttatgcagtatccagaaaaggatacggatccaatcgctctgcataacgacggacatttcgataaattcaaattcattattgcccaggaacatgctgcatgtggcgaatacggaacgaaacagcgcaacgggaaagctcagctcgacatcataataagcgcacagataaattataaagcctgctgcgcccacgatcggaactgccacagcgagtattttttttattacacgcaaatccaccgccaggatgacaaccatcatcacaatgatcgcagccagcgtaatcatgctgaaagcatcaataaatattttcccccacctcacacaaatgaatcattcatattttatcataatccttcactaaaatgaactgaaaaacgccccagaaccaatgttctggggcgttgcaggtctgtcaaatgctctcttgggtaagcgagattagcgcttggagaactgaggcgcacgacgggcggctttgaggccgtacttcttacgctctttcatgcggctgtcacgggtcaggaagcccgcctttttcagcgccgggcgcagatccgcatccgccttgatcagggaacgggcgatgccgtgacggatcgcgccggcctggccggtcaacccaccgccgcgcacgttgaccagcacgtcaaaccggccagcggtctgcgtcaggttcagcggcgccatcaccgtcatcttcagggtttccaaaccaaaataatcgttaatatcgcgtttattgatcagcactttgccctcgccggggagcaggcgcacgcgcgcgatcgcggtcttgcgccggccggtgccgatatattgaacaatcgccatagcttttctcctctctgccctttaaatctcgagtgcctcaggcttttgcgcctgatggttatgctccgcaccctgatagatgcgcagctttttgatcatcgcgcggcccaggctgtttttgggcagcatgcctttaacggccagctgcagcgcctgctcgggcttatccgccatcaagtggcgatacgataccgctttcagcccgccgggatgctgggtgtggcggtaatagaatttctgatccagcttattgccggtaagcaccatcttgtccacattaatgacaatgacgtgatcccccgtatccacatggggcgtgaaggtgggcttatttttgccccgcaggatggaggcaacgcgggaagccacgcgcccgagcacctgaccttcagcgtcgatcacataccatttgcgttcgacattctggctgttcgccataaaagttttcacgatgaagtttccctcccaatattcttaacaaacactaaaaatggaagcctggcttccggatgctccgccgcgcgctggacattcgcttggcggaaaaaggtgtttgccacagccaacggggcgtaagccatgccaacacgcatattattttactggattgtgggcaaagtgtcaaggcgtttttacatttcccgtgcggtttgcccctggggcgggtgccagttcgcctcgtcgccggggtaaaatacccgctctaagcgcaggccctgcggcggcgcggtggggccgcctaagcggcggggcgcgccattcaggagttccagcagcatttccgggggcattttgccctgccccacgtaattaaggttgcccgcgatgatgcgcaccatgttataaagaaagccgtccccctccaccgtcagggtgacaaaatctctctctcgctgcacgtccagataggtcagcgtgcgccgggtatccttgaccgggctgcccgcggccataaaggcagcaaaatcccggtagcccagcaaaagctggccggcggcgcgcatcttatccacatccagtggccagaacacatgccagctgaagttgcgcgccagggcgctttggtgcggccggttgcagtacaggtagcggtagcgcttgccacaggccataaagcgggcgtggaagtcatcggccgccctttcggaagccaccacgcggatatcctcgggcaggcgggtgttaagcgcgaagctgaacttttcagccgggatgccgcactgcgtatcaaagtgcacgcactggcccagggcgtgcaccccggcgtccgtacggctggccccggtaacgggctgatgctccccggtgacggcccagatggcctcttccaggcgctgctgcacggccacggcgtttttctgacgctgccagcccgcatagcgggtgccatcgtattccacgatcagtttgacgcgcatggtgcctcctttctgggggatgggcggattcgtcgttttttgcgcaaaaacggctcgggcgttccggcgcccgggtgctatatctccgaggcttgtgggataaagtataagtttttatctctgtcattcagagggaggccgcaggccgagcgaagaatctcctgcaatgacagttggcaatgctgaacctgcgatgcaggggcgctttgcccccgcaatgcggtgcgaccgggccgagagggggtaaagagattcctcgccttcggctcggaatgacagtggtagggaaccatcacttgcgcgttaacgtatacttcatcgcacagttgaggcgagccccgccccccctacagaaatacccgttccagcaccagcagcgccaccagcaccgccacggcggttagggcgatataatcccgccgcgccaggtgcagcaccttcatgcgggtacggccggagccacctttatagcagcgggcctccatggccatggccagctcgtcggcgcggcggaaggcgctgacgaacagcggcaccagcagcggtaccatggccttggccctacgcaggatgttgccggattcaaagtccgcgccccgggccatctgcgccttcatgatcttatcggtctcctccagcagggtggggataaaacgcagggcgatggtcatcatcatggccagctcgtgggccgggaagtggattacctttaagggggataacaaccgctcgatgccgtcggtcagggcgatgggcgaggtagtcagcgtcaaaagcgaggccgaaagcaccagaaagatcagccgcaggctgagcatggccgccatctccagcccccggtcggtcacccttaaaaagccccattggaacagtgcgttgccctccggcgacaaaaacaggttgagcacaaacgtcaatataatgataaacagtagcggcttgacgcttttgagcatgaatttgaccggcaggcggctgacgaaaagcgccagcaggaaaaacagcagcaccgccaggtagccccaccaggtcttgaccaggaagatggccacgataaacaccatggccaccacgatcttcatgcgcgggtccattttatgcaaaggggaatccccgggataatactgtccgatggtgatatccttaatcatgccggcctcctttggcgcgcgcggcgatggcgtcggccagttcctccaggcgaaaaagcccctggggcagctcccagcccgccgcattcagcgcgtcgatcagctgggtggcctcgggcacgcccaggccccaggactccagcggcgccccgtgggagaacacctcccgcggcgtgccgctgagcaccacgctgcccgcgttcatcaccacgatgcggtccgccacccgggcgatgtcgtccatattgtgggtgaccatcaggatggtcatccccgcctcccggtgcaggctctggatcagccgcagcagctcctcccgggccgccgggtccagccccgcggtgggctcatccagcaccagcattttaggacgcatggccagcacgcccgcgatggccacccgccgcttttgcccgccggaaagctcaaaggggctgcgcgggccgtactcctccggatcgatgcccaccaggcgcagggaatctctcacccggcggtccacctcttctccgtccaggcccaggttatgggggccaaaggccacgtcctttgccaccgtttcctcaaagagctggtgctcgggatactgaaaaaccagccccaccatctggcggaccttgcgccggtccgcgtccttggcgttgatatccatcccatccaccagcacccgcccggcggtaggcttaagcaacccgtttaaatgctgtaccagggtggatttgccgcagccggtatggccgatcaggcccacaaattcgccgtcagcaatgctgagggatacatccttgagcgcgtccgcccggaagggccctccccccatataggtatgcgacaggttttgaactacgatcggcatagcgcttccaccatctcccctaccgttacagtatcgtccggcacctttacgccccgctggcgcagcaggtagcttaattccgtcattttgggcacgtccagccccagctgcttgatgcgcgccacctggcggaagatctcccggggcctgccctgcatgatgatgcggccgccctccatcaccaccacccggtcggcgttcacagcctcctccataaagtgggtgatgtgcaccacggtgatgccctgctcccggttgagcttgaccaccgtatccatgacctcggcgcggcccaccgggtccagcatggcggtaggctcgtctaaaataatgatctccggccgcatggcgatgatgcccgcgatggcgatgcgctgcttttgcccgccggatagcatgtgcggggcggactgcgccttttcggccatgcccacagcagccagtgcctcatccacacgcttgcggatcagcttgggtgccaaccctaggttttccggtccgaaggccacgtcctcctccacgatggtggccaccatctggttatccgggttctggaacaccatgcccgcgctctggcggatgggccacaggttctcgtcgtccgcggtatccatgcctttgacggtgacgctgccttctgtgggcaggtacagcccgttcatcaacttggccatggtggatttgcccgagccgttatggccgatgaccgccacgaactcgcccggcgttaccgcaagggacacgccgcgcagcgccggcagcggcggctgctcggcccggggatattcataaaatacgttttccaggcgaatgatcggttccatattctcatccttcttgtcgtttgcgggccgctgcccagcttgggctttggcgcgggggggatcgcagggcgggccgtgcggctatgccgcctgctaacgcatgaggttcttcgccttgcagactttgctcttttcatccaaaccacagggtggagcaaatggtaaggcattgccattccggtgctgcgcggcctaagacgccattggcgggcgtaataggtcgcctcacaccgaaccttggagcggtgcaaaggcgttagccctgtcattccggtgctgcgcggcccaagacgccattggcgggcgtaataggtcgcctcacaccgaaccttggagcggtgcaaaggcgttagccctgtcattccgagcagggcgaggaatctcatggcgatctattggtttggctattaccaccgctgcgcgggtaaagcatggtgcagagctatgccggagattcttcactccagggctgtcgccccttaaccgcgcatacctgtggcgctaatcccgggagcaccgcccgccttacgctgctctttttgccttgctgtgccggctgcctccgctctgaatgaaaagttataacattcatcttccctggcattccgagccgcgggccgcctaagacgccattggcgggcgtaataggtcgcctctcaccgaaccttggagcggtgcaaaggcgttagccctgtcattccgagcagggcgaggaatctcatggcgatctattggttcgactattaccaccgctgcgcgggtaaagcatggtgcagagctatgccggagattcttcgctacagcttcgcttccgctccgaatgacaggttataacatccatcttccctggcattccagtgctgcgcagcatggcgcctttaaaacggttgggcttacccggctcccgctttgcgagaataaaaaagaggctggcggttcaagcgcatttaagacgccccctccagtctctttcaaaaaggtttcccttttacatcctgcgcttagagcagctccaggatcaccatctcggcggcatcgccgcggcggggaccctttttgagcatacggacatagccgccgccctggccggactcttccttgcgcttggcgtacttgggcgccatctcaccgaacatcttctccaccaggggatgcttgatgtccgcggtgcgctccttataatcgctcttgctctctttaggctgcttggcttcctgcacatcatacacataagccatgatctgacggcgggcatgcaacttgctgggcgcatcgatcttgaactcagtgggcacggtctgccccttgtcgttcaaaacgtccttggtcaccgtcagggtattgtcatattcacggaccgccagggtgatcagcttctcggcgatcgcgcgcacctctttggcgcgggcctgcgtggtctcgatcttgccgttccacagcagggccgtcacctggttgcgcagcagcgccttgcgctggtccgccggacggttcagtttccgatatccagacatggtctacactccttacttcgttaaggctactcgtcgttcaggcgcaggctcaggcccaaaccggccagcttctgtacgacttcctccagggacttgcgccccaggttgcgcactttcatcatatcgccctcgctgcgcatcaccaattcctcaacggtattgatgcccgcacgcttgaggcagttataggaccggacggaaagatccagctcctcgatggacatctccaggatcttctcctttttgtcctcttccttctccaccatgatctctacgctgcccacgttctccgtgaggttaacaaagagcatcaggtgctcgcacaggatcttggcggcaaggctggtggcctcctcgggggagatgctgccgttggtccacagctctaaggtgagcttgtcataatcggtgatctgccccacgcgggtgttctccaccgcgtaatgcaccttgcggatgggggtaaagatggaatccaccgggatgacgccgatcggcatgttgggctgcttattgcggtcagccgaaacatagccgcggctgcgctctaaggtgatctccatgtgcagcttggcgtcctcgttcagcgttgcgatatgcaaatcgggattgaggatctccacctcgctgtcgcacacgatgtcccccgccgtcacttcgcccgcgccctgcgcgtcgatcaccaccgtcttgacctcgtcggagtggatcttggcggagatgcccttcaagttgagcaggatctcggccacgtcctcggcgacgcccggaatggtggagaactcatgcagcacgccgtcgatgcgcacggtggtaaccgccacgcccggcagcgaagagagcaggatgcggcgcagggtgttgcccagcgtcgtgccaaagccccgctccaacggttcgatgacaaacttggcgtagcgatccccgtctcctctatctacacactcgattttgggcttttctatctcgatcattggatcgccctccttgtgctaaaatcgtttaagccgccccggccaggccatgtggccggccggaaacgcagcttttgctcccacatggattacttggagtagaactcgacgatgagatgctcttcgatgctcaggtcgatatcctcgcgagtgggcagcgccacgaccttgccctccagcgtctcaaagttgacctcgacccacttggggctgggcttggaggcgccgttctcgcggatcttcttgaacagctcctgcgagcggctcttctcgcgcacggttaccacgtccccggccttgaccaggtagctggggatatccaccttgcggccatttaccaggaagtggccatgggtgaccagctggcgtacctgcgggcggctctcgccaaagcccatgcggtaagccacgttgtccaggcggcgctccaacagctggagcatgttctcaccggttacgcccttcatcttctccgccatatcaaagtagcggcggaactgaccctccatcatgccataggcacggcggaccttctgcttctcgcgcagctgcatgccatactcggacaccttgccgcggcggccctggccatgctggcccgggggggtggggcgcttattgatcgcacatttgccggaatagcagcggtcgcccttcaaaaagagcttgcagccctcgcggcggcacagccggcaaaccgattcagtatatctagccatttctgcttatttccctccttgattagcctcttctgcgcttgggcggacggcagccgttgtgcggaatgggggtcacgtctttgatcagattgatctcaagacccgccgcctgcagggaacggatggccgcttcacgtccagagccggggcccttgacgaatacctctaccgtgcgcaggccgtgctccatcgcggccttggcagccgtttcggccgccatctgcgcagcaaagggcgtgctctttttcgagccgcggaagcccaaaccgccggcgctggcccagctcaaggcgttaccggccgtatcggtaatggtaacgatggtattgttgaacgacgaggcgatatgcgccgcgccatgttcaatattctttttctcgcgacgccgacgcgtcgtcttttttactttaggcttcgccatgctaaccctccttacttcttcttacggcccgcaaccgtccgcttcgggcccttgcgcgtacgcgagttatttttcgtgttctgcccgcgtaccggtaagccacggcgatggcgaacgccacgataacatccaatctccaccagacgcttgatgttcaaggctacctcacgacgcaggtcgccctccaccttcacgttctgatcgatatattctctgagtttacctacctccgcctcggtcagatcgcggacacgggtgtccggattgataccggtagcggccagaatcgcctgcgcggtaggacggccgacgccaaaaatataggtcaggccaatttcgacccgcttttcccggggcaggtccacgccagaaattcgcgccattgacagctacacctcctgaattgattaaagggtgataaaattcctttttaaaaaacgcacgccatcatgtttgcacaggtcgtccctccccagggcatgctccaagtaagggccgcagccgccctgtgcaattgttttaacccttagccctgtttctgtttgtgtttgggattctcgcaaatgaccatcacatggcccttgcgtttgatgattttgcacttttcgcaaatcggcttaaccgacggacgcaccttcatcttccagaaacctccttaaacgaacataaaccttatgccttgccgcgccaggtaatcctgccgcgggtcaggtcatacggcgatagttccaaagtcactttgtcgccaggcaaaatccggataaagttcatccgcagcttgcccgatatatgggcgaggatcttatgtccattgctgagttccacctcaaacatcgcgttaggatatgcctccacaacggtgccttcaacctcaatgacatcttgtttggacatcggttcactcctctccgcttaccttccggttataaaaaccggctgattccaaagcactgcgcacttctgaatcgaatatacgcttatcatttaacaatttttcccgtaaactgtcaatacattcaggcttaattgccaaatgtttcagtttctttttcttgggattggccagtttgcgcatctgcccatcacataataacacataatcatcattcaaaacacttaaaatgatgaaatatttacccgcatcccttccggacttggaaaacacgatccttccgggttcgggaggtattctctccatgcgcctatctcctttgcttaaagagccgtcaaaatctcgggctcgccatcggtgatggccacggtgtgttcgtaatgggaggccagcgacccgtccgccgtgacgacggtccacccgtcggggcgcacccgcacccggtaggtgccggtggtgatcataggttcgatggcgatgaccatgcccgcctgcagccttgggcccttgccgggccggccaaagttgggcacttccgggtcctcatgcatctcccggccgatgccgtggccgcacagatcgcgcaccacgccatagccgcgggactcgcagtactgctgcacggcgtaggagatatcccccagccggtagcccaccttgcaaaacttgaccgcttcccagaagctggcttcggtcacctcgatcagcgcctgggcctccttggagaccttgcctacggggaaggtttcggcggtatcgccctgccagccctcgtagatggtgccgatatcggcggagaagatgtcgccttcctgtaaaacccgctcagaggggaacccgtgcaccacttcttcattggtggaagcgcagatcgcgtaggggaaaccctcgtaccctttaaaggaagggatcgctccgcaggagcgaatggtatcctcagcgattttttccagctccgccgtggtgacgccaggcgccacagcctggcccaccgcctggcgggccttagcggcgatcagcccggcggcgcgcatgtgagcgatctcttcccgggtcttgatctcgatcatttcgcgtcacttcccaatgcggccaggatatccgcgcgaacctcttcgacgctgcgcgcgccgtcgatatccactaagatgcccttgtccctgtaaaagtcgatcagcgcgcgcgtctgggcctcatagacctccaggcgcttgcggatcgtttcaggcttatcgtcatcccgctggatgagcaggttgccgcacacggcgcactcctcagacccatccaaagtcgtgatgtgatagctggccccgcactcagggcagacgcggcgcccgctcaagcggtcgatcaggtgatcgtgcgccacatccacatttaccgcgtaatccagcgcgaccttttcatccagcgcctctgcctggggcagcgtgcgcggaaagccgtcgagcagatagccgtttttgcagtccgccgcagcgagccggtcgttcaccagatcaagggtcagatcgtcgggcaccaggcggccttcgtcgataaacttcttggcggccacgcccaggggcgtctcattcttgatattctggcgaaagatatcgcccgtcgagatatggggaatgcccaactcccggctgataaccatggcctgggtgcctttaccggcgcccggagggcctaaaaatacgattttcatgccatactccttaggataggaagcctttgtagtggcgcatcagcatctgagactcgatctgcttggaggtctccagcgcaacggatacggtgatcagcaagctggtggaaccaaacgcgcgcatcaggctgcccatcatcgagccgccgacgctgataaagatcgagggcagcagcgccatgagcgagaggaataccgcgccaaagaagcacagccgcaccgaaacccggtgcaggtattccatcgtcggccggccagggcggatgcccgggataaagccgccgtgctgctgcaggttcttggagatctcctcagggttaaagctgatcgtattataaaaatacgagaagaacaggatcagcagcgcctggatgatcatatacacccagctgcccacgccgatatactgggtataccagacgtaaaacgggctgttgggccagaagatctggcacaggatctccgggaaggtgatgatcgccgaggcgaagatcagcggcagcacgccgccggagttcaccttcatggggatgtgggtgttctggccgccgtacatcttgcggcccaccacctttttggcgtactgcaccggcacgcggcgctgccccaaatcgacaaacaccacagcggtgatcagcgccaggatcacgaccagcatgatcggcagcacccagaaggacatctcccctacgctgatggcctggaaggcctggtagagcatgttgggcacgcgggagataatacccacgaagatcaacagcgaaatgccgttgcccacgccgttctcggtaatccgctcgccgatccacatggtcagcgcggtaccggccgtcaggctcacgccaatgacgaagtagttaaagaagctggtggaggtcaccgcgcttgaacccaagctcaggatgatacccaccgactggaccaagcccagcaccacagtgaagtagcgggtgtaggtcgcgatcttcttgcggccctcctcgccctctttgctcagccgttccagcttcggaatggccacggtgagcagctgcatgatgatcgaggcattgatgtaggggctgatacccatcgcaaagatggtgaagttcgcaagcgaaccgcccgaaataatgtcgatcaagcccagcaggttattctggcccaccacactggcgatgaattcccggttgatcccggccaccggcacgaagctaccgatccggtagatcagcagcatcaaaagcgtgtacaggatcttcttgcgcaggtccgggatcttccacgcgtttttgaaggtctcaaacacttagatcacctcggctttaccaccggcggcttcgatcttctgctgcgccgactgggtgaacttcgcggcctgcaccgtgactttcacggtcagctcgccattgcccaaaatcttaacgccatcataggcctttttgatcagccctttgttgatcagtgcctgcgcatcgatggtagcgccatcctcaaacgcattgaggtcacaaagcttaacttcggcatacaccttggagaacgggttgtagaagccccgtttgggcaggcgccgtgccaggggcatctggccgccctcaaagcccgggcggacgccgccgccagagcgggcccactggcctttatggcccttaccggaagttttacctaaacccgacccggtgccgcggcccaaacgtttggggccgcgagaggcgccgagcgccggctttaactcatgggttttcatgggtcaaaccctccttctaaagaaattagtcagcaatctcttcgacagataccagatgtttgaccttgaaaacctgaccgcgtacggcgggaatgtcttcgcggataacctggctgcgaatctttttcaaccccagcgcttcaacggtagccttctgatctttcagggcgccgatggtggaacgcacaagggtaatcttcaatttgctcatgaacttttcctcctaacccagcacttcctcgacggtcttgccgcgcagacgggccacatcttcaaccgtcttaagctcggccaggccggcgatggcagccttgacgcagttggcggggttattcgagccgtaggatttggtccggatatccttgataccggccatctccaataccgcacgcacggggccgccggcgataacaccggtaccttcttcagcaggcagcaggagcacctggcccttgctgaacttgcccaccacgcgatgggggatgctggtgcccaccatcgggacggtgatgaggtgctttttcgcatcctcggtgcccttgcggatggcctcgggaatctcggtggctttacccatcccgacgcccacgtggccggcgccgtcgcccaccacgatcagggcgctgaagcggaagttacgcccgccctttaccaccttggcgacgcggttgaccgctaccagcttttcctgtaaatccagagtattcggatcaatacgctgcatggatgttcctccttctaaaattccaggccgccttcgcgggccccggcggcaacctcggccacacggccggtgtacaggtacccgccacggtcgaacaccacggtcttgatccccttttcaagggccttctccgcggcgatcttaccaaccagatgggaagcctcgctcttggtcatctctgctgcctgctcgcggacggatttgtccagcgtggaggcggcgaccagggtattgccggcaacgtcgtcgatcagctgcacatagatgttgttcaggctgcggtaaacgttcagacgcgggcaatccgccgttccgttgatctttttgcgcacgcgatagtggcgcaccctgcggatcgcatttttatcggttttcttaatcatcggtgcctcctcctttcttacttcttaccggtcttgccttccttacggcgcacgacctcggtctcatacttgatgcccttgcctaagtaaggctccggcttgcgaatctcgcggatgttgtgggcgatggagccgaccagctgcttgtcgatgcccttgaccacgatcttgttcggggtcggcacctccagctcgataccgggaatctcctccacctcgacggggtgggaatagcccacggtcagcaccacttttttgccctgcttctgagcgcggtagccaacgcctacgatatccaggcccttggcgtacccctcagtcacgcccacgaccatgttattgatcagcgagcggctaaggccgtgcagcgcacggtggttcttatcgtcgctggggcggcgcacgttgatcacgccatcctccaaagcgacggtgatatcctgatgaattttctgcttaagctcccctttggggcccttgacggtgaccacgttttccgcatcaacagaaacgtttacgccgccgggaaccgcgatagggagacgcccaatcctcgacatacctacacctccaaaatatcgcgcttaccagacataggccagcacttcgccgcctacgcccgctttacgcgcctgcttgtcggtcatcacgccctgggacgtggagatgatcgcgatacccaggccgccgaggaccttgggaagctcgtctttaccggcatacacgcgcaggccaggacggctgatgcgcttgagaccggcgacgactttttccttgttgggaccgtatttgagtacgatcttcagcgtggatttggggccttccgtaaccacattgaagctgcggataaaaccttcgtccaacaaaatctgcgcgattgccaccttcatcttggaagagggcatttcgacagcatcatgtttagcgatctgtgcgttgcggatacgggtcaacagatccgcaataggatcggttactaccatgagacgacctcctttcttttacccgggattaccagctggctttgcgcacgcccgggatctgacccttgtaggccagattgcggaagcaaatgcggcagatgccatacttgcgaagaacagagtgcggccggccgcaaatgcggcagcgggtgtacgcccgggtagagaacttagcgggccgctgctgtttattgatcatgcttttctttgccattgaaagcttcctccttacttactgcgcaaagggcatgcccatgagcttcagcagctccagcgcctcttcgtcagttttggccgtggtgacaaagatgatatccataccgcggacggattcgaccttgtcgtactcgatctccgggaagatcagctgctcgcggatgcccatggcgtagttgccgcgcccgtcgaaggacttggcggagatgccgcggaagtcgcgcacgcggggcagcgcgatgctgatcagcttatcggcaaagtagaacatcttatcggcacgcagggtaaccttggcgcccacgttcatgccggcgcgcagcttaaagtttgccaccgactttttcgcctgggtgatcacgggcttctggccggcgatgatgcctaaatcgcgcaccgcggcctccagggccttggaattatccttggtatcgcccagacccatgttaatgacgatcttctccagtttgggaatctcgttcacgtttttgtatccaaatttctgctgcaatgccggagcgacctctttgaggtatttctccctcagccggggcattgccatttcggtatttgccacgtattttccctccctttatgcgctatttcgcgaacgtttcgccgcacttcttgcaaacgcggaccttcgtaccgtcggccaaggtctgtttggaaatacgggtgggctttttgcacttgtcgcaatagagcatcactttggacgcgtaaatcgcgccctcacgctcgatgcggccgccctgctcgctggcgttacggggacgcacatggcgggtgaccatgttcacgccttcgacgacgatcttgccctcgcggggcagcgccgactggactttgccgaccttgccggcgtccttgccggagatgaccatgaccgtatcaccctgtttgacatgcaatttcttaggcagagacactttcacgccacctccttacagtacttcaggcgctaaagacacgatcttcatataatcgcgctcgcgcagttcacgcgccacaggcccgaagatacgggtcccacggggctgtttctggtcgttgatgatgacggcggcattatcgtcaaagcggatataggtgccgtcgttccggtgcgagccggatttgctgcggacgataacggccttgacgacgtcgccctttttcacaacgccgccgggcgttgcggtcttaacagaagccacaatggtatcaccgatgttgcccgtacggcggaaggagccacccagcacgcgaatgcacatgatctccttagcaccggtgttatcggctactttcagccgggtttgaggctgaatcataacgcttaacctcctctaaattacgcacgctaagccgcgttatttcgctttctcgatgatctcaaccaggcgccaatgcttttcacgggaaagcgggcgggtctccatcacgcggacgcgatcgccgacgttgcattcgttattctcatcgtgtgccttgagcttggtggtcttattcacggtcttgccgtaaaggggatgcttcaccttggtcttcatggcgacaacgatcgtcttatccatcttattgctaaccacctggcccacacgggtcttgcggttgcctcgaatttcgctcatctagctactcctcctttcaagcttacgctttggccttgagctcacgctcgcgcaggatcgtcttggcgcgggcgatattgcggcggcactcgcggatcgacttgggattttgcagctgaccggtggccgcctggaagcgaagattgaacagctcgttcttgagttcgtctacctgcgtgctcagctccccagtcgtcatatcgtggaacttattcgctttcattgacttcaccaccctgaacgttttcgcgtttgataaacttggtcttaagcggcagtttgtgtgcggcaaggcgcagggcctcgcgggccacttcctcggaaacgcccttcatctcaaacaggacgcggccgggtttgacaaccgctacccaatactccggagaacctttaccggaacccattcgggtctcggcgggcttggccgttaccggcttatccgggaagatcttgatccagatctgtccgccacggcggatgtaacgggtcatggcgatacgggcggcctcgatctggttgctggtcacccagctgggctcggtggcctgaatgccgaaatcgccgtaagccaggaaattaccgcggctggcctggcccttcatgcggccacgaaatacgcggcgatgtttaactcttttgggcatcaacattttaagctttacccccttgcgcattgggttttacggcctttttggcgggcaggacctcgcctttgtagatccagaccttgacgccgatgcggccgtaggtggtcttcgcctcggcgaacccatagtcgatatccgcacgcagggtctgcagcggcacagagccgtcatgatacccctcggagcgggcgatatccgcaccgcccaggcggccggaaaccttggtcttgatacccttcgcgccggctttcatggcgcggcccagcgtggacttcatcgcccggcggaaggagatgcggcgctcgagctgggcggcgatattctcagccaccagctgggcatccgtatccggatttttaacttcaacaatattcaggtgcacgggcttgccgatgtacttctcaacagccttgcgggtggcgtccacgccggagccgccgcggccgatgatgataccgggctttgccgtatagatgttggcgctgatcttggtggcagcgcgctcgatctcgatcttggagataccggccgcgaacaggcgctctttcaagaactcgcgcagcttgtaatcttcaatcaggttatcggcaaacttcttgctgtcggcgaaccaccgggtatcccagtttttgatgacgccgacgcgcaagccgtgcggatgaactttctgacccatcgttttgcctccttactgcttctgatccaggatgatggtgacgtggctggtgcgcttgcggatgcggtacgcacgaccctgcgcgcgcgggcgataacgcttgagcgtcgggccctgatcggcaaacacctcggcgacgtacaacccttcggcatccatgttcaggttgttctccgcgtttgcgatggcgcttttgagcagcttctccaccaccggggacgcagccttgggcgtaaaggccaggatggccagggcgtccgagaccgattttccacggatcaaatcgataacagccttaaccttgcgggcggagatgcgcacgtaacgtgccttagcgtgaggacgcttgtctttattctcgcgacgcttggcggctttttccctctgtctggtagccatttatactctccctccccgcttatctcgaacccgaggacttttcaccggcatggccgcggtaggtcctggtgggcgcgaactcaccaaatttgtgaccgaccatctcttcggtaacgtataccggcacatgcttgcgtccatcgtgaacggcgaccgtgtgcccgacgaagtccgggaagatcgtagaagcccgggaccaggtcttgagcacttttttctcattattggcgttcatttcctgaacgcgcttgagcagcttaacgctaatataaggtccttttttaaccgacctagacatgctgctttgcctcctttcgactattcaaaagccttagccgcgacgcttgacgatgtacttatcgctggccttgttcttcttgcgggtcttgtaacccagcgcaggcttaccccagggcgttacagggctgggcatacccacgggggacttgccctcgccaccgccgtgcgggtggtctaccgggttcatgacgacaccgcgaacagtcgggcgccaacccatgtggcgcttgcggccggccttacccagattgacgttctcatagtcaatgttggagacctggccgatggtcgcgcggcagttgatggacacgcgccgcatttccccggaggggagacggatcgtggcaaaggcgccttccttagccatcagctgagcggaaacgccggccgagcgcaccatctggccgcccttgccggggaccagctcgatgttgtggatcatggtgcccagcggcatatccttcatttccatggcgttgccgggcttgatgtccacattcgcgccggaagcgatggtgtcgcccaccttgacgcccacaggggccaggatgtaacgcttctcgccatcggcatagttgagcagggcgatgaacgccgagcggttgggatcgtactcgatggtggcaaccttggcggggatcccgtccttgttgcgcttaaaatcgatgatacggtatttgcgcttgttgccgccgccacgatgacgaacggtgatgcgaccgaaattgttgcggccgcccgtcgacttcaggctggtcagcagcgacttctccggcgtattggtcgtgatctcctcgtaggtggagaccgtcatcccgcgccgggcaggcgaagtcggcttatactttttaatcgccataattcttgcctcctaaatgcggattactgggccataccctcaaagaactcgatgggcttggagtcctctttcaaagtgacgtaagcctttttggtggcaggcttgcggcccacgatgttgccacggcgggtgagcttgccttcgttattcatggtattgaccttggcgaccttgacgccgaagatggcttcaatggccagtttgatctcagtcttgttggaatccggagcgacgatgaaggtatagcgcttatcgctaaagccgtcgtagctcttctcggtcaaaaccgggcggatgaccacatcataagggcttctcattaagcgtacacctcctcgatcttggtcagcgtggctttatcggccaccagctggtccgcattcatcagatccaaaacgttcaaggtgttgacgaacaacagcttgacacccgggatgttgcgggccgcgcgctcgatggtctcgttcttgtcgctgagcaccagcaccacctttttggcggctttgatgttctccagaaccttggccatctcgcgggtcttggcctcgggcagctccagcgcgtccagcgccaaaagcgaaccctcagacactttattggaaagcgcgcacttcattgccaggcggcgcaccttcttattgacactcaaggtataatcccggggcttcggggcgaaaaccacgccgccatgccgccactggggcgagcgggtggaaccctgacgggcacggcccgttcccttctgacgccacggcttgatgccgccgcccgccacttcgctgcgggtgagcgtgctctgcgtgccctggcgcttgttggccagctgcgccacgatgacctggtgaaccacaggctcgttcatggcttggccaaagaccgcttcggacagctccatctcgccggccgaggcgccctgcatattcaataacgcaattttaggcatatgggtgaatcctcctttccgaaacggtcctacgctttaatggactcgcggatctcgagcagcgtgcctttggggccgggcagcgcgcccttgaccagcagcaggttgcgctcgccatccacgcgggcgatggccaggttctggatggtcacgcgctcgtggccgtactggccgcccatgtgcttgcccttaaaggtcttggacgggctggaagtcgcgcccaaggaaccggggccgcggtgatacttggaaccgtgggccatggggccgcgggactggttccaacgctggatggggccggtaaagccgcgtccacgggtcagaccggaaacatccacgctgtcgccctgctcaaagatgcttacgtcgatggtagcgcccacctcgtaatcatcgcagttttccaggcggaactcgcgaaggtaacgcttgacctgcgcgccgctcttggcataatgccctttaacgggcttattgaccagcttttcacggatgtcgccaaagctcagctgcagggcagcatagccatcggtctcctccgtttttttctgcacgacggtgcaggggccggccaggaccacggtcacggggaccacggtgccgttttcttcaaaaatctgggtcatacccagctttttgccgagaattgcctttttcatctcttctccacctcctgatacgccgttacagtttgatctcaatatccaccccggcgggcaggtccagccgcatcagcgaatcgaccgtacgcgaagaggtgttaaagatgtcaatcaaccgcttgtaggtacgcatttcgaactgctcgcgcgagtccttatacttatgcgtggcccgcagtacggtgatgatctctttttcagtaggcagcggaatcgggccggaaacgacagcgcccgtgcgctgggccgtatccacaatgcgccccgctgaactgtcgaccaggttatggtcgtaggattttaacttaatccggattttttggctcgccatggaacttcctccttaacaatacgttctcaaatacactgggccgtgtgtgcccttcttaacaggcgcaaaacgcccgcactgcatttaagcccgccgtccgattagcggacatggtccatggaaattacccgggtcggtgcccggcaacctcccacttcatcccattaataacagcaactcacacagtatacaatgaaaaccttgaaaaatcaactgctttcttgatatacccaaagaaatatagacaaggctttgggggccttgcggccccctgccctatcccgggtcaccctttagagggtggcaaaccgtttttaattattcaataatggaagccacaacaccggaagctaccgtgcggccaccctcgcggatagcaaaacgcagcccctcttcgatggcgatcggcgtgatcagtttcacttccatctgtacgttgtccccaggcattaccatctccacgccttccggcagcgtgataacacccgtcacgtccgtcgtacggaagtagaactgcggacgatatccattgaagaacggcgtatgacgcccgccctcttccttcgtcagcacgtatacctcgcctttgtagtgcgtgtgcggatgaatcgaatccggcttggacagtacctgcccgcgctcgatctcgttacgctgcacgccgcgcagcagcacgccgatgttgtctcccgctaccgcctgatccagcagcttgcggaacatctctacgcccgttacgaccgtggaacgcttctcgtccgtcagaccgacgatctccaccgtatcctgcacctttaccgttccgcgctctacacggcccgtggccacagtgccgcgccccgtgatcgagaacacgtcctctacaggcatcaggaacggctgatccaccgcgcgctccggctcggggatgtagctgtctaccgcgtccatcagctcgaaaatgcacttgcaatccggctcctccgctacgttggaagagctctgcgccgcttccaaagccttcagcgcagatccacggatgatcggcgtatcgtcgccggggaagctatactcgttgagcagctcccggatctccatctctaccagctccagcagctcctcgtcgtctaccatatcgcacttgttcatgaacaccagcacgtacggcacgcctacctgacgggccagcaggatgtgctcgcgcgtctgcggcatcgggccgtccgccgcgcttaccaccaggatcgctccgtccatctgcgccgcgcccgtgatcatgttctttacatagtcagcgtgtcccgggcagtccacgtgcgcatagtgccgcgtcgccgtctcatactccacgtgcgccgtgttgatcgtgatcccgcgctctttctcttccggcgccttatcgatcgcatcgtaagccatcgcctcggcctgccccatcttcgacagcgtcgtggtgatcgccgccgtcagcgtggtcttgccgtggtctacgtggccgatcgtgccaatgtttacgtgcggtttcgtccgctcaaatttagccttagccatttgatcttttcctccttaattcctcaaaatggagagggattatttcttcgttactttttccgcgatggacttgggcacttccgcatagtggtcaaactgcatggtgtgcgtgccgcggccctgggtgcggctacgcaggtccgtcgcgtaaccgaacatctcgctcagcggcacgaaggcgcggatcacctgggagcccgcacgggcttccataccctcgatcataccgcggcgggagttcaagttgccgataacatcgcccatgtaatcctcgggcacgacgacctctacggccatcatgggctcgagcagcaccggattcgccttggccattgcctctttaaaggccatggaaccggcgatcttaaacgccatttcggaagagtcgacctcgtggtaggaaccatccaccaggcgaaccttgaagtccaccacctcgtagccggccagcgtgccgctcttggcagcttcctggatgccctcgtccacaggggcgatgtattccttgggaatgacgccgccgatgatcttattctcgaaactatacccttcacccggctcggccggctccatctcgatgacgcagtggccgtactggccgcggccaccggactggcggacgtagcgcccctcggcgcgcacggccttgcggatggtctcgcggtaggcgacctggggcgcgcccacggtgcactctaccttgtactcgcgcatcatccggtcaacgataacctccagatgcagctcgcccatgccctcgatgatggtctggccggtctcctcgtccgtatgggtacggaaggtgggatcctcttcagccaggcggatcagcgccatggtcatcttatcctggccggccttggtcttgggctcgatggctaccgagataaccggctccgggaagaccatggactccagaacgatgggattattctcgtcgcacagcgtatcgcccgtggaggtatccttcaggcccaccatggcggcgatgtcgccagcgcgcacctcctggatctcctcgcggtgattggcgtgcatccgcaggatgcggcctacgcgctcgcgcttgcccttgacggggttataaacgtaactgccgctggtcagcgtaccggaatagacccggaagaaggccagccgccctacgaaggggtccgccatgatcttaaaggccagggcggcaaagggagcatcgtcgctggaaggacgggtgagctccacgctctcgtcgcccggctcggtaccctgtacatcgggcacgtccaccggagagggcatgaaatccactacagcgtccagcaggggctgtacgcccttgttacggtaagcggtaccgcagcataccggcacgatctcgttggcgatggtggccgcgcgcagggcttttttaagctcgggcacggtgatctcctcgccctccaggtatttcatcatcagctcttcgtcggtctcggcgatggcctcgatcatagcctggcggtattcctcggccttctccttcatatcgtcggggatctccacggtatcggagaccttaccgtcgtcgttatgataaataatggcctggttctccatcaggtcgatcaggcccacgaaggaatcctcatagccgatgggcagctggatgggcaccgcgttggcctgcaagcggtccttcatcatgtccaccacgcggtagaaatccgcacccatgatgtccatcttgttgacgaaggcgatgcggggcacgccgtaggtggacgcctggcgccacacggtctcgctctgcggctcgacgccgcccttggcgcagaaaaccgccacggcgccgtccaggacacggagagagcgctccacctctacggtgaagtctacgtgacccggagtgtcgataatgttgatctggatccctttccactgagcggtcgtcgcggccgacgtaatggtgataccgcgctcttgctcctgctccatccagtccatcgtggcagagccctcatgggtctcgccgatcttatgcacccggccggtgtagtacaaaatgcgctcggtggtggtggtcttaccggcgtcgatatgagccatgatgccgatattacgcaccttctctaaaggaaattctctaggcacgtccgctcctcctttcttttacaatcgcattgtgcccgcaaagcaaagcggcgggcagcgtagtcttactcgtcaaaatcttaaccccttacaaacagattaccaccggtaatgggcaaacgccttgttggcctccgccatacggtgcgtatcctcgcggcgcttcacggccgcgccggtgccgttagccgcatccatgatctcggcggccaggcgctcatgcatggtcttttcgccgcgcttgcgggaaaactccaccagccaccgaagacccaaggtctggcggcgctccggacgcacctcgatcggcacctgatagttggaaccgcccacgcgccgggctttgacctccagcatgggcataatgttattcatggcctgctcgaacacctcattggggtcctggccggtgcgctcacggatgagctcaaatgcatcgtagcaaatgcgctgggcaaccccgcgcttgccgtcgagcatgacgttattgatcagtttggtgatgaccacgttcccgtaaatgggatcgggcagcacttcacgtttgggtataaaaccacgtcgaggcatttcttcccctcctttacttgtacttcaaatcgtccgcttcaataagcatgacgcattccggccgggtcttgctccctgccggaggttccaaaaaaccagtccgccacccttttagaaaaagcgcaacccccctgccgaagccgttccaaaccccgacaggcggtctccccctaaaaaagcggtttcaggtcgttttttacttcttcggacgcttggcgccgtacaagctgcgggcctgcatacggccggctacgccagcggtatcaagagccccacggatgatgtggtaacgcacaccaggcaggtcgcgtacgcggccgccgcggatcagcactacgctatgctcctgcagattgtggccaatacccggaatgtagaccgtaccttcttccatgttggtcaggcgtacacgggcaatcttacgcagcgcagagttcggctttttaggcgtcatcgtacgcacgctcaggcacacgccgcgcttttgcgggcaacccttgaggatcggagccgtggtcttgtattccatcttttgacggcctttgcggatcaactgattaatggtaggcataaggcacctcctttcggtactcggttcaaagttgaatctatgaaatcccccgcaaccctcgggggtttcaagctaatttttgtggatgaccaccaccgcggcgcccacgtcgatgccgcaggcacggcccagctgggccatggtcgcgctctcatccaccgtcaagccgttttccgcgcacacctgcaataagccgcgccggaaatgctcgtccgcatccggggcaaggtagaccttggcggcctgcccggcctcgatggcgcgcagggcctgtttgcggccgactgatcgcccgggagccgatgtaacatcttccaacattttaccttctaaacgctccttcatcgcaaaaaatgcacacaaaacagcacgatgaatattataagccgtaaaagcggggtttgtcaacgttttcctcatcaaacctttggggatggccatttatgtttcctgcagcgccgctttggactaaagccgcaggcccccccctttgcggcagtgcttttgccgggctgtggcctccgctcggaatgacaattaaatgaacgttaaggtatactttcccacgcgggttatcatttctcattctgtcattccgagcgcaggcgaggaatctccttacgccctgttggccctgcctgcaccgcgcagccgcaggtcgagcgccgctttcccgcccatgcacgagattcttcgctcggccttacggcctccctctgaatgacagggctatcgcccttttagccgctcctgaatttctgcattcccttaagctcttacccgtcatagtctttgttccgtttcccggctccgctcccggactatcgcccttttagccgctcctggcttcctatgtttccttaagttcttacccgctataaactagccgtcctctcttctgaatgacaatagagcgagtaataaagtgtactttcccttcactataacgctaggcgctctccccgacagcggcacagcccgccggctttggggcgctatagctgcgccccgcgcagcgcctgatcccgcgctgatcgccctaggacacgccattcccctaaaaagggagcgccccacgggaaagattgcccgcgaagcgccctttttataccatctttggcagtttttttattgccctgaacctagaccccgatgaccggctcggtggacttgatctcaatatccttataccgcttcatgcccgtaccggcggggatgagcttgccgatgatgacgttctcgttcaggcccaccaggggatcgacccgacccttgatggccgcatcggtcagcgcgcgggtggtttcctggaaggcggccgccgacaggaaggaatccgtagccagcgtggccttggtgatgcccagcagcacgcgcttggcggtggcgggcatgccgtcttgcaggatgaccttctcgttctccttttcaaacttgaagatgtccaccaaggcgttgggcagcagctccgtatcgcccgcgtccgagatcttgaccttgcgcagcatctggcgaatgatcacctcgatatgcttatcgctgatagccacgccctggaggcggtaaacgatctgcacctctttaagcaggtaagcgcgcacgcccttgacgcccttgatcttgaggatatcgtgggggttgatggagccctcggtcagctcgtcgccggcctcgatctcctgcccctcgatcaccttgatgcggctgccgtaggggatggcgtaggtcttggcctcgcccttgtcgctggtgacggtgatctcccgctttttcttgttctcgcccagggagacaatgcctgaaatctcgctgatgatggccaagcccttgggcttgcgggcctcaaacaactcctctacgcggggaagaccctgggtaatatcgtcgccggctacgccgccggtatggaaggtacgcatcgtcaactgcgtgcccggctcgccgatcgcctgggcggcgatgatgcccacggcctcgccgatatccacaggcttgccggtggccaggttcatgccgtagcacttggcgcacacgccgtgctcggcccggcaggtgaagaccgagcggatctgcacctggcggatgcccgcctccacgatccggtgggccatttcatggtcgatcatctcattggcgtggacgatgacctctcccgttttaggatcggtgatctcatccaccgagacgcggcccagaatcctgtcgtgcagcggctcgatgcactctttgccgttggtcacatcgcttacccatacgcccgagatcttctcgcccaggttatggaagcaatcctcctcgcggatgatgacgtcctgcgccacgttgaccaggcgccgggtcaggtaacccgagtccgccgtacgcagagcggtatcggccaggcccttgcgggtaccgtgggtggagatgaagaactccagcaccgagaggccctcgcggaagttggaacggatgggcagctcgatgatccggcccgaggggtcggccatcaggccgcgcatgcccgccagctggcggatctggttcatggaaccacgggcgccggaatccgccatcatggtgatggggttgaactcgctcatggtctttttcagcgcggcggttacctgatcggtggtctgggtccagatatccaccacgcgggtatagcgctcttcttcagagatctggccgcggcggtactgccgctccaccttgagcaccgaggcctcggccgcctccaggtattcggccttttcaggcggtacctgtacgtcgcccatgcctacggtgatggccgcgcgggtggcgtacttaaagcccatggccttgatgtcgtccagcatctgggcggtacgggtggtgccgtgcacgcggaagcagttatccacgatctgccccagctccttacggcctaccttgccgtcgatctccagcttaaaggcgctgtccggctcgctgcggtccacaaagcccagatcctgcggaatggcctggttgaagatcaaccggccaacggtggtgtcgatgatcttggtctttttctccccgtcgatctcgcgggtgatacgcaccttgatctgcgcctgcaggctcagctcgcccacgctgtaggccagcacggcctcgtcgaaatcgcgaaagatcttgccctcgcccttggcgcccttgcggataatggttaggtaatagcagccgataaccatatcctgcgtggggctgaccacgggcttgccatcctgaggtttcaaaatattattggccgaaagcatcataaaccgggcctcggcctgggcctccaccgaaaggggtacgtgcacggccatctggtcgccgtcaaagtcggcgttgtaggcggtacacaccagcgggtggatcttcagcgcccggccctccaccagcaccggctcaaaggcctggatgcccaggcggtgcagcgtgggcgcgcggttgagcagcacgggatggtctttaatgacctcctcgagcacgtcccagacctcggggcgcacccgctcgaccatgcgcttggcactcttaatattgtgagaatggttctcctgaaccagctttttcatgacaaagggcttgaacagctccagggtcatctccttgggcaggccgcactggtagagcttcagctccgggccgaccacgataaccgaacggccggagtagtccacgcgcttgcccagcaggttctggcggaaacgcccctgcttgccgcgcagcatatcgctcagggatttgagcggccggttgccagggccggtgaccgggcggccgcgccggccgttatcgatcagtgcgtccacggcctcttgcagcatgcgcttttcgttgcgcacgatgatatccggggcgttgagctccaaaagccgctttaagcggttgttgcggttgaccacgcgccggtacaggtcgtttaagtcgctggtggcaaagcgtccgccgtccagctgcaccatgggccgaatctccggcgggatgaccgggaccacgtccaggatcatccagctgggcttgttatggctctggtggaaggcctcggccacctccaggcgcttgacggcgcgcagccgcttttgcccggtggcgtttgcgatctcggcgcgcagctcctcgaccatcttgggcaggtcaatctcctcgagcagcaccttgacggcctcggcgcccatggcggccttaaagctgtccgccccgtactgatcctgcgcctcgcggtattccttatcggtgagcagctgctttttgatcagcggcgtctcgcccgggtccagcaccacgaaggaggcaaagtagagcaccttttccagcgcccgggggctcatatccagcagcaggcccatccgggaggggatgcctttaaagtaccagatgtgggatacgggcgcggccagctcgatgtggcccatgcgctcgcgccggaccttggcccgggtgacctctaccccgcacttatcgcagatcacgcccttgtagcgcacgcgcttgtacttgccgcagtggcactcccagtccttctgggggccgaagatgcgctcgcagaacaggccgtcccgctcgggctttagggtgcggtagttgatggtctccggctttttcacctcgccgtaagaccactcgcgaatctgctcggagctggccagattgatctgaatggaatcaaaattgttcagttcgttttgcaaggggacactctcccttctattaagcctatgggaaacggggaagcagggccaaggttacaccagaccgtctgtctcctcgtcgtcatccagcagtgcgtcgtcagtatcgatgccctggatatcgtccagatcgaagtcgtcaaagtcgacctcttcctccagctcctcatcgggcaccgcagcggcggccgcgggggcggtgtattcatcctcgcccggggcggcgggctcgtcaccctcgatgttgacctccagacggctggggatatcgtcctcgtcgtcctcgatctcgcggatctggatctcctggtggttctcgccatacacgcgcacatccagcgccagggactggagctccttcatcaaaaccttgaaggattccggcacgccgggctcggggatgttctcgcccttgacgatagcctcataggtgcgcacgcgcccggtgacatcgtcactcttgaccgtcaggatctcctgcagggtatgggccgcgccgtaagcctccagcgcccaaacctccatctcgccaaagcgctggccgccgaactgggccttgccgcccagcggctgctgggtgaccagggagtacgggccggtggagcgggcgtggatcttatcgtccaccaggtgcagcagtttaaggatgtacatatagcccacggtcacccggttctcaaagggttcgccggtgcggccgtcgtaaagcacggtcttgccgtcgggcgagaggccgctctgctcgagcagctccatgatctcctcttccgaggcgccgtcaaataccggggtggccatgtgccagccgttggccttggccgccaaccccaggtgcacttccagcacctggccgatgttcattcggctgggcacgcccatggggtttagcacgatgtccagcggcgtgccatccggcaggaagggcatatcctcctcgggcaggatgcgcgagataacgcccttgttgccatggcggccagccatcttatccccaacagagatcttgcggcgctgggcgatgtacacccgcaccagctggttgaccccgggggaaagctcgtcccggctctcccggttgaataccttgacatctacgataatgccgccctcgccgtggggcacgcgcagggaggtatcccgcacctcgcgcgccttttcgccaaagatggcgcgcagcagccgctcttccgcggtcagctcggtctcgcccttgggggtgaccttgcctaccagaatatcgccggcgtgcacctccgcgccgatgcggatgatgccccggtcgtccaggtcgcgcagggcgtcctcgcccacgttggggatgtcccgggtgatctcttcgggccccagcttggtatcccgcgcctcggactcgtactcctcgatatggatggaggtgaacacgtcgtctttgaccaggcgctcggagatcaaaatcgcgtcctcgtagttatacccctcccagggcataaaggcgatgagcatgttgcggcccagcgcgatctcgccctgatcggtggaaggcccgtcggcgatgacctggcccttttccacccggtccccggccttgaccaccgggcgctggttgatgcaggtgccctggttactacgcacgaacttctgcagccggtacacgtgctgctggccgttatcatcggtaatgacgatatggcgggccgaagatttggtgaccacgccgctctcccgggcgatgagcaccaccccggagtcatacgcggctttatattccatgcccgtgcccacaaagggagcctcgggccgcagcagcggcacggcctggcgctgcatgttgcagcccatcagcgcccgctgcgcgtcgtcgttttcgaggaaggggatcatggccgcggccaccgataccacctgacgggggcttacgtccataaagtccaccgcgtcgcggttggtctcgatgatctcatcgcgcacgcggatcatgacgcgctcgtgagcgaaatagccgttctcgtccaactcctcgttggcctgggcgacgacaaattcgtcctcctcgtcggcggtcaggtacaccacctggtcggtaacgcgcttgcccaccttatccaccacccggtagggggattctacaaacccgtactgattgacccgggcataggtggccagcgagccgatcagtccgatgttgggaccttcaggcgtctcgatggggcacatgcgcccgtagtgggagtagtgcacgtcgcgcacgtcgaaagaggcgcgctcccggttcagtccgccggggcccagggccgaaaggcggcgcttatgggtcagctcagccatggggttggtctggtccataaactggctcagctgcgaggagccgaagaactccttgatggccgaagacaccgggcggatgttgatcagcgcctggggatccacgcccgtggaggtatcctgcagggccatgcgctcgcgcaccacgcgctctaagcggcttaagccgatgcgaatctggttttgcagcagctcccctaccgagcgcaggcgtcggttgcccaggtggtccacatcgtccgtggtgccgatgccatagcttaagccgatggcatagctgaccgaggcgatgatgtcgtccacataaatgtgtttggggatcagcttatcgtggttggccttcagctgcgcgcgcaactcatccacatcccctgcggcggcctcgatgatctcgcacagggtgggatagtgcaccttctctttgaggttggcctccagcggatcaaagggcaaaaagccggacgcatccacaaagttattggagatcaccttcagggccttgccctgtacggaaagggtgacctcattgaccggagacttttcgatctccatggccttttcgcgggaaatggtctcccccgcggccaccagcacctcgccggtagcaggatggatcacatcggccccggcgatctgcccggaaatgcgccgggagatggccagttttttattgaatttatagcggcccacccgtgctaagtcatagcgcttggggtcaaagaacagggcgcgcaaaaggctggtggcgctctccaccgtggggggctcgccggggcgcagcctgcggtagatctcaagcaatccttcctcgcggctcttggcgctgtcccgctcgatggtggcgctcaagcgctcatcctcgcccagcagctcgacgatctgcgcatcggtcccatagccgatggcgcgcagcagcaccgtcagcggcagcttgcgggtccggtcgatccgcacccacatcacgtcgttagaatcggtctcatactccagccaggcgccccggttggggatgaccgtggccgagtacaggtatttgccggtcttgtcgatggcgtcgtgaaaatacacgccaggggagcggaccagctggctgaccaccacgcgctcggccccgttgatgatgaaggtgccgtgctcggtcatcagcgggaaatcgcccataaagacttcgcgctggatgatatcctgcgtttccttattcaaaagacggaccgttaccttgagcggcgcggaataggtaacatcccgctccttgcactcttccaccgtatacttgggcgcctcgtccaaggaataatcggtgaattcgagcaccaggttctcattgtaatcggtgattggagaaacgtcggcaagtacctcgcgcaggtcctcctccagaaaccgtttgtaagagttcttttgcacctcgatcagatcgggcatgtccagaaccgctttggtctccgaaaaggatttgcgcgtacgcttacccatctgtacgtcgtacatggtggctcatctcctctcgtaaaatggcaatacggattcaggcacggtctcccccccttttttcaaaggggactaccggcttcatccgttttcttccaaccctatttttcccagaaattgggtttttgataccgtggtgaaaagcagcaaatgcttttgcggcctcctcctgccttatggtgcgtcggcctaaaaaggcgcacaccggggcgaattataattataatccaccaaacgaactgttgtcaacaaaatatcaaatatattatgatattttttcctccttgtcaatgggataacttaaattttaacgccgcaggcggcatttttctttaaaatgttcggggtcgccggccgcgcaaaaagcgggacggagggcaaaggccggccaagtgggtgtaaagagattccccgcctacggctcggaatgacaaagtggtaaagctcttggcgggcgaaaatacagcgcaaccaacaaatgccggagcggttaaaggggcgaaagcccgagagcgcagctgataaacggagcaaagcccttagcgggcaaaggcatttgataaccgcaaaaataaaagcagtcaaaaggggcacaagccctgtcagtcagagcgaggcgaaagccgagcgaagaatctcgtgcgttggcagttggcagcgcataagccatgagtcgcacagcactccctccgtcaggctgcgcctgccacctccctcaacgagggaggcaaggaaaacgcggatggctaaagctgctctggtgcgggcagttgacctgtgcgataacgacactgttccgccaagtggttgtaaagagattcctcgcctacggctcggaatgacaaagtggtaaagctcttggcgggcgaagatgcaacgcaaccagcaaatgtcggagcggttaaaggggcgatagcccctactccacaaagatggcggcgtacccgtcgtccggcgtgccggggatggtatgctgcaggctgatgggcatctgcagcctgcgcgcggtggcgatcaggtcgatccccatgccgtaaaaggccgggcgttggcagacgggcatcgggccctccccgcaggcggcggcgcactcgccaatggcaaaggcgaagtagtacccgtcctccatggcgcgcttttctagctcggatgcgatggcggcggcctcccccgcatcctttgcgcggataaaggcgccccagctgaactcgcgcagcatgcgctgcctcagctccaggtccgcccggtccgcggggcggatgccctcgctctcgcaggtgaacaggcacttgagccaggtccgcccgtcaaagagcaggtcgtccatctcaaagggctcgatctgcagggcgccaaggcccagccctctttcctccatcaccttttggtattcccgcctggtcataaccttcctcctttattagccaccgaaaatgcgtccccgaaagcggcgcatgtagatctgggccagccggccgtacaaaatatcgtaaaccgcaaagcccgcctgcgcaccggcccacagccccaaaagccaaagcccggtgggcatgggcaggccaaatacctgcgtaacgagcagataacctacgcccaaccccaggttaaaggccagcgcctttaagacgatgcgcaccagcctggaatggaacccgtccagataatacttggctaccccataccaaccgaaaaagcaggcatagggcaggatggccgttttgtccggcaggatgaaaaagcccagtatccccacccccagcacggtgaggatcgccccgcgcacctggccctctaccatcagcgcgccgataaaaaggccgcttagggcgtacagcgccaggcgcgaggtgggcagcatgcccgccccggccaggcagacgagcgtgagcgcggccaccagcgccgaaagcgccacccgctttgccgcgccgtttgcggcagattgccttcttctatccatacttagcagcaggggatcagatcgccgccgaagcactcacagcagcaatccgcgcaccacagcgtctggcagatggagcaggcgtccatccccccgccgccgccccggtagccccctgcccggtactgctggttgacggcgtttagctggtttaaggcgctttgatactcggggttggtggggtccatgcgcacggcctgctggaggcactgcagcgcctgggcgtaccagttattgcgcacgtagaccatgccgcgcaggtaataccactccgcatcccggttctggatgcggtccagcatcgcctctgcggtgcgcacgtcgttgcggttcaaggcgctgcgcacgtcgttatagctggccgagccgccgtagctgccgccgccatagcccgaggacgcgcggccaccgccatagccgccccccccgtagccaccgccgctgtagcccgaggatgacccaccccgggcgccgccgcccttggtcagcatgtcgtaggcctcgttgatctgcttgagcttttcctgggccagctcgcttaaggggttattttggtactggtccggatggtatttgcgcaccagctcccggtaggcctttttgatctcctcctgggaggcgttttccggcacgcctaatacttcataaggattcatcttctttttttcttccttctcttttccgtttttctcccgggtgggccagaatctcgtccatcttctgggcgcacccgtcgtacaaaatgttgtgtgccagcgcctgattgcgcccggcggccaccagctcaaaggcccgggaggcctgcgccagggattgggtgagggaaaaggccatttcctcgcgtaaactttcgcggatctccccctcctgcgaaaggccgggccgggacaggcgcagggggttataattgccgcttataaggtcccgccccaggtcgtcccaggcgtccagcaggtagacccagcgccccaggttgtagcccataaagcgccaggcctcccgggcgctgcgcttttccccgggcacggccccgcaaaagatctcccccattagggtagcaaaggggtgggcggcctcatcgggcaggtcgcacccctccttttccagcgcggacagggccgcaaggttctctttgatgctttgatactgctccggcctgcgggcggcggccttcttggccccgggcgtaagcgcccacacggcgggcaggcggcttttcttaccgtcggccacgtcgtcgcgcagcttgccggccatcagcagggtattcaggtccgccgcgtacgacagggcctccccccgctccaccagcgggcggcgccgggtggggtgcagcgcgcaccgccctgcgtacagcttacccggtgcgggctgcaccatatccgcaaaaaccgccagggccgccaagtcatacgtcagccccaggcggcagaccgccccacagccccggccgatggccttgcaaagcccgcaataataggccttgaacagcgcctcgtcccggactttgagctccgggcggaagggcgcgatatatccaaacaatgttttctccttacggcaggatgaagcctaccttctttttgaccttggaaagcgtgcgcccggccaggcgcgcggcctgctccgccccctgggccatgatggccgacaggtgcgccttatccgccatcaggcgggcgtgctcctgctgcacgggctcaagcttggcgatgacggcgtcagccacccgctctttcaggacgccgtagccctgtccgtcaaactccgccaccgccttttcgatggcggtaccggtcatggcggcgtagatgtccagcagattgctcaccccgggcttatgctccgggtcgtagcggatctccgcgtccgaatcggtcaccgcgcgcttgaacttgcggcggatgtcctccggtttatccaacagggcgatataggtgggcgcctcgtcggacttggacatcttgcgggtggggtcctgcaggctcatcacccgggcgcccaccttggggatgtagggctcgggcacggtgaacacgtccccatacaggttattaaagcggatggcgatgtcccgcgtcagctccaggtgctgcttttggtccacgcctaccggcaccaggtccgcctggtagagcaggatgtccgccgccatcagcaccggataatcgaagagccccgcgttgatgttatcggcatgcttttgggatttctccttaaactgggtcatgcgctgcaactcgcccatgtaggtgtagcagttgaggatccagcccagctccgcgtggccggatacgtgggactggacgaacataatgttcttttccgggtccaggccgcaggcgatcagcagggccagggtgctcatcgtgcgggcgcgcagctcgcttgccacctggcgcacggtgatggcgtgctcatccaccacgcagtaaaggcagttgtactgctcctggatctccacccaggaacggatggccccgatatagttgcccagcgtcagcgtgccgctgggctggatgccgctaaagacgatctttttgcgttccgcttccataaaaaatggcttcctccttaggggagcgcccccgccgcaaaacaggctttggacggggattagcccggccggtagcgcacctccttggtaaagaagaggcggtcggccgcgcgggtggtcctgcgctccaaatcgcacgatagagcggccaaaaggccgcaaggatacaaggttacaggttagtataccctataaacgccgttttttcaagattatatgcgcccgcagcaggcgtgccccgcgagaaatgcgcgcccgcggcgggggcggaatgggaaaatcggttaaaggggcgaaagccctacttggaaggacaaagcggtagagcctttggcggacgcgggcgcatggatgcgcacaatgtatgagcggttaaaagggcgttagccatactcggaaggacaaagaattaaagccgttggcgggcggggacgcatggacgcgcacaatgtatgagcggttaaaggggcgaaagccctacttggaagggcaaagaattaaagccgttggcgggcgcgggcgcatgggcgcgcacaatgtatgagcggttagaagggcgttagccctgcttggaagggcatcgcgttaaagccgttggcgggcgcgggcgcatggatgcgcacaatgtatgagcggttagaagggcgttagccctacttggaagggcaaagaattaaagccgttggcgggcggggacgcatggacgcgcacaatgtatgagcggttaaaggggcgaaagccctgtcattcagagtgcgggctttgcccgcgcaaagaatctcccgcattggcggtgggcggcgcttaaagctgtaccgcagggcctgatcaggacgaggcgcagggcctgaccaaaacagagcggtgcaatcacggcccagagggcgtaaagagattcctcgcgtcgctcggaatgacaatgcgaaacggcaatggtaggcgcatgggcacgtgcaaaagcagttgcagaggcgaaaacccggctcggaaaggcaaagcggtagagtcgttggcgggcgggaacgcatggacgcacataatgtataagcggttaaaagggcgaaagccctgtcattcagagtgcgggctttgcccgtgcgaagaatctcccgcattggcggtgggcggcgcttaaagctgtaccgcagggcctgatcaggacgaggcgcagggcctgaccaaaacagagcggtgcaatcacggcccagagggcgtaaagagattcctcgcgtcgctcggaatgacagcgtgggttagccacgggtgccggctgcggatggggccatgcgccgctccctccctccaccgcctaatagcggtccccctccctgaggctgagggaggcgagggctttggcggtgttttggcggtactgacatacaggcaggccgtcaggagattcctcgcctacggctcggaatgacaaaggttaaacggcaatggtgggtgcgtgggcatggttgcgctgagaggcaaacgcggttaaaggggcgttagccctactcggaaaggcaaagcggtagagtcgttggcgggcgggaacgcatggacgcacataatgtatgagcggttaaaagggcgttagccctacttggaagacaaagcggtagagccgttggcgggcgcgggcgcatgggcgcgcacaatgtatgagcggttaaaagggcgaagccctgtcattcagagtgcgggctttgcccgcgcgaagaatctcccgcattggcagtgggcggcgcttaaagctgtaccgcagggcctgaccaagacagggcggtgcaaccacagctcagagggtataaagagattcctcgcctgcggctcggaatggcatagacgggcgcgcaaagaggcaaaagcggttcaaaggccgcgggatcagggcaaagcaaaggcgcgcggagaatcctccgcgcgccctgaaaagccataaacctttgcgcttacacgcaggtgaaagcgccgtcgatcacaaagtcgctgcccgtggtaaaggcgctggaatcccccgccagatacacggcgatagcctgcagctcctcgggtttgccgatccggcccagcgggccctgctcgttccagatcttgatgaggggctttaagtgctcggcattgttgaccagatccgtgccgatatacccggggctgatgcagttgacccgcacgccctttttggcccattccaccgccatagacttggtgagcatgatcaccccggccttggaggcgttatacgcgcactggggctgggggaagttaacgatatgcccgctcatagaggcggtgttgatgatcgaacctgcgccctgctccagcatcaccttgcccgcagcctgggcggtgaggaacacgccgtttaggttgatgtcgatcacctttttccactgctcgtaggtcatctcctcggcagggacgttgatgcagatgcccgcgttgcaaaaagccgcgtcgatccggccgaactggccacggatctcggcgatggtggcgtccacctgctctttatccgtcacatcgcacttaagggccagggtcttgcagccgttggccgcggcgatctcctgggccgtcttttgggcctcgtcgatgtccacatccacgatggccacatccgcccccgcctcagccagcgccgtggcgatggccttgccgatgccccgggcgccgccggtgacaaaggcctttttgccgtctaaccgaaatttctcaatgatgcccatttcgcttcactccaattcccttttcgttttgtcgataaggttactaaacccccttggctttccgcaaccattataacacggttggagggggcgcgcaatcgtcccggcgggactggaaggcgcacaatcgctccataacctgtgaaaaaaaggtgaacaatgacaaaggcgggatcaggctaccggcggggcggctggacgggcgaccgtcttgaaaagaattgcagcatggttcgatcccagccctgtcattcagcgcatgggcagttggcggcggtttgagctgtgaggcgaagtctcgaccgggacggagcggtgccaccatagcctagagggtataaagagattcctcgcttgcgctcggaatgacggtaaaaatatgtgtcagtcagaactggcggatttctccccttccggcgtgggcaagggctgaaaactccctccaccgcctaaaggcggtccccctccctgcgctgagggaggcgggcgctttggcggtgccgcgggacttgaccgggggtggagcggtgcaaccacagcccagaggtcgtaaagagattcctcgcgttgctcggaatgacagcgcgggttaggcgcgagtgcaggctgcggcttggggccatacgctgcccactccctccaccgccttttcggcggttcccttccctgatactgagggaggcgggcgctttggcggtgccgagggtgttgaccgggggtggagcggtgcaaccacagcccagaggtcgtaaagagattcctcgcgttgctcggaatgactgcgcgggttaggcccccagccgcactgcggtgccgctggcggtgaccatcagcatgctgccgccttcgcccagcacctcataatcgatatccacgcccaccaccgcgtccgcacccaaggctcgagcgcgctccgccatctcgtgcagggcggcctcccgcgcctggatcaattcgccctcgtaactgcccgagcggccgccgaaaaagttgcgcaggccggccgcgaaatccttgataaagtccacgccggagaccacctctccaaacacgatgccgtaatagtcggtaatgcgccgcccttcgacgctgggcgtagtggtgatgatcattttcttttcctccttttattttgtgggacgcaaggcgtccccctttccacgtttcaggcgctctccaccgcggccgccgggcagcagaaagttgaccgccagcgccacggcgatgccgatcagggtatccaccacgcggttgagggcaaaaagccaggggacgctgtccgcgccgtgggagatggtcacactcaaaaacaccacgcaggtgatataagtggccggccgcttttccagcagcaccgtcagatacatcagcggcagcagggccagggcgatcagggtatagtgccccgcccccagcgccggcacgcccatcccctttaaggcgtaaagcatgcccatgcccgccgcgccacccaaaagcgtgcccaccgtgcggttcagccccaccttaaggctgccctgcacgtccggctgggtgcacagcaccgccgcgatggccgaataaaagggcatgccgcccgggcgcaaaagccccagcatcaggcacagccagaccgccagcacgcttttgagcatccgcatccccacgccgggccacctggtcatggtcgtcacgctcctttctcttgatcgctttcctctaaaagaaaagccatgcagcgctgcatggcttttgtgcgtgaaaaacgcgcatctttacgaatttttctctttgatataggcgtccatggccttggcggcttccttgcccgcgcccatggacaggatcaccgtagccgcgccggtcaccgcgtcgccgccggcgtacacgccgtcccggctggtcagcccgccctcatcctcggtgatgatgcagccgcgcttgttggtctcaagccccggggtggtcttgcggatcatcggattggggctggtgccgatggccacgatcaccgcgtccacctccatatcgaaggcggagtcctttaccggcaccggccggcgccgtccgctctcgtccggctcgcccagctccatcgcaatgcagcgcaggccgcacacgaagccgttctcgtcccccagcacctcgatgggatcggacagggtcttaaaggcgatgccttcctcctgggcgtgctccacctcttctttacgggcgggcagctcgttcatcgagcggcgatagacgatggtgacctcgtcggcccccatgcgccgggcgcagcgggccgcgtccatggccacgttgcccccgccgaccaccgccaccttgcggctgcgctggatgggggtcttgctatcctgctgataggccttcatcaggttgacgcgggtgaggtactcgttggccgagtacacccctttcaggttctccccggggatgttcataaaccggggcagtcccgcgccggagcctacgaagatggcctcgttacccatgtcaaacaggtcgtcaatggtcaacaccttgccgatgaccatattggtctccaccttgacgcccagttttttcagcccctcgatctcctgggccacgatgcgtttgggcagccggaactcggggatgccgtataccagcacgccgccggcctggtgcagcgcctcgtacaccgtgacctcgtagcccatcttggccagctcgcccgcgcaggtcagccccgcagggccgctgcccacgatggccaccttatgcccgttggcctcaggcttttcggtcttttgatccgcctgggcgttatgccagtcggccacaaagcgctctaagcgcccgatgcccaccggctcgcccttgatgccgcgcacgcacttgccctcgcactggtgctcctgcgggcagacccggccgcacaccgccggcagcgccgtggaggcggagaggatctcccaagcgccctgtaggtcctcctcggcgattttgccgataaagcccgggatgtcgatggccacggggcaggcgctctggcagggtttgtttttgcagtgcaggcagcgccgggcttcggaaacggccatctcataggtgtagcccagggctacctcctcaaagttatggctgcgcttttccgcatcctgcgtaggcatgggggtctttttagggtccatattccgttcaaacgccatcatccttcgacctccttttgcagcaactcgcactcttcttcccgctcccgggcttcaaactggcggtacatggccccgcgcttcatggcctcgtcaaagtccaccaggtggccgtcaaagtccggcccgtccacgcaggcaaacttggtctccccgcccacggtcagccggcagcccccgcacatgcccgtcccgtcgatcatgatgggattcatggacaccacggtcttgatgccgtactttttggtgagcaggcagacgaacttcatcataatcagcgggccgatggcgaatacctcgtcatactggttgccctctttgatcagctgctccagggcgtctgtcaccaggcccttttcgccatagctgccatcgtcggtgacgatcttatacacatcgctgatgtccctgaaatcctgctcgaggatcaccaggtccttattgcggaagcccgtaatggcgtgcacctgcgcgcccatcttgtgcagctttttggccacgggataggcgatggcgcagcccacgcccccgcccaccacggccacttttttaagcccgtccaggtggctgggggtgcccaagggacccacaaagtcgttaatgctctcgcccacgttcagggtgttcaactccatcgtgccccgacccacgatctggaagatgatggtgacggtgcctttttcccggtcataatccgcaatggtcagcgggatgcgctcgctgtcaggcagcgcgcggaagataatgaattgcccgggctgtgccttgcgggcgattaacggcgctttgaccaccattttggtgaccgtggcgttcaaaggctctttggctacgatctcaaacatgctcttcacttccctttcctaaaggttcgctcctccatagccgccgcagatagcggccatatcccaggccaaacctggggactctactattctcatgtattttttgtccattgtcaattaaaaaatcctggcaaaaggcaatcagccctgcgtgcaccagcccgcaagggggctgagtccctttttgccgctattttagttaaaccgttcgctccgcgggtcactctgttcgctgggggttcggcctacgtaccttacggtacttgtcctctccttacgctcacagggatcatcgtgccctttttcgcccactgggcgcgagcactatagatcccattccgagcgtaagcgaggaatctcatggttttctgtttagctaatcagcactgcgtcgtttggcgcacggcggtttttatgcgcgctgggccatgcgaacaaagtccgaatcagtgccaatgcacgagattcttcgttcggcctgtcggcctctctctgaatgacaggggtaaagccccttagtgccgctcataacctttcatcttcactcggcgtttgtgcccgccagcgacttagaggttatgacgtgggagaggctgggctgacgcccctatgagccgctcttgcccttgtgcgttgctatgcgccagcgcccgccaggggcttcgccgggttcccgcacttcaccgcccggggctagcgccctttgaaccgctcataacctaggcggaagccgggttctgtcattccgagcgtaagcgaggaatctcatggttttctgtttagctaatcagcactgcgtcgtttggcgcacggcggtttttatgcgcgctgggccatgcggacaaagtccaaatcagtgccaatgcatgagattcttcgctcggcctgtcggcctctctctgaatgacagggctgtcgcccttataaccgctcctacttttctacgtttcccagcgtcaacgcccgccaggtgcttcgccgggctcctgcacttcaccgttcgggggctagcgccctttgtgccgctcttgcccttgtgtgttgctgtgcgttaacgcccgccaaggctttgttccagtcggcccggctctgaatgacggcgcatcatctcttcgccccaaaaccggaaagcggaggggcgttcatccgcctcccccgctttccggtgtatcgcgtgtatatttgtaggaccagatccgtgttcgcgtgtgttgaggctacggtttagaaatccacttccgtgccgtagtagcagcactccagcagcttctccatctccttgggcgtaatggcgcgcgggttggagccggtgcaggcatcccccaccgccaactccgcgatggaagcgaccttgcgcttgaactcgtcctcgttgatgccaaactccttgagggtcttggggatgttcagcgccacgttgtaggcgtcgatcttcttgcaaagggcgttgaccagctcgcagtcgtccttgccctccaggcccacagcccgggcgatatcggcatagcgctttttggcggtctcatccttggcgttatattgaatcacgaagggcagatacatggcgttggcgcacccgtgggggatgtgcccggtctcaaaggccgcgccggtcttatgcgccatggagtgtacgatgccaagcagggcgttgctaaacgccataccggccagacactgggcgtagtgcatctgctcgcgcgctttcatgtcgcctgcaaaagaggcgggcaggaactcgaataccatctggatcgccttgatcgccagcggatcggtgaagggggagttaagcgtggaaacgtacgcttcgatggcgtgggtcagagcgtccatgccggtgtgggccgtgagcttggggggcatcgtctcggccagatccgggtcgacaatggccacatccggggtgatattaaagtctgccagcgggtatttgattcctttggcgtaatccgtaatgacggagaaggccgtcacttcggtcgccgtaccggaggtagacgggatggctaagaatttggctttggtgcgcagtttggggaagctaaacggggtgatcaggtcctcaaacttggcgtcgggatactcgtagaacacccacatggccttggccgcgtcgatggggctgcccccgcccatggagatgatccagtccggctcaaactcgcgcatggcctgggcgcccttcatcaccgtctccaccgacggatcgggctctacgttttcaaacagctgaacctcgatgccagcctctttcagataattcaccgctttgtctacgaagccgaagcgcttcatcgagccgccgcccagaacgatgatggcctttttgccatccaggttcttgagctcttccatggtgcctttaccgtaatagatgtcgcggggaagtgtaaaacgtgccataatgatcctccttcgtgtcgtcctttcgatcgttgatcgttaaaaatttgtcaggctctggccttaaaaaaaggggtttgccttatccacgtattatggtctggcgcgccgctatttataccagccggcccggcggttgttgtgggggccggcggcctttttcccttggccggaggctccctttttcttacagtgccagtatagcacgcatgggtaaaaccgggtaatgtttaatgggaatagggggtatatcccgcagggcatagctcatttacagggtgtatgcttgccgtgcgcctacgtttaaggcggcagccctgggacggtgaaatgcggtacccgataaagcccttggcgggcgtagacgctgcgaaacgaagaaaagctggagcggttaaaagggcgactgcccaagacggtgatgtgcggcaacccgataaagcccttggcgggcgtagacgccggaaaacgtagaaaagctggagcggttaaaagggcgactgcccaagacggtgatgtgcggtaacccgataaagcccttggcgggcgtagacgctgcgaaacgaagaaaagctggagcggttataggggtgataacccgtcattcagagagaggccgacaggccgagcgaagaatctcatgcgttagctgtcggctgggttggaccgatgaggcactttacccttatgccgcgaggcagacgggcttttgtggtcgtcaggagattcctcgcgctgctcggaatgacagggcggtaatgtagagggcggcgggcagaggtgccgggcttaggcgaaaggccgggcggttaaaagggcgactgcccaagacggtgatgtgcggcaacccgataaagcccttggcgggcgtagacgctgcgaaacgaagaaaagctggagcggatataggggcgataacccgtcattcagagggaggccgacaggccgaacgaagaatctcatgcgttagctgtcggctgagtttgaccgatgaggcactttacgtcgcgaggcagacgggcttttgtggttggcaggagattcctcacgttgctcggaatgacagagaaggtgaaggcggtggcgggcgtgggtgtgtggggcttatggcgaaaggccgggtggtgccagccgggcgcaggttcgggcagcgtggtgcaggcccggccctgcggttggcaggagattcctcgcgctactcggaatgacagagaaggtacgcacggcgcttgggcgcggcggggctctccctccggcaggctgcgcctgccacctccctcaccagagggaggcaagggcgttttcgcggcgatgtggcgggtggtgatagctgggagcaggtctgggcggtgcaggcccggccctgcggttggaatgagattcctcgcgttgctcggaatgacaggaacaccaacttgacgccatagctctgtctaaagcggcagaaagcataagcgataagtgcggggccattcgcttcagcgcggcataacggccttccctcaaccctctcccccgttcacggcctctgatcttccgcgggcatgctaaagggccggagagcgtttgctctccggccctgattccgttctgtgcgcggggcgccttttccctactcgtgatccccgtcatccggggtagggttcgccgggctattcgtaggggtttgcgtaggtttagcagttggttcagccgtgggtttagcggtaggctcagccgtaggtttaaccgttggcttagcagtcggttcggccgtaggcttggcggtaggctcagccgtaggtttcgcggtaggtttctccgtaggtttggccgtaggcttcaccgtggccttggcggtgggctttgccgtagcctgcggcgtgggggtggcgcgggaataggccaccgtaaagtccttggtctcggtgccggtgatgtccccatcgataccggcgtccaccagtacctgatacttgccctcggccagggtcttgccgttttcgtccttaccatcccaggtgatgcggttcacgcccgccttgacgtccagccactcctcattcaggcggcgcacggtggtgccgtccggcttctggatggaaacgtgcacctggcaatcctgatccaccagatatttaatagtcatcgcgccctcgctgggcacgtacagggtatcggccagctcgatggcggtgaccgccgggcccgccttgggcgggatgatctcctcagccgactcggtggacgaggcgatcgggatcgtggtcagcgccgggctttggttgacgatcaaaaaatccgccatgaaatagatgcccacggccagcgccaccgaaaatacgcttaaaatagcgatggtgcgcttctctttgcgcacgcgcttggcaatggcggcggcattgggctttttatggggcccgccctgagggaccggccttttttgcggttgttgctccataaatcgttcctccaaatacttcatcacgcccggaaaaaacgggcatggtccttctccctcgcgccccgtccctgcggggagcgctaagcgacctgggcggcacagggcctgtcccacgtcctggcctattatatcatggccttttgttaaaaaaaagcccgctcgctctaatttcgacgcaaatatcaatttttacactttagagaggaatctatgaaggaaaagacatatttttgaaatggctttcccagccggtattgtgtataatgaaaatagcataaatttgtggtattttggcacaatatgcggataattctcataacagagggagggcgagtgatgccgcaaaagaaaaacacggcccgcgcgcgggcccgcaggcgctaccgctttaagccccggcccacctttatgctggccctagccgttctggtgctgatcggcgggttcttcggggtcaaggccctggtggataacggcaaggtgagcggagccagcgcccgctttattcaattattaaacgaggggcaggtagacgctgcccgggagtatctggacaccgaggtggcgaacatgggcgcgctgcacgagcgcacggtgcagcagatcacccagcacttaaacgccaaggtggaggcttttagcgccctggcgcgcaaggacatcgacaaagaggacgcggcgttgagcgaggtaccggcggatctggcggcgctggaccgcttccccgacctggtgagcgccaaagtgcactccgagctgcagggcgccgtgcagcagtatatcagcgagcagctgccctacgagcagatggcccgctttatcgcaaactaccggctgctgccctttgcaggcgagctgtgcgacgaattcagcgcccaggccgcggcctattacgaatcccgcgaccattttgaaaagggcatggcggccagcgacagcggggactatgccaccgccgtggaggaattggccctggtcatccccgaggatgcggcctattacggcaaggcccaggaggtgcaggccgtcaaccttgaaaagctgctgcccagcgccatggccgagagcgaaaagctgtaccaggccggggattacgaaggggcttatgcactggtagaacgggcggcggcctttttccccaatgatacggcgctgcaaaaccgggtgaacgactataaaaatgcgctggagcagtacgaggaatccctggtgagctactccggcccggtggagcatgtattcacccactgcctgatcgcctatcccgagatctgctactccagcccggagatgatgaaatccctggataccgactgcctgacgcccaaggagtttaccaagatcatccagtccttgtacgacaagggctatattttgatcgacatcaactccctggtgggcaagagcgaagagcaggacggcaagatctacgtgagcgacctgaagctgcccaagggcaaaaagccgctggtgctctcggtggacgacgtggtgtacgacgcgcgcaaggccggcaccggcatggtggacaagctgatcctggacagcgagggcaacatcgccacctacaccaagcacgccgacggcaccgaggaggtgcgctacgacaacgaggtcttccccattatcgacgcgttcgtcaaagagcacccggatttctcctttaagggggccaagggcacgctgtttttgacgggcttccagggcatactgggttaccgcacccagcacgacagcccgctggaccgggaagcggagatcgaggcggtaaagccggtgatcgcgcggctgaaggagaccgggtggaactttggctcccactcctatgggcacgggcatatggagcagaagtacgacctggaaaagatgaaggacgatacccagaagtggcacgacgaggtggaatccctggtgggcgagacgcaggtattcgcctatccctatggggaaaaggtgacctacggctcggagaagtggcaggtcttgtatgacgacgggttccgcatcttctgcggcgtaggccccaagccctacctgaagctggagaagaacggcgatgcgctgttccaggatcggcggccctttgacgggtattccttacgcaactcccgcgagcgcaacctggacctgtttgacgccaatgaagtgatcgattcggtgcgtccggctaccgtgccctaagggcagactgaagggataaagccaatcccccggcactttgccgggggattttgttgtgtgcggggaacatgggcctggggcccattcgttgacgggcgtgaataggacggtgtgggcgcgggcgcgcggcagacggtggatcgggcgggtaaaggcctgccctaccatttggcacacgggaatgaggcgacgggggcgtgggcgctttgctccggcggcgagaggcggacgctttgccccggtaacgtgggataggcaccttaccctagctgcgagggggagcgcggccaagagagtgtaaagagattcctcgctgcgcttcggaatgacagaaaaacatggtttacactgtcattcagagcggaggggcgccgggcaccagaataaggcctattgcctgaacagaggtaagagacgcgcatggcccagagcggttagagggacgaagtcccccggagcgaagaatctcctgcatcggcaaggtgcagcgcttgaccggaatggtgtgggttagacaccttaccccggcggcggagtatgagcgcagctaagagggtgtagggagattcctcgctgcgctcggaatgacagaatacatagtttacactgtcatttagagcggaagcgaagctgcagcgaagaatctattgcgttggcagggcgcagcgcttgaccggaatggtgtgggttagacaccttaccccggcggcggagtatgagcgcagctaagagggtgtagggagattcctcgctgcgctcggaatgacagaatacatagtttacactgtcatttagagcggaagcgaagctgcagcgaagaatctattgcgttggcagggcgcagcgcttgaccggaatggtgtgggttagacaccttaccccggcggcggagtatgagcgcagctaagagggtgtagggagattcctcgctgcgctcggaatgacagaaaaacatggtttacactgtcattcagagcggaagcgaagctgcagcgaagaatctattgcgttggtagggcgcagcgcttgaccggaatggtgtgggttagacaccttaccccggcggcggagtatgagcgcagctaagagggcgtagggagattcctcgctgcgctcggaatgacagggttcagcgggcgttagccctgctggcattataatataaggtacggctgtttagtccttgccgtgcggtaaagtctagctcccctaccaccttgagcgattaaaacggacggcagcccttcctcgctataaagaaaagcatgacgcgcatttgccgggcgctaaagcctggcttccctatccgctttgagcggttaaacgggcgctagcccttcctcgctataaagaaagccatggacgcacatttgccgggcgctaaagcctggcttccccatccgctttgagcggttaagcgggcgctagcccctcctcgctataaagaaaagcatgacgcgcatttgccgggcgctaaagcctggcttccctatccgctttgagcggttaaacgggcgttagccccctcctctctctagcagatagccatgacgcgcatttgccgggtggtaaagctaaggccctcccctattcgccttgagcgataaaacgggcgttagcccccaaaaaaagaggacgtggaaaaatccacgtcctctttcggttcgtttcagtaaaaggttgagtacgattagaaagccagagcggcctccatatcgtcgccggtgatgaagccgcagggcagggccgcgggctgcgccggcttggtggtcaactcgcacaccacgttctcgcggcagctcttctcgatggaggtgacgatctccacagcgtgcagggcctgctcggcgctctgacgcggggcgcgtccatcgcgcagggcccaggccatatccgccacgccgatgccgcggcgggagttgtagcagggctccggcttgccgctggtggtgggcagagacggatcggtatccccatagccgtgggtgaagggcatcttgaaggtgccttcgttgccggacagggtgatgtacacatcgttgccgtagccgccgaacatgttcgggtcgggcacggagatccagcccttggtgccgtagatctcgatgcgcggaatctctttctcatagctctcgcccatgaccaccaggttgccccagcagccgttgtggaactccaggcagcccatgatagacgtgggacccggatagaccttgatgggctcgcggaagttgggatgcatgggattggtatatacccgatccgcacggctgccggcataaccggacacgcgcttaacgggcccaagcaggttgagcaaagcgttgatgtaatagccgcccatgtcgtaaggcatggtggtgccggcgccgccgaagttggcgcgatccggctcggcagccaggctggccgggcggttgggccgcagcacgaaggcctgcgccatgatgggatcgccgatccaaccgtcgtcgatcagcttacgggcggtctggtgggcagcgcccatataggtatccggggccgcgccgatgagcaggcccttggacttggcgtattcgatgttggccttggcatcctcaaaggagcagcccatcatcttctcggaatagacgttcttgcctgcatccaggatcatcttggtcacttccgtatggaaggtgatctgcgtggtgttgaccacgatctcgatctcaggatcgttcaagatctcttcattggtcatctgccggatgccgaacagctcgctgcgggccttgctccgctccgggatcaggtccgaacagcccaccatatcgatgatggagaaggtgttcgtcaggttggtcaggtacgtatagctgatcgcgcccgaaccgatgaggccgactttgactggtttcacttttgccattcctgttaccccctgttaatttggttcaaaataaaatggattctccaggcggcggtgcaagccctccaagtggcagcacacgcattcgccctttatactttaccatttcttcagcgattttacaatgtattattcaacaaaagttgcaaacgttagggcatggtgggatgcagccggcccgtctttttcaggtgccggtagcgccagatgaacagcagcgccgcgctgccccttgcgcacagggcgatcagggcgaaaagcgtcatcgcgtgatggtccgcgcccagcgcctggtacagctgcacgcccaggtaaggcatcaccgcgttggagagggtgaccaccatggtgtgcaggctgatgatcagcgcgcggttgcgctgcggggtcacatccagcagcatctgcaccgcgcaaagctggatgcagccctgaggcacgctgcccaggatgcccatggccataaaggggatcagctgactgccctggggcaggttgacccctaccagcatggccagcgagcaaaacgtatgccccagcacggcgaagataaaggaaaagtgcacggtcttgcgctcgttcaagcgggcaaaaaggcccacggtgagcaactgacccacgcacaccagcccgttatagtaggagagctgggcctcggtcatatggatgtactgggtctggccaatgtaccacatgctccagtccaggtgccaggccaggtaaaagaacatgatgcaaaggaaaaacgagcggaaggcccgcgtggtggccatctgccctaaggcctggccgatctcccttggcgaaaagcgcttgacggccgccatctcggcatccgtacgcttggggcaggggatgcgcgagaggatcagcgcctgggtcagcaccagggcgccggcgatgtagtaaaacacgcgcagcaccaccagcttgccctcgctgtccaccgccgtgcccatgcacagcccgcagaccaccggggccaccgtgcccaccaggaacataaagcggttgcggaaggaatagacgccgttgcgcttgcgctcggccaccgcatccccgaaaaaggcctgccactgggcgttgtacaccgccagcacgccggcggtcagccccaggaacacgaagaaaaaggcgatgcggttgctgccaaactccggcaccgtggcgtacacaaagtacatggcgcccataaaaagcaacatggccaccggcagcgtcttgctggagcgctggcggttggccacgatgccgatgggcaacagcaacaccaccgccaccaggttaagcaccagctggaccatgccgatctggctgtcgctggcgcccatattggtagcgtacaggttgttgccgaacccgtttatagaggtgacgtattgcagcatcagcccctccaggccaaagagcagggtcacccgcatgtctttattgccccaggtcagctggagccgctcccgcagcatacggaaatagcgcagcatgtttcaccaggctcctttacacagtccagattgccggccccgccggccaggagagtcgcgcggcgccaacgccgcaaaggccaaacttaatgctgatttccgcccgtaccgcgggcattaggggacagatacggcatacaaccctagaaggcgaggtggtcgaagtcccgcccaccagggcgcctgccgttcttaaaaggggctgatacgaccaagggcttttgcccgccctgccgcgctgcaggtcatccccccaaaggcggggtgcaaccgtctttttggggaaaccggcgtgttcacgcttaaggtaggctatttaccctttatcgtcatcaaagccgggggatatgatctccccctctatccgctaaaggcatggggccgcaggccggctgatccatccgcctgcaagccgccgctgccttttgcgctaagctactagccctattataggctataggggcccttatcgtctaccgtatcaaaatttacgcccaggtaacgggccacctcgcggaagatgggcaggtacttgccatacacgcccgccacgtggtggatgtagggcccgaacatcagcttctcttcccagcgcttccagttgtccacttccagccagacataggtgccggtggtctccgggccggtggtggtcttgccctcgccgcagaacatgaagtactcgccgtcgatctcgtccatgcgcatcagggtcagatccccctgcttcatctcccaggcggacacgccgtcgatcaggcggggcttgcgctccttggtggccagcgaataggcgaacgggccgccgtgccagatcagctcggcattgtcgttatccgggtggcgataggtccagtcggccaggaactcagcctcggtacccagggtggcggcggtgcacatcagctggccgatggcgccccacacatccgtctcgcaagaggtgggatagccgtggtcggtcaactcgccctgcatagcgcagatggacttgagccccagcacgttgcgcaggcccgggcaatccagcgccgcgcagcgggcaccgtgctcatccatcagctgctcgacggccatctcaaaggccagcagcttccacaccacttcatcctcggtgcgggagcaatcgatacgggcagtgtattcggcatagtaatccgtcagggccttgcctttttcggccaggatctgctcggtacgctctttgaccagggcgatggcgatgggctttacggtgatgccaaagtcccggatgaggttgagctggttgtggatcacgctgaagaactgcggcggccggtcgccgatctcggccacgaccaggttgcgcaggctctttaagacgctggccacgcggatgaacttctcaaagccctctacgaacaccgggctgtccttttcgcagttgaaaatgtagctgaaggtcaccccatagttgcgcagcaccttggtggccgcgaacaggccgcactgggtctccttctcccgatgctcccaggtggagaccttatcccggctgccccagaccagcaccggcagcttgaactgcttggccacgcccaccaccacttcttcacaaccgaagtcgcagaaggggaagaagagcgcgtctacgttattggccttgaacttggctacgaccttgtcgatatcctccgggaaggcgcccatgccgttgttctcggccaggatgtcgtcgcaatccaccagcttgacgaattccggcatctgcgcgcggaagataggcatcagcgcgtctttttccttggtggcggtctccagcgagaaggtgggccgcttggtgggcatgacgcccagggtaatgacttctttgtacatgtggtttttcctcctacctaaaaatgtcggtcgtggtcctgaagggtgatgatccggcctaaaaccggtttcaggcgttaggttaagcggcaagggtgcgtggaatagtaaagcgtgttggatgcgggcactctaccccggccgcggagcataggcgcgaccgagagggaataaggagattcctcgctgccgctcggaatgacagaaaaacaaggtctaggctgtcattctgaacgcaggcgaagccggagtgaagaatctccagcgctggcagggcccacaagggtttccagacggaacgtctaacatgctctcccttaccttacgctcaccgggcgcttcggaatgacaaaggacaacctagcctattgtccgtgcgcgcccaatatgcctctggcgggcgataaagcccctgctttcctcccccgcttcgagcggttaaaagggacaatgtccccctaatgccgttaacgttcataccgcttggcctctggcgggcgataaagcccctgctttcctcccccgctttgagcggttaagagggacaatgtccctagtccagcacgcggtagataaagccctccggatgatccgggtcgcggccggtacgcttccaggcgttgagcgcgtcgatcttggcgcagtcctcggcggccagctcaaagtcgaacacatcggcgttttgcacgatgcgctcctgcttggaagagcgcgggaacacgatgatgcccttttgcaggatccaccgcagcaccacctgcgggccgctcttgccgtacttctgggcgatggccgcgatggtagggtcgctggcggccatgccgccgcccaaggggctccaggcctccacggcgatattgtgctctttacagaagttgatggtctcataatcctgtatgccggggttgaactcgatctgatccaccgcggggcggaccgtggcatccgccataatgtcctttaagtggctgacgcggaagttggaaaggccgatggccttggccagcccctgtttatagtaatcctccataatggcccaggactctttataccgccccggcaccggccagtgctggatgtacaggtcgatataatccaggcccaggttctccaggctcttttcaaagccatggcgctggcggccgtcccgctggtggatgttggccagcttggtggtgatgaagatctcctcccggggcacgccgctctcgcggatggcctcgcccacgacgccctcgttctggtaagccgcggcggtatcaaaatggcggtagcccgcctccagcgcccacaaaatggcgcgtttggcctcctcgccgttgcccagctgccagacgccaaagccgaactgcgggatgctgttgccgctggaaagtgggatacgggtggaaatgctgagtttttcttgggacatggattcgcacctctcctttttggtcaaaacatagtgtgatcctcctgaaaatggagggcggcggatgtgtgctggccccgagggcccattgaaataccacttaattcacatggtttataatcctactttaatatattgccgggcgtttgtcaatttggcatggggaatatatttcccaagattgggcgcttatgccgctctagcttttgctaccgttttttatcgccctcaaccgctgcaaattgccaaatatccccgcgccaaaaagcggcgcccccgggatgaaccggaagcgccgcctggcgttttaagccttatttcaggtagccggcctgcagggtgatccacccctcgtggcggccgcccgcgggcagcacgatgacgttgcccatgtcctttttgccctgggccagcatgttgaagccgtccgtggcgttggtctggttctccaggcagaagccgcccgcgcgcatgggcggggtgaagatgaccatgtacttcatatcgtcagaagcgcgcagctccagcttgcgcccgctcttgcggtactcgatggtggaaaccttggtggaatcgaacccgccgaacaggttgtcaaaattcatctccgccaggcatttcccctcggacagatcccagctggtgccctgggtatccagcatcttgcgggtggggtagcagttatccgtttccatcatcaggcggttgggcacggtcacataggtatcggtcaccgggtccagcttgttgaagaaggtgtgcacgccaaagccaaagggcgcttccttgctgtccttattctccacggcccaatccaggcgcaggccgtctttggagatggaataggtcatatacagcttgaggtagaacgggaagatggtgtacagcaccccgcccggcgcaaactcaatggagatggtggcgctggccttgtcctcgcaggcgcaaacgtcctctacggtaaaggcctcgtcgttaacgatgccgtgcagcaccttgggcacgccgtttttgaccacctgatactttttatccttgaactggaaggtggcgtccacaatgcggttggcataggggaacatcaccgggaagccgtagcccgtgcccgccccgtcaaagttggccggggtctccagcatctccagcccgtccaccacgtaggaaaacaggttgccgcccttggccggcgcgagtttggccacctggccctcgccctccagcacgatctgctcgatctccaaccccgggatcatttcggttttagccgtgtatttggcgcacatgtataaagccctccttcaatcttcgtccttttaattcaactgggtttacaaacaccatttctattttaacccacccgtccccgaattgcaacggggctattcgcccttttgaccgctatagggagaggatattgtactgtctttatgtgcacggcattggggagacgtgccttccccagcgttgctgtggggctgttcgcccttttgaccgctatagggagaggatattgtagaatgcggcagacgcgacaggggggattattctctgtcactccgagcgcaagcgaggaatctcatggcgacctcttgatctcatttgcacctctgccgtggcggcaaaaccctgcccactgcccacgcgcgagattcttcccacagctgcgctgtgctctgaatgacagggctatacgcccttttggtcgtttcagagagtgagattgtaatagggaacggagcacgacagcaaggtttggtctttatccggcgttgctgtggggctgacgcccttttggccgctttggggagcggatattgtagaatgcggcagacgcgacagggggtattagcctctgtcattccgagcgcagcgaggaatctcatggcgacctcttaatctcgtttgcacctctactgcggcggtaaacccctgcccactgcccatgcacgagattcttcgctcggccttacggtctcgctctgaatgacaataaaaaggctatgtttcgctccctataataacacttgcactttgctacgttttatctgtatcagtaaagcattttctaacccctgtcattccgagcgtaagcgaggaatctcatggaaaccgctgggtctggcttacggcaagccgttgagggtacggctcttccaagcggtgatgcacgagattcttcgcgcgaccttatggccgcgctctgaatgacagggctgacgcccttttggtcgttttggcaggagatattgtactgtctttatgtgcacggcattggggaagcgtgccttccccggcgttacagtggcgctaaggcccttttaatcgttttcgggatgagattgtagaatggggtggacgctgcagggggtattatctcctgtcattccgagcgtaagcgagggcgcgaagtgaacgccggcagtgccggatgcagtgagcgaagcgcccaatgagcgcgagataagcccaagcggccaacgtgctgcgaagggcgaatccgcagcgaattgcgagttacccggctttactgccgttagggcgagcatgttagacgctccgcctggaaacccttgcccactgccggtgcacgagattcttcgcacagctacgctgtgctctgaatgacagggcttacgcccttttgaccgtttggaacgatgagattgtaataaggaacggggcacggcagcaaggtttgggttttatccggcgttgctgtggggctgttcgcccttttggccgctttggggagcggatattgtagaatgcggcagacgcgacagggggtattagcctctgtcattccgagcgcaagcgaggaatctctgggcgacctcttgatctcgtttgcacctctgccgtggtggtaaacccctgcccactgctgacgcagaagattcttcgcacagctgcgccgtgctctgattgacagtccccagaatacagcgggggcgcgcttttgctctacgcatatctacgcgccttcctcttccttaataaatagcgcgtgcaaaacctactccccgcccaaaagcgaggggtagaaggccggcgcggcggggtcgatcaccgtgacggccagcccggcccggcgggccagctccagcgtctgccgggtgccgccggggctgcggccatcatacagggcgatgacgtgcccggcgtgctccaccagatagcggttgcgcgcctgcatgcagcccggcgcgtaccgggtggccagcaccaccttctcgtccgcctgcgccaatacccgggcatgcagcgcctggttcgtcctgctccagcgggccgcctgatccgcacagggcagcacggcgcacagccgcacccctagccgctcgcccgcgcccaggtcccggtacttgagcacgatctgcgccgcccaaaggtccatcccccgggccatgccggtataaaaacaggtgcagccatcctcgatccgggcgatgatggccgcctccaccgccgccatggcccgatggaaggccgggctttgctcattcctcccccagggcagcttttcgggccggtggccggtaaagcagcagcacttctccctgtccatcgcgcgccctcccttttttatcatgatcgccatacgcttttcatcctagggcaagccccgcctgtttgtcaacgcgtgcccgcggcaggtatgttaaggtaagccaaagcccccgggtaccggggggcattggcttttatggattgctctattcactttttaagcggaattttattttggaagtatctaactgtatttgctcatcgtcatattttctactttgcaataaagatcgtaagtatagagttgtttcgtctactaccatcgtaggtgcaatggtaatactacttaaatactttttaggtaaagggaattctatataaggtatactataaccgcccccttctcttatttctattttaaatggttccttgctacgtcctggcaaaggcacattgcttggcaacttaacaataaagcgcacttcatgttcatcacaaaatccttgatttttaaatgaaaacctcagcgaggataaatataccataactaaattttgagctcgctccttagcttcacaaaaatatttataaagcaaaagcaaatcattgtaaagtattttatgttttatactatcttcataaatgatttctctaaactgcatatgcacagcttgatagtataagtccttagttctagatagaaaataatcctttacattttgatcaagtccaattacaaaaccatcatgttctggaagattagtataacttctccacattgaagccaagtctttagatcttgataaagataaaatataaacatcatattcatctagtatatctcttttattaccatcatcagtataatagctaaagggtgcgactactttagataaaatccagcaattcaataaacagttaaaaaaatcttctgaaatgttgtgttcatttaataacttgttgcctacagcataaacaatggaatatatttcttctccttcttccatatcatttaacttattagccgccgaaaaccaaaatattaaactatcacttcgaaggattccagtaagtccctgcctgcttgtatagtgaaataatggacctttaaacttattcttgcctccaaataagttttcaaaaagcaacaaccttctgtagtgttcctgtctagtatccatattttatctgcgccctcccgcatgaattgctagcctatttcccctcccgcctttcctgctcttgcaggatcagccgggcgattttgagggtaagctgacgcatgcccgcgtccatttggttgagggcctccagaaattcgttggcatctttggcgggctggaacatctcgccctcgccgtgcagcagccacgcctcgttcaccatgaaggcgccgcacaccattttgacctggccggtggatagctcgcgcttgcccagctccaccgcgctgaccgtggcctgagatatgcctactttgcgagcaaacgctcgctgactcaaaccaagttcttcgcgcagcctgtataaacgctctcccaccgtttccgcctccatcttcctttttattcagtttaagttcggacgcaaaacgcgtcaagcattcccattttgttaatttatttaatgtcattattcaaattattgacagtttataaattctattctatgataaattaaaggttttattcagggagaaaacgaggataaagcgaagcagggagaaaagttagggaacgaattttattcgttaagggggaagggggattccgatttccccctttacccccttaacaatccctaatccccccaaacggccactccgtggtggggacggaggtttctcaagctctcctatgcagataataagacatattctccagccgtttcgcttgtgctacgccctttgattatccccaacttgcctcccaaataaaacctacaaatttacctgcgggaggccgctatggacgatgatatccgccgggcgtttatcctatggttgaaaatggatgcggacagccgcgccctgctgcgccgcctgctgtgcaacgcttcccccgaacagctacgcagatacgcccaagcaaccggcatgaccgaagcggaaatatcccgcctgctacatgaccaaaattaaggcaaaagtttatataaggaggacgttggcatgtctgacaaactatcccccctgttagcgctggtgaaggaggaattccccctggccaatgacggcgaatgcaaatgcctgttgctggcgttgacggattttgccatgtacctgtcgatcctgcggcattgcgccgggacgaaggagccggatatcccgcgcctgctgcgggcggtggaagctgccgcggccgcctgcgagaaggagctgtccaggggatagcgcaaaaccgcggcccagcccaaaggctggggctttttgcgtcaaagtccggaaacggctggcgtccactttgctgcttttccaaccagtcacccttgctacgacggtaaagcagtacccactaccaatgcactggattcttcgcacagctgcgctgtgctctgaatgacagggctagtgcccctttaaccgctcttgtgctcacacgtttccttacgcccacgacccgccaacggcttctccacgtgtccacactctacctcccgggctagcgcccctttaaccgctcctacttccgtgcgttttaggcttgctcgcccgctaagggctatgtcattccgagctatgcgaggaatctctcgacgacctcttgctctcgtttgcacctctactgcggcggcaaagcgcggcccactgccgatgcaggagattcttcgcacagctgcgctgtgctctgaatgacagggctagtgcccctttaaccgctccagcggtctgtttgcattagccggtttcacccgcaactaacgtttgtcattccgagcagcgcgaggaatctcttgacgacctcttgctctcgtttgcacctctactgcggcggtaaagcgcggcccgctgccaatgcacgagattcttcgcacagctgcgctgtgctctgaatgacggtttatttgaatggcggtttacttctccaccctgtcattccgagcagcgcgaggaatctctcgacgacctcatgatctcgtttgcacctctgcggcggcggtaaagccccacccactgccgatgcacgagattcttcgtgcgacagagccgcgctctgaatgacagggcaggactacagtgttctataccccacgcacgcgctgcccctgccacgaaaaggccgcgcgctgctcctcttagcggcccaaaagtccctttctccacctgttaccctcaccgccaggccccacccgccagagatttgccgcggcccttgtgttttgggggccttttcattataatggttgggtacaagcgtagcgaaaatgcggggccgggggcgcgcccttggcccgcattgacccgaaacgggattttggaaggagagtattaagcatggacgccaaacgggtagaggccaaatggcaaaagaaatgggaggaaaccgggctgtaccgcttcaacaaagaggacgcggacaacaaattatactgcctggagatgttctcctacccctccggggccaagctgcacgtgggccactggtacaactacgggcctacggattcctgggcgcggtttaagcgcatgcaaggctacaacgtgttccaccccatggggtttgacgcgttcgggcttccggcggagaactacgccattaagaccggcgtgcacccgcaggattccacctttaaaaatattgagaccatggagcaccagctcaaagccatgggcgccacctttgactgggattacgagatcaagacctgcaagccggactactacaagtggacccagtggatctttttaaagctgtacgaggcggggctggcctaccgcaaggaggcgccggtgaactggtgccccagctgcaacacggtgctggccaacgagcaggtggtggacggggagtgcgagcgctgccacagcatcgtcgagcggcgcaacctgacccagtggttctttaagatcacgaagtatgccgacgagctgttaaacgacctggacaagatcgactggccggaaaagaccaagatgatgcagcgcaactggatcggccgctcggtgggcggcgaggtcacctttgcgctagacggacgggaggacggctttaccgtatttaccacccgggcggacacgctgtacggctgcacctacgtggtgctggccccggagcatccgctggtggacgagatcaccacccccgaaaaccgggcagcggtggaggaataccagaagatgtgcgcccgcaccaacgagatcgaccggctctccaccacccgggaaaagaccggcgtgtttaccggcgcgtatgccatcaaccccatcaatggccgcaaggtgcccatctgggtggcggattacgtactctactcctacggcaccggcgcggtgatggccgtgcccgcccacgacgagcgggactttgcctttgccaccaaatataacctgcccatcgagcgggtcatcaagtccgccgacggcggcgaggatgcgctgccgttctgcgaggacggcgtgctggtcaacagcgataagcgggacgggctgaccggggcccaggcccgggaggccatcttaagcgaattgaaagagcagggcaagggcggctttaaggtcaactaccgcctgcgggattggctggtcagccgccagcgctactggggcgcgcccatccccatgatccactgcgagcactgcggcaccgtgcccgtgcccgaggatcagctgccggtgcagctgccctacgatgtgaactttaccccggacggctcctcccccctggccaagcacgagggctttatgaataccacctgccccaagtgcggccggccggcccgccgggacccggacacgctggacacctttgtgtgctcctcctggtacttcctgcgctaccccaacgcccacgacgacagcgaggcctttaataaagaatggaccaacaagctgctgccggtggataagtacgtgggcggcgccgagcacgcctgcatgcacctgctttacgcccggttctttaccaaggcgctgcgggatttgggctacctctcctttgacgagcccttcaagtccctggtgcatcagggcatcatcctggggccggacgggatgcggatgagcaaatcccgcggcaacgtgatctcgcccgacgggtttgtggaccagtacggcagcgacgtgttccgcatgtacctgatgttcggctttgcctacaccgagggcggcccctggaacgacaacggcatcaagtccgtggcccgctttttagaccgggtagagcggctggtggagcgcaccatcgccctgcgcgggcaaaagggccgctccgatgaagaggtggagtacgtgcgccaccgcaccatccaggccgtgacgaacgataccgagaagttccagttcaacaccgccatcgcccggatgatggagctggtcaacgccctgtacaaatacgagggcgagggcaacgtggacggggcctatctggaggaagtggtgcgcgacctgatgctgatgatggcgccctttgccccccactttatcgaggagctgtgggagactttgggctacccctactcggtattcaaccagaagtggccggaatttgacgagagcaaactcacccgctcccacgtggagctggccctgcagatcaacggcaaggtgcgcgggcgcatcactttggagagcgacgccaccgaagagcaggccaaggccgccgcgctggcggacgagaagatcgccgccatgctggagggcaaggagatcaaaaaagtggtcgtggtgcccggccggctggtcaacatcgtggccaaatagaaccgcatttgccgcaagcgcccccgaaaaacgggggcgcttttttggtgcgcggcgcggcgggaaggtcccagaaggggtgcggcgcggagcattgcctgcaccccgctgcatgtggcaagtgcaccgcttccctgccaacgtatgagattcttcgctcggcctgtactgcgcggtgtgcagacggggccaacaggacgtaagaagatttctcgcttgtgctcggaatgacaaagttagaactgatgacctgcgtgggaaagtatgagttttcgttcagagctaaaacgaagataacgcgaagcagagaggaaagtcatggaacgaattatatatgttaagggggaagggggattccgatttccccctttacccccttaacaatccctaatccccccaaacggccactccgtggtggggacggaggtttttcaaactctccgatgctaatgaaccaattaattctccagccttttcgcttgcgctccactgcttgttttccatttctcttgcctccctctgacgagggaggtggcgcacctttaggtgcgccggagggagagaatccgctgaacgaaaactcatacttatccattcgcttctcgagcatgccaagtgtcattccgagccacaggcgcggaatctttttataccctcttggctgcgcaagccatgccgcagcggggagcctatccccacccgaagagggcagtaccttctctttggggcgggcgccccttaggccgcatggacagcgcaagcgcgcgcccctcgcaggcgccgggcacagcaaaaggcccgcctcccctgccgggctgacgggccttttatcgcgtccgttagagatccagcggcgaaaagccggagaggatggtctccgtcccgtcagccgtggcgctggtcacggtcatcaccaccatatacttccctttacatttgacaaaggtggtgatatccatgctcatgtccaacccggcttcgggctggaccagctttaccgtatagggcaggctggtaaacgtcaccccgccgatctcctgctcggcaatttcgccaaaggcgatcgtcatgccctgcgaagtaaaggccttctccatctgggattgggacagcgtcaggtactgccgttccgacagggagaccagcgcctcctctaccagcatgtttacattatccccttctgaggacacgcacatcatctcgtagcctaagtttccggcagtcttctccagcatctgctggccttcctcatccaggatgacctgcccgcccgcctgcatggactggcgcatctgctcttcatccaacatgatcatccccttgggcggggtaaactgaaggcccagccaggtgctgatatagccgtcctcgctcagctcgcccgggcgataggcgccttcaggctcctttgcaggggtgggctcgggcgtggcggtaggcgtgggcgcaggcgtaacggtagcgctggctgttggctgcgggcttagcgccgcatccttactgaccagcgccttcaagcccgcctcccgagaggcgcagcctgccagagccgtgcaggccaacgccagggccagtatgcagcagagtagctttttcttccccataattctacctctctctacaatttttatactgatattgtattatagctgcaggacggggtcaatctcccgtttagatagcagaggatgtgatgaactggaagccgggcagcagaccggcgcttgtccgcccatgggccgaggggaacggttaacggggatacgcatctttttcgctgcgctggggaaaagcgaaagccgctgccgggtattaaagccagggcgtatcgccactgcacatgcggttaacggggacgatgtcccctgtggggttacgctgggcaacagggacacccattgccgggcaatgaagtcagggcgtatcgccacagtacatgcggttaacggggacaatgtcccctgtggggttacgctgggcaacagggacacccgctgccgggaaatgaagtcagggcgtatcgccactgcacatgcggttaacgggggcgttgcctcgctgtgttggtaaaggacgaaagccgctgccgggtattaaggccagggcgtatcgccactgcacatgcggttaacggggacgatgtccccctttggaataagcgtagtcaaccagcacacccattgccgggaaatgaagccagggcgtatcgccactgcataggcgatcagcgggggcggtgcctcgctgtattggcaaaggtggaaagccgctgtcgagcgttaaggctggggcatgccgccaatgcacatgcgattaacggggacgatgcctcgctgtgttgataaaggacgaaagccgctgccgggtattaaggccagggcgtgtcgccactgcacatgcggttaacggggacgatgtccccctttggaataagcgtagtcaaccagcacacccattgccgggtattaaggccagggcgtgtcgccactgcacatgcggttaacggggacgatgtccccctttggaataagcgtagtcaaccagcacacccattgccgggaaatgaagccagggcgtatcgccactgcataggcgatcagcgggggcggtgccccctttgggacagggcgcggcgcaccagcacctgggccaccgcccctatcggcacggccaggatcatgccggggatgccgaacagcccgccccccgccagcacggcgatcagggtcagcgcggggctcaggcccagcgcattgccgaacagccggggcaggatgatgtagttatccagcgcctgtgccaccaaaaggtagcataagccgcctagcaccacctgcgtaccgtccatcagccccaccagcgccaccaatgccccgccgatcagcgagccgatataggggatgagattgagcaccgccaccagcacccccaccagcgccccgaaccgcagcccggagagggaaaagccggccatcaacaccaatgccagcagcgcggtttccaccaggcgcgcggtaacgtactggccaaaggcccggtccacctcctggaccagggcgcgcagatgccgctgccgctccctggagaggaacagcccggtcagcctgccggcgatggccgcgagcttttcccgctccgccagcaggtaaaacgacaccaccacccccaggcccaggttcatcaggatgcccagcccgttcatcaaatggtaggccacctgccccgccagcgcgctcaggtttagggtcagccccgcggccgcctcgtccagcgcgcgcagcagcccctctgtcagcgccgggtcgctcagcagcggcacccgggccagcaggccgccaagctgcgctttgagcccggccatatcctgcggcaggcaggcagccgcgtcaaccaaattggcgtagacagcgggcagggcgtacgccgccgtcaacgccagcgccccgccgatcagcgcgtacagcagccccagcgagagcgcgcgggcctttatctccagcccggggaagatccgaaggcaacccttttccagccccgaggccagcggccgcaggatataggccaggatggctccgcagctgagcggcagcatgccctgccacaggccggccgccgcctgccccagcgcgccccacaggttccccagggaggaaagcccctgctgaaacagcaacagggcagccgcggtgacgaaaagatagaaggccggtttaaagtaccgtggatcgggctttcgcatccgcatgggtcacctcctttggggctgtcgccctttattccgctcattgcggcgctattttctatagggcagtgcacgccaggggcgttgcgactttgccctgctttacgccccggggctatcgcccttttttccgctcaccacggccctattttctatggggtagcgcccgccaggggcgttgcgactttgccctgctttacgccccggggctgacgcccttttatccgctcgttgcggtgctatttcccgtagggtagcacccgccaaatacgttgcagcttcgccctgctttacgccccggggctatcgcccctttaaccgctcattgcggtgctattttccatagggcagtgcacgtccccctttactcctatgcggcgccgggtgacaagattccccggggctatcgcccttttttccgctcattgcggcgctattttctatggggtagcgcccgccaggggcgttacaatttcgccctgctttaagctcaggggctgacgcccttttcaccgctcaccacggcactattttctatggggcagtgctcgccaaatacgttgcagctttgtcctgctttacgctcaagacttcatctcaccacaagtctgtcattccgagcgatagcgaggaatcttttgacgccctcttggttttgcctgcaccgcgcgcgccgcattggctaaatgctgtgccaactgccaatgcgtgagattcttcgcgcgggctttgcccgcgctctgaatgacagggggctgacgcccttttcaccgctcaccacggccctattttctatggggtagcacccgccaaatacgttgcggtttcgctctgctttacgctcaagacttcatctcaccacaagtctgtcattccgagcgatagcgaggaatctcctgacgccctcttggttttgcctgcaccgcgcgcgccgcattggctaaatgctgtgccaactgccgatgcgtgagattcttcgcgcgggctttgcccgcgctctgaatgacagggggctgacgcccttttatccgctcacagcggtgctatttaccgtagggcagcgcccgccaaatacgttgcagctttgccctgctttattccccggggttgaggccctttttccgctcttcactccgctattttccacaccaccacgcccgcctcccctttgcgggccggcatcccctttcccgctgcaccggcgcgccataattaagacaaaagacagataataaggcgagcggtccgcctcatttcccggcgcgctatgtcataaaattgaaatttcacaatttttaccctttgcgaagggttgattctatgttaagatgaagccgtttggtgttgcaccatagagatggagagaggggtgctacagatggacatagcacagattctggcggtggtcatctttatcgggatgtttttgatgatcgtgctggacaagtttgaacggcattggatcaccctgggcagcggcgcgctggtgctggtggtggtctttggcctctgtatgcagaatttcggggcgatctgggatacgctgaacctgcaaagcatggtgatgcccagcttctggtacggcgaggccgctgataccaccggcggcatcaactgggagaccattatctttatcgccgggatgatggtgatggtggagggcatgggccgggcgggctttttccgctggctgtgcctgacgctggccaaggccgtgcgctaccgcacggtgccgcttttgatctgctttatgtgcatgagcgggcttttggccatgtttatcgattcgatcacggtggtgctcttcctggcggcggtgacggtggagctgagccgggtgctcaagttcgacccggtgcccatgatcctggccgagatcttctgcgccaacctgggtggggcggccaccatgtgcggggatccgcccaacatcatcatcggcacctcgctgcactacacgttttttgactttatcaccaacaccggccccatcgtggcggtgtgcttcgtgctgacggtggtttacttttacctgtgcttccgcaagcgcttaaaggccagcgacagcgcccggggcgaaggggtggcctatcccgagcccaaaggcgccatcaccaacaaaaaggcctttatcggcgcggcggcggtgtttgccatcgccatcgtgctgctggtcacccacgcggagaccgggctgacggtgggctgcattggcgtgctggtggccgcgctcaccctgctcatcaccgcgctgaccgccggcagcgaggatgtgcgctacatcttccgccatatcgactacaaaacgctgttgtttttcatcgggctgttcatctcggtcagcgggttggagcataccggcgtgctggtagccatcgcggagtttatcggggtgattagcggcggcaacatcgccattatcatcgccatcgtgctgtggctctcggccatcgccagcgcctttgtggacaacattccctttgccgcaaccatggtaccggtcatccagtccatggccgcaacccaggggctggacctgaacatgctggcctggtcgctctctctggggacggatctgggcggcaacgccacccccattggcgcctcggccaacgtagtgggcacttcggtggccgccaaaagcgggcaccccgtcggctggggcaagtactgcaagtattgcgtgccggccacggttatggttataatagtgtcaatggtatgcctatatataaaatacctataaagggtgggggaagatgtatcaacagctgatcgtaaccattggccgtgaatttggcagcggcgggcaccaaattgcagaaacgttggcccagcggctggatctgccgctgtttgacaagaagattttagagcacgtgggctactcccaggaggatatacaaaaatacgacgaaaagccctttaatccgctgctctcccggcgggtggggcgcttttccaactcaattgaggaggtgctggccgagcgcacctttgactttatccgcgagctggcggataagggcgagtcctttgtggtggtggggcgctgcgccgagcaggtgctgcgggataaccccaacgcctactccatcttcgtgctggcggacgaggccaccaaggtcaagcgcattgctgagctgtatacgctgaccgagcgcaaggccctggagctgatgcgcaagcaggaccggcggcgcaaatattaccacaacacccatagcgacatcaagtggggggattcccgggggtacgacctatgcatcaattccagcaccctgggcgtggataagacggtggaggccatcttgcagtttttggcgctgcgaaaggacaggtaagcggcgcgttgggcgggcggtagcctgcgcggcgttgcgccccggcactaaaggggtaaagcaatcatactcccagcatgcgctgtccccaaaacgaccacccataatgagcggaacaaagggcggcagccccctatatgaaaagcaaggcaggctgtaaggcttctggcgggcgctgccctatagataatagagtcgcaatgagcggttaaaagggcgatagccccgtggcaggcagagcaagggtgtgggaataagctggtggcgggcgctgtcccccaaaacagccatcctgctaggagcgaaaaaaagggcgatagccccctatatgaaaagcaaggcaggctgtaaggcttctggcgggcgctgccctatagataatagagtcgcaatgagcggttaaaagggcgatagccccgtggcaggcagagcaagggtgtgggaataagctggtggcgggcgctgtcccccaaaacagccatcctgctaggagcggaaaaaaagggcgatagcccaaggatgagtttggaaatactaaaaggccccgggcaaattgcccggggccttttatgatccatgcggccttacagccactggacaaagccggtcttatctacgcggttatagcccgccctttcgtaaaagcgcagggtgcccgcctccttggagccggtgagcaacatcagcttatagcacccggcctggcgggcccgctcccgggccgcgtgcagcagccccagtcccagcccctggcggcggaaggccgcatcgcacaccacgttttccaccagcgcatagggccgccggccgtgggtgaggttgggcaggatgactagcgtgcaggtcgcccggggcacgccctccacctgcgccaccagcacctgcatgcaggggttggccagcatttcggcccaggcggctgttgccgcatcgtccgctgcggcgctttcccccggcttgagctgggcgtacagcgccagcagggcgggcaggtctgtctccacggcttgacggatggtgtaagccatcgtttgcctccttccatcatttcctgtcctagtcctcccgggcagccacgggcgaggtgtccaatgagggcaaagccgcgcttttccgtctgtagcctgatctctccgtcattccgagcggcgcgaggaatctcttggtgtccgctgggctttgcccctgccgcgccggagtggtttaatgctactccaactgcccatgcagggattcttcgcccagcaaaagctgggctctgaatgacagggactgacgcccttagttccgctcatcgcggtgctattttttatggggcggtgctcgccagggccgttgcagctttacctatttttatgatttcatctcgctgcgggtctgtcattccaagcagcgcgaggaatctcttggcacccgcttagtcttgcccatgtcgccgcgcgtcggtctaaagccacgccgactgcccatgcaagagattcttcgctcggccttacggcctcactctgaatgacagggctatcgccctttttttccgctcacggcagggtggttgttatgggaagtgcacgccaaaggcgttgcagcttgcttcgcttctcatacagggggctgccgccctcttaaccgctcctagcagagtggttgttttggggtagcgcccgccgtcgtcttactcccatacccttgctctggcgccctcttttctacgctcggctcggcccttgccctaggcctcctccaaaatggccaggccccaggggggcaggctgatctcctcctccggcgcgacgggcttgccgcccacaagctcggtggccgggccgccgaaccagtgcaggctgcgccgcagccctgagtagttgaacagatagcgcaccgctttgcccgcccggttgcgcccgccccgggcgatcagcgggaagtgcagcggcggcggggcgatccccgcgtcctttgcggcggccagcaccacggcctccatggcctccccctccggcaggtagcaccctaaataccaggccgcgccccggccgcaggcgttgcgggtcagcgccgcgtaactgccccagaagggatgcgcgtaaccggccagcacctgtgcgccgcagggggtcaaaagctccatccacccggcggccttggccccggaaatgccgggcagctcgccctgcagggttaccccgtcgggcagggtgaactggctgtagctggccccgaacagctcgctcagccccgcgggctgcagggcggcgcgcaccttggtctcctcatcgctaaagccgaacttaaaggtggccagcagatgcccgccgccctccacgtagcttttcagcctttgcaaaagagcgtcgtgcgcgcagtacagcgccggggcgatcaaaaggtcgtaatccgccaggcacccgctctccgggccgataaaatcgcagccgatattctggcggtaaagtgcgtcgtacatcccgcgcaccacgtcgttatatgccaccccgtcccccatggggaaggccgcggcgccggtcagcgcctcgtttgagaccaggatggccacccggttttccaccttgaggtcgatcagcttctcgctcagccgcgcaaaatccgcgccaatggtgcaagcctcccggtaggtagggttgggggcaaaatcctgggagagcaggcccttccaataggtctcgcagccgttatgcagggagccccaatgccagtacatcaccccgtttgcgccgctggccaggtggctgaaggcctgcagccgcagctggcccgggtagggcagccactgggggaagccctgggcctgggtctccatcaccaggtaattatcccctttcagcgagcggttcacgtccccgccaaaggcgatctccgcgccggtgagataatcctgggaggggtggtaaatatccacgctggcaaagtccagcggggcgctggcggcaaagtgatccacatccggctgcacgccgaaggagtagccccgccaatcgtaatcaaagttatgggtgatgaactgatcttcccggcggtactcgttgatgatatccgcctgccactgcaaatattcggtgaccagcttgcgctggaagcgggcgaacgccccggtcagcgaggcgttgatgctgccccgcacgtccgggaaatcctcccaggcgtcgatgcggttggaccagtagtccagcccgaaggccttgttcatcgcctccagcgagccgttaaagcgccgctttaagtgctctacaaactggcgctgcacgttctccccggcggtaccatagtgcttggtctcgttatccagctggtagccgatgacgtagggcgcgtccttgacgtgttcgagcagcttgcggatcacccgctcgccgtaatagcggtaggccgggtgggtgatgtccatgttctgccggcggccgtacagcccccggccctcctgcgtcaccgccagcacgtcgggatgctgggccgccagccaggtggggatggcataggtgggcgtgcccacgatcacgtcgatgcccgccttctccatggcggagagcacccggtcgataggagtaaaattgaacacgccgggccggggctccagcgtggaccaggtagactcggcgatgcgcacggtgttgatgcccgccgcccgcatcatctccacgtccttttccagccgctcgcagggcatgtactcgtcgtaataggccacgccgtagcgcagcttggggaagtgtttcatcatctattatccctctcttccttcccggtcgtaagcgtccatcagctttaggccgtcctgatggtggccggcatagttggcaaacagccaggcctcgatcatgcgcagcgcctcgggcacggtgatcatccacgcgccggtgcaaaggatattggcgttgttgtgctcccggctcatgatggcctggaagatgtcaaagcacagcgccgcgcgcaccccgggcaccttgttggccgccatggccatgccctggccggtgccgcacagcaggatgccccggtccacctggccggagaccaccagatccgccacctttttggcctcggtggcgaacagcccctcctgggcggaatcgcaccccacgtcgtaaatgctgtagccgttttgctccattactttaagaatctccaccttaaaatcgtaggcggcggggtcgcaccccacggcgagtttcagttgctgttgcatccatcatttcccccttcttttatttatcgttccgccaggcgggccagcgcctcctcctttgtggggaggaagaacacctgccgcccgcggttgctctcgcggataaagtcccgcaggggcttgctggtatagcgggtaaaatccccgtaaaaggccgcgcgtatgccgtaggtgacgaacttttgcaaaatctccccggccataccgctgctcaggacgaaaaattcctccggcatggcccgtttgtcgatggccacccggtcagccccggcggcgtatttgacgtccatgatcaggtccagcgcctgggcggcgccggcgataggggcgcccgccccgcccaggtgggcgatgggcacgccgtctatgattaaggtttcgatatccatgttttatctccttttatttttccatatcctgtttcttattttttcattttaccatatcctaccggcagcgcgtgggaaaagccggccggcggggcggctttttgggcggcgcggtacagaccgggccaagcggttgtaaagagattcctcgctagcgctcggaatgacaggttaccccgctatggcaggcgaagacgcaggatggccccacatggctaggaacggttaagaaggcgacagccctgtcattcagagcgaggccgtaaggctgagcgaagaatctcctgcgcgggctgggagcagcgcttaaacaatgcgccggggcctctccctccaccgccttacggcggtccccctccctcggcagagggaggcgtgggcaaagcggattagcaaagctgcctttcgtgcaggcgcttgacccgtaggtgcaggctgggccaagcggttgtaaagagattcctcgctagcgctcggaatgacaggttaccccgctatggcaggcgaagacgcaggatggccccacatggctaggagcgattaagaaggcgacagccctgtcattcagagcgaggccgtaaggctgagcgaagaatctcctgcgcgggctgagagctatgcttaacttgcgcggcagggatgctttgccccccgcaatgcggtgcagaccgggccaagcggttgtaaagagattcctcgctagcgctcggaatgacaggttaccccgctatggcaggcgaagacgcaggatggccccacatggctaggaacgattaagaaggcgacagccctgtcatgcagagcgaggccgtaaggctgagcgaagaatctcctgcgcgtgctgagagctatgcttaacttgcgcggcagggatgctttgccccccgcaatgcggtgcagtccgggccaagcggttgtaaagagattcctcgctagcgctcggaatgacaggttaccccgctatggtggtacaggctaggccgagtgtgcggcgcggctactctccctccgacgcggctgcgccgtctattgcccgcccatgggccccagcgccccgtcctcgggcagccaaagggccacggcgccgccgcccaccgggaagcgggcgcagccgttctccccgatcaccacgcgcccggggcagccgcccagagcatcgtaaaaccggcggccggcaaaggcaacgcccatgcacatctccttttcgccccccggcccatcgctaagcaccgcggccaggccgctgcccgggtgggcggcatcccctgcgcgggtccagccgacgatgttataatcgtcaaaataatcggtctgctcgccataggcgcagtatttacgggcgcgcagcagcacgtccagcaccccttgcagcgggggctgggcgccatccccggtgccgtaataatccccgtaaaacacgcagggcagccccgcctcccgcagcaggatcagcgcgtagcaaaggggcttaaaccagctttgcaccggggagtgcagcgcctggccgcactgggtatcgtggttatccacaaaggtcaccgcccgggcagggcgcgcggcggtcagcgtgccctcgaagatacggcgcatatcaaaattgccgccgctggtggaggcccggtaaaagttatagtgcagcggcacgtcaaaaagctgcatcacccttccgcaggcgtctaagtaatgggtcagcatgcccacctcgccgttccaatactcccccaccgcgaaaagcggccggccgctgagcttgcgcaggcgctccagccaatgggtaaaaaagtcaaagcggatgtgcttgaccgcgtccagccggaagccgtccgccccggtggtctgcaagtaccacgccccaaaggcgtccagctcgtccaccacctgggggtttttggtatccaggttggcgcccatcaggtagtcaaaattgccccgctccttatccacatcccgctcccagggcttgccctcaaagcggaagatggcgctgcgctggccgccgttatcccaatccacggcgttaaagtgggtccagttccattggaaggtagagtatttgccgccccggccggggaaggtgaagcgggtccaggcgtcgatctgctcctccccgccgatctcccgggtgcggtcggcctcgtcgctgcggcgcacggtcacccgctcggtctcgtccgcgccgatgcggtggttgagcacgatatccggatagaccgcaaggcccgcttggtgcagcgcggcgatggcggccaggtactcgtcccttgtgccgtacttggtgggcacgctgcccttctggtcaaactcgcccagatcgtacaagtcgtacaccgcgtagccggtatccgccccgcccttggcccccttgtaggccgggggcagccacacgccggtaaagcccagctgggccaagtgctgcgcatccccggccgtgcggcgccagtgcgccccgtcgctgggcaggtaccactcaaagtactggatcagggtctggttcaaatgccttcacctccgctcttgcgtaaaaagtgttgccggggcttgccgctgttagagcgcgcacaaaagccgtgctgtctgcaccccgccgcatatggcaagcgcactgccaactgccaatgcgcaagattcttcgctcgtccttcggcctctctctgaatgacagggctatcgccccctcatccgctctcggcttttgcgtatttccaaacttctgccgcccaccacaagcgttattctgttctgaatgataacgtagcgtgtgcaaaagtatactttttgtatgcgaagcgcgagcctaagtcctgtcattccgagccgcaggcgagggcgcagagcgaacgccgccagtggaaatctatagtgcccgcgcccagtggagtacggagtgagtgccgccagtggcggaagcaacgaacgcagtactctgtaagtacgtggtaagtccaagcggcgttacccgcgcaggacgaacccgtaacgaacagaggctgacggacccgcggagccgaagggcacgatgatttctgtgagggtacgaaatgagcgccgcctgtggcggatgaagcgagtgcagtacccggtgagcgtaaggcgcgcgcaagtggcgtcagccgcgcagcgcaagcccacagcgaaccgagagttgccgggccttgccgttgttagagtgagcacaaaagccgtgctgcctgcaccccgctgcatgtggcaggtgcactgccaactgcccatgcatgagattcttcgctcggcttcgcctccgctctgaatgacagggctatcgccctttgttcctctcctgccgttgcctgtttccttgcccttgcgcccgccaacgcccttgctgattaccgctctcccctatcggggcttctcgctctttttgccgctcctagctttctatgtttctttaagctctcgtccgccataaacgttattcctgctacgagccatcctccattctgaatgacagcgcagcgagtgctaaagtatatctctccactcatcaacagtatgctgcacatgtcattccgagcgcaggcgaggaatctcttgaccaccgcttggctttaccttaaggcgcggcggctgggggcgggctccgtgctcccgccactaaggtttgttgttttgccagtccaaacaggccccgcgcccgccgtgcgcgctaacccgccgccctccccttcagcgtgccggggagccaaacagcgcgtccgcatccagggcggtgaaatcggccatcactttgtccaccccgggcagggccgccatgcgatcggccgcctccccctgcgccacggctaaaatgcgcccaatgcccgcggcgcgggcggcggccaccccggctggggcgtcctcggccaccacgcaggcctccggcggcaggcccagattggctgcggccttttggtaaatctccgggttgggcttgccgggcagctgcccatcgtcgtagacgatgcgctccagcgcaaaccagcggtccaggcggaactgctccataaaaaagcggacgttgacgatctccgacccggtggcgatggtcatgggcacgccccgggccttcagcgcgtccaaaaaaccttcggccccggcgatgaggcggaagttcgccgcgtccttttggcacagctcccggtagatggcctccttttcgcccaacaggcgccaaacctcctgctggggcagggggcggcccagcaggtagcggaacaccgccgcccccggccagccgttgacgtgctgaaccatctcttcctccgtcagggcgcgcccgccccgcaggcgggaggagatcaccccccaggcggccttttggtaggcgtcgtcccggtatagggtgccgttaaagtcaaagataaaacccttgtagtgcaaaagcatcctcctataatcagtaattgttcagctccgggtaaaacaggtagcgctccccctgcttttcccagcggccggcaagcccggcccccagttcaaagtgcagcatggcgatgcccaggtccagcccgccgcttttatccccgccggtgagggcgacggccacgtgcccccgctcaaaggtaaagtacaccgccttgcggttcaaggccgagggcatgcgccccaccgcctccatcccccgcataaagcttttgggcgtgccctgcacctcgttaaagagcttgggcagttttttgggcttgcggtgggcaaacttcagcatcagccgctcggtcaggctgcgcttgggcccggcgtagcccagggcgatgacggcgcaaagcgcctcccccggggccagcttgacgcaatccttcacgtcctttttatgataggtggcccccacccagcagctgtccacccccagcacggtggcggccagcaccagctcctccccgcagtagcccatggcgatgcggggcgtatccggcgggcccaccagggcgatgaccgcctgcacgtttttgaacatgccgtacccgcccgccaggcggttgaaaaagcgggaaccctgcgccaggtactggatgtgcaggccgctttttttgttgatgcgggcgatctcaccctttaacacctgctccgcccgggcggacaggggcttatccgcaaacgcccggcgggagtgccgccggtagatggcagagcgcagctttcttcggtccatattctgatccccctttgtcttaatgctctctttatttctattgtactctgaacccgtggttttgaggtgaacaaaatctttccggtttgtaaattattacgcccaaagggcaaattgggggaagcgggcggcccgctcccctttccccggggcaaaagacaaaaacgcattgcgctgggcgggcttttgggttaagctatagttagggccggatagggccccttgagaggagaggtttggatgttgccaagagcccagatcaagcgcctggcaaaagagcgctttacggcccattacgggcgcaccctgggcggcgtgctggccgccggggcgctgatctactttgcgtcgccctttatcgtgatctccccggtgctgatggtggggctgagcctgtttgccctggccacctataccgggcgggaggattgccaggtgggcatgatctttgacggcttcgagcactttggccgcaacctgggcagcatgctgctgcagtggctgtttttattctgcgcgtacctggccggactgctggcgtttatgctggtggggatcatcttcggtattgccatgggcatatccgcggcgacgggcggcggcacgatggctaccagcgccatattttcagtatttttgggcctgatcgctttagccatcctggtgctgatggcggtggtgtactacatcctttcgatgacccggtttatcctggccgagtctcaccagatcaaggcctttgacgcgcttaagctcagtgcgcgcatcaccaagggccaccgggcggatatctttgtgtttgacttgagtttcttaggctggatgctgctgggcgtgctgacgctgggcatcctgaacatcctttacgtgatcccctacatgaccacggcgcaggccgggctgtacaccgagctcaagcgcgaggccatcgccatgtacaaggtgaaggaagaggaatttaattaagcgcgcaggcgcaccaccggtcgggccgaagggcccggccgtttttttatgtcctgaaggtgcgtgcggcgcgcggcggcgctcaaaccgcgcggcgcagggcactccctccgtcaggctgcgcctgccacctccctcaaacgagggaggcaaggggaacggtgagagccggggtgaggcgggtcaggcacttgacctgtactgtgtggcgcaggccggggcaagcggtaaaagggcgcaagcccttattatacagttgtaagctagaaacaaagccgctggcgggcgcagatgcctggcgcgtgcaaacgccaaaagcggttaagaaggcgatagcccctactgtgcagtttgaacgagagacaaagccgttggcgggtgcgggcgtctgtcgcgcacaagcgccaaaagcggttaagaaggcgatagcccctactgtgcagtttgaacgagagacaaagccgttggcgggtgcgggcgtctgtcgcgcacaagcgccaaaagcggtcaaaagggcgaaaagcccctactgtgcagtttgaacgagagacaaagccgttggcgggcgcaagcactaagagcggctaaaagggcggctagcccttttgtcattcagagagaggccactaggccgagcgaagaatctcctgcaggggcagttggctgggcagaaccagaagcgctggccatacagaagtgaaaaaagccatgccacagtggttgccaagagattcctcgcctccgctcggaatgacagaacagataaagccaatgcctggcgcgggcgtctgtcgcgcacaaacgtcaagagcggtcaaaagggcgaaagcccccctgtcattcagagcggagggaagcctggtaccaaaataaagcctatagcgtgcttagaggcatggagcgcatgtagactgtgcggttaggggggcgaagtccccggagcgaagaatctcgtgcgtttccactggggagatccgtagcgcaaatgccgtgccgcaggcaaaaccaagcaatcctcaagagattcctcgcctccgctcggaatgacagaacagataaagccaatgcctggcgcgaacgtctggcgggcgcaagcactaagagcggctaaaagggcggctagcccttttgtcattcagagagaggccactaggccgagcgaagaatctcctgcaggggcagttggctgggcagaaccagaagcgctggccatacagaagtgaaaaaagccatgccacagtggttgccaagagattcctcgcctccgctcggaatgacagaaccagagcaataaagagggcgaaagcccttatcatacagttgtgaactagaaacaaagccgctggcggcaaacaactggcgcgtgcaaacgccaagagcgatttaaagggcgcaagccccctcaggcccgtttttccaggcgggccaaaaagtcctgggccataaagcgggcggggccgtcctcgtcgttggcgccgatcaccccgcgggccacccttttcagctccggcacggcgttgcccaccgcgtacccctcgtcggccgcctccagcagcgggatgtcgttgaccgcgtccccaaaggccacgatgcgcccgcagcccaacatccggctaagcgcccgagccgcggcggccttggtggcctctgggggcatcatctcgcaccagtaatagcggctgcccagctccctttggaaggtgacccgcacccccttgtgcccctcaagggcggcatacaggggatagacctgctcgcgctcgcccatgcaggtcatataaaagctgcggccctcatagagcgcatcctccccctgtaccgggcggaagcgcttatccccggggcgggcggccaggtactcccgcaccgccgggttggctgccccggcgaggtagctgacgcactcccgcgcgccgatataggcgtaaaccaccgggcttaagcccatggcggccatcgccccgcgcaaaaacgcggcggtatccgcctcaaaatagcgggcctccaaaatctccccatccgtgcggcggataaacgtgccgttgtacacgatcaccggcccgggcagggcgatgccgcccatcaccttctgggcgctggagagcgagcgggccgtggcgtaggaaaaacacatcccccggcgggtaagcgcctgcagggtgcgggcggtgtaggcggatagctttccatcccggcccagcagggtgccatccagatcgctgacataaagcgtacgcaaaaaatcacccctttttaccattataaggcagggcgggcaggcctgcaaagggcaaaaaaaacggcctatccccaataaggcgggccggttgcgggtatgcttaatggcaaaagggggtgaaaggatggaacagggcagaaaatacctgggcgtggtggcccactacgcgccagacggacggctgacgccccgcagcatcgagtgggaggacggccggctgtaccggatagaccgggtgctggacgcgcggcccatgcgcagtctgaaggcccagggcaccggcacccggtacaccgtggtgatcggccggacgcgggcctacctctattttgaggacagccgctggtggctggagcggatgtgagggggccttagcccttttgaccgcttacggcgtggatgttcgtcagacgcccgcgcccggcagcggctttgtctctggctcacaactgcacagtaggggctgccgccctcttgaccgctcttggtgtttgcacacgccagacgtttgcgcccgccaacggctttgtctctggctcacaactgcacagtaggggctgccgccctcttgaccgctcttggtgtttgcacacgccagacgtttgcgcccgccaacggctttgtctctggctcacaactgcacagtaggggccttcgcccttttaaccgcttgcggcgtttgtgtgcggcaaatgcttgcgcccggcaatggctttgtctgttctgtcattccgagcgcagcgagggtacgaaacgagcgccgcctgtggaaatctatagtgcacgcgcccagtgggcgaaaaagggcacgatgatttctgtgagcgtaagttgagggcaagtgccctttggcacgaagcccgaaacctcagcgacagaggcggcccccgagatggccctggtaagcgagcgcagtacccggtaagcgtaaggcgtgaaagccgaacccacagcgaaccgagagttgtctggctttgtcgttgttagagtgagcacaaaagccatgctgtttgcaccacaccgcacatgtcaagtgcccatcccgcttccgcttcggctctcaccgccccccccttgcctccctcaatgagggaggtagcagacgcagcctgacggagggcgtgttgtacgactcacagtttaagcactgccaactgcccatgcaggagattcttcgctcggccttacggcctcgttctgaatgacaaaggggcttgccgcccttttagccgcttgcggcgtttgcgtgcgccagacgttcgcgcccggcaatggctttgcgggcggacgccttgtggctttccgccattttggggctttattcagcggaatctctccctccggcgcacctaaaggcgcgccacctccctcgtcagagggaggcaaaaaaggtagcacataaacaaaaaggttggagaatagtatgcgtgcgccaaacattctcacccggcagaggatcctttaggctggccgcccgcccgtgcacttccctaccgctccccatcccgggcgcggtcgtagaccacctggccgttcaccagggtgtacagggtgcaggtggcggtctccagcggattgcccgaaaagatggcgatgtccgcgtccttgcccgcctgaagggtgcccacccggtgatccacccccaggatgcgggcggccccggcggtgatggcccgcagcgcgccggcctgccccaggccctcccgggcggccagtcccgcgtaaatgggcaggtactggatcagggtgaccgggtgatccgagcagatggccacctccacccccaccttgcgcagcacgcctgcggtcttaaaatccaggttttccacctccaccttgctgcgggaggccagcgatggccccacaatggccggaaagcccgaggcggccacctcgcgggcgatcaggtgcccctcggtgcagtggtccagggtcatcttcagcccaaactccttggcgatgcggatggcggtgagaatgtcgtccgcccggtgtacgtgggccttgagggggatctcgccccgcaggacgggcaggtaggcctcctgctggtaatccaccttaaaagagcggccggccttttgggcggcctgcttttcatttaaatagtcccgcgccttgttaagcgcctcccgcagcatggcggcaatggccatgcgcgtggcgggtgcgttacccttgccgccgtaattggtcttggggttctcgccaaaggccaccttgagcgcggcgcgctcgcgcagcaccatttccgcgatattccgcccgtgggtcttgagggcgacgaactgcccgcccaccacgttggcgctgcccggcccggtcatcaccgtggtaatgccggcggccagggcgttatggaaggcgctgtccatagggttgaccgcgtccaccgcccgcaggcttggggtgagcggggtgaccaactcgttgcaatcgtcccccacgccgcccacccgctcttccgagatgccgatgtggcagtgggcctccaccagcccgggcagcacccagccgccggccgcgtcgatcctttgcaggtccttggtatcccgcagggcgatgtcccggcccacggcggcgatcttcccctcccgcaccagcacgctgcccccggcgatcggcgggccggtcatggtccagacggtagcgttttcaattagaatcaaaataaatccttcctttataaaagcgttcatggctattatgcggcgcgcctttgggattatacgcggcaaaataatcatgccacaaagctgaataaagcccgcccgctcggcccataatagttttgaagttgaacgaaaggagggaaaaaacgatgaacaataattcttccaagcagaaccagtttaacaacaacaatcagcagaacaacaaccagcaggattgcaacaaccagaaccagaagaacaataacaacaatcagcagaacaacagcaacaacaataaccagcagaagaacaacaacaatcagcgcagcttctaattgaagccttgctgatcggttaaaccttaaaaagagcgtggacggcgtctatattggaccgccgcccgcgctcttttaccgtctatttttttattgggatcggggcgcgggcagggccaactgacacctgttccattccctccgctccgaatgacaggggcttgcgccctttttgaataacagcgctttttacacggctctcctccctgtcattccgagcgcaggcgaggaatctctttacaaccgcttggctttgcttaaagtacgggcggctggggtagtggggctaccggcgctgcgggtagggctggcgcacgtcggtcagccccaccagatagtctacgctggtaccgtaaaaccttgccagcttgatgaccacctccagcggaaagttcagcacgccgatctcgtactgcgaataggtattctgtttaacgtgcagcagctgggccacctgcgcttgcgtcagctcgcggtcgatccgctcagagcggatgcgctcatactttaaaggttcaattcgcacttttatcaccagtaccagcgtaggctatctgattttcagatgttgccgtatataaaacaactgacttgaaatgatttttactcgctcttgcttatacgcgctaagtagcatgggctgtctatttctctttcagcctattcatatgctcggctaggtgggtcagcatatccagctcttcatcggttagtctgcgcgcttgcgccaccagccggttgacccggacaggattctcataatcggcgctaaaaaactcttccagcgtgacctcaagataatcgcatatctcgatcagcgtagccagagagggtaaacttttattattaatcattgccgaaaggtaggaggcgcttcggccgatctcgcggctcatctgcttttcagagacgcccttttgcagccgcagctcactaatgcgctgcagtacaaaggccgtcaccttcattttgtccaattaaaagcacctccttacaagatcaagtataaggaagatcagctacacttgcggatttttattagtctttattaattgaaaaacttaatattaggttttataatgacaaaaagactattaattactttacttcttcaagtatttactaactattaagtttttacacagtatacggctattaaaaggaggcatggatcatggctatcgacccgcagcccctgctggaaatggtgggggaggagttccccggtacggacatgagcgagcgccgctgcattttactggcgctgatggatctatacctgctgctggaggggatgcgctaccgcctggacgggcggcatccggacatcctgcgcctgctaagggcgttggatgcggcgacagacgaaggacttcccgataataattaggtaagacttccctgtcccgtcatcccgagcgtaagcgagggatctcttaacggccgctgtggcatggctttttcacttctgtatggccagcgcttctggttctgccccggcaaattgccaaagcattagattcttcgctcggccttgcggcctccctctgaatgacaattaatcgaacgttaaagtatacctttatacacaagtgtgtcattcagaacgaaggcgaagccggagtgaagaatctgatagcgtagccggaaagaggcgctttatcgggactacgaggatgcaggccgcaggcgagaggttgtaacgagattcctcgcttacgctcggaatgacaagggtcgcttgctgactgtgcataaacctatactttaacacgcccggcgcccgccatttcccccgcgccacccctttctccccgcgcccccggcgggcaggggcgggaaacgtgcagttaaacctgcgcaccgtgcatttgtatttgctggttcattcattttgtggccggacgagccggatattgtgaaattcttaacgcataaatgcagaataaattacatagaattgcaaaaaatggtttgaaagtattgtcaccctttcccgattgtgctatcattagaaccacacgatataccaagggtatgcaatatggttgggcgatattaaggaggagcataaaatgcaggtttccagtagggctgcaggcgttgtgggttcagtgacgttggagatcgatgccaaggccaaaaagatgaaggcggacggcatcgacgtggtgggttttggcgcgggggagccggattttcccacccctcagttcgtgatcgacgcggcaaaggacgcgctggacaaagggctgacccgctacacccccgccgccgggctgctggagctgcgccaggccatctgcgataagctgcaaaaggacaacggcataagctacgcccccgcgcagatcgtggtctccaacggcgccaagcacgcgctgtacaacaccttccaggccattttggagccgggggacgaggtgctgatcccctcgccctactgggtgagctacccggagatggtcaagatggccggcggcgtgccggtattcgtacccggcgcggcggaggatggctttaagccctcgctctcggccctgcgggcggcctgcaccccccgcacggtggccatgatcttaaactccccctccaatcccaccggggccatctacacccgtgaggagctggaaggcatcgccgcgctggcggtggaaaagcagttttacgtcatcagcgatgagatctacgaggagctgacctacgacggggcgcagcacatctccatcgcctcgctgggagaagatatttatcagcagaccatcgtgatcaacggcatgagcaaggcccacgccatgacgggctggcgcatcggctacagcgcggcgcccgtgccggtagccaaggtgatcgccaactatcaaagccacgccaccagcaacgccaacaccatcgcccagtgggcctcggtggcggcgctgaccggcccgcgggacgacctggaggccatggtgcgcgagtttgccgcccgccgggattacctgtgcgaccggatcgaggccatcccagggcttggctgcgtgcgcccgggcggggctttttatgtgatgatgcgggtatccggcctgtacggcaaaagctatgagggccagaccatcagcaactccatggactttgccggcgtgttgctggatcaagcccaggtggccgtggtgcccggcgtggcctttggcgcggacgaatacgtgcgcctgagctatgccaccagccgcgagaacattgaaaagggcatggatcgcattgcggcctttgtccaaaagctgaaataaaacgacaagctgatcctccctgaagatgaaaagattggacggaggcgaaaagcgcgaaagaaggaggaataaacatgctggaattcagcgataagaccaacctgctcgagcagagcgtgtatcattacgatctgcaggatgtggatgagcccaacctgtaccgggacctgttcgattacgagcacgtgcccaagatctcgtttaaccaccgccaggtgcccatgcacgtgcccgcggagttgtggatcaccgataccaccttccgggacgggcagcagtccacctcgccctttaccgtggagcagatcgtcaccctttacaagatgctccaccgcctgggcgggcccaaggggctggtgcgccagagcgagtttttcctctacaccgataaggaccgggaggccgtggagaagtgcctggagctgggctacgagttcccggaggtgaccagctggatccgcgccaacgagaaggactttgagctggtcaaggccatggggctgaaagagaccggcatcctggtctcctgctcggattaccacatcttccagaagatgggcatgaagcgctcgcaggccatggataagtatctgggcatcgtcaaggcggcgctcagccagggtatccgcccccgctgccactttgaggacattacccgggcggacttttacgggtttgtggtgccctttgccacggagctgatgaacctctcccgggagagcggcatccccatccgcatccgcgcctgcgataccatgggctatggcgtggccttccccggcgtggcgctgccccgcagcgtgccgggcatcatctacgggctgcagcactttgcccacgtacccagccaccttttggagtggcacgggcataacgatttttataaagtggtcaacaacgccaccacggcctggctgttcggtgccagcggcgtgaactgcgcgctgctgggcattggcgagcgcacgggcaactgcccgctggaggccatggccatcgagtacgcctccctgcggggcaccaccgacgggatggacctttcggtgatcaccgaggtggccgagtactttgaagaggagatcggctacatgatcccggcgcgcacgccctttgtggggcgctcgttcaactccacccgcgcgggcatccatgccgacgggctgctgaaaaacgaggagatctacaacatctttaacaccgccaagatcttaaaccgcccagccaccgtagcggtggacagccacagcggccttgcgggcatcgcccactggatgaacggctacttccgcttaaaggatgaagaagtggtgggcaagcgctcgaacatcgttgccgcggtcaaggaccgggtggacgccctgtacgcccagggccgcaacaccgtgatgggggacgatgagctggccaacatcgtaaaggacgtggatgaggagttctacgacgagttgatgatcatccgccaccgcaagcacaagcaccacaaataggcggcgccagcattgaaggaataagcccgggccaaattggcccgggcttttgtgttgccctgggggaaggtgcgcgggaaacgaaagcggcgcggggcggggcgtccggcccatgtggcgcggtgcgggcggggccgcacgccgaagaaggcttccgtcattccgagccgcaggcgaggaatctcctgataaccaattggcattgcatacaggtacaaccgtttagaggctgcctggtccagaagggatgcaatagattcttcacttcggcttcgcctgcgctctgaatgacagatagagagacgcccccctacttgcgcataaacccatacctttccactcatcaacagtatgctgcacatgtcattccgagccactggcgaggaatctcagggtacgctcattgttacgactgcaccgcgcagcgcagatcaagcgccacttttctgctaacgcaatagattcttcacttcggctgcgccttcgttctgaatgacaacatagcgcgtgttaaagcatagatttttgttcaacagcatctctccctccggcgcacctaaaggcgcgccccttgcctcccccccagcgggaggcaaggggcgcggctggcaaggcccattgtcccgcggggcgctactggttctgggcgtagagctggcggatctcgcccagaatatcggtatgggagaaatcctcccggtagatcaagttgatctcccgcacgatgcggaagttttccatcggcacctcccgcagcctgcccgtggccagctcggcccggcaggcgctgcgggccatcacgctcaggccgaaattctgggccaccagctctttaatggtggtgatgttgtccgtctcgatgacgatgttgtagttggcaatatcgtccgagtggttgtacaggtagttgtcaaacagcagccgcgtgcctgccgcccgggagcgtaggatcagcttctcccgcttgagctcgtccagggagacctgggcgcggccggcaaaggggtgctggggggagaccaccaggcacaggtaatcggtatccagcagcacgctgtggtagctgtttttgggcaccgtgccctcgataatggcccagtccagctcgtaggactgcagcttatcataaatattttttatggagtcagtcacaatattgatatgcacgtccgggtgctccaggcagtaatcggccagtacccggctgatgacgtactccgatacggtggtggtgatgcccaccgagaagcgtttgacgctgtttttgcaatcctccagggcctgtcttgcagtattggcgatggagaccgcccgcctggcgtatttgagcagcacctccccctcgggcgtcagcatcaggggccggcggtttgggtagaagatcttgatgttgtattcttcctccagctggcgcatctggtggctgacggcgggctggctcatggccagtaccttgcccgcctgggtgtagttgcgcagctcgacgatcattaaaaaagtgcggatcttgggatcgatcatgggtgtttttcccccttagcatgcctttgcattcattatatttatggctagctaaaataatatcattttcttttattaaaaagcaagcatataatgggcattatccaaaagaaacacgctttaaggcgaaagggggcgcgggcagatggacagacgggaataccttacagacccatgggatgaggaggcccgcgcgataagcccctacctggcggggcggtatataaggctgcgccagcgggccatgcggggcgcgctgccctgcgcgggggcggcggtggccagccgggctgtgcatgttttgctgctgcgtcctgcaacggcgctgccggcgctacgggctacccataccgcgctggacgcggtaatcgtgctgatgctggtgggcctgctgctggacgcggggggcgcgctggaggcggtggggctggggctgggcgtgctggtggccgcgggcgcggcgcacctgccctattggctgatgatgctggccggctatggggcggccctgttttacggggcctaccggcaaagcccggtggcggtgtttctatatttatgcacctcgctgatcgtgctggcaaaaagcccgctgccggggccgggggccttggcctgcggggcgctactggcggcgggcatgtacttcatcgccgaaaaaaggaggaagggtcatgatctttgagagctggcacctgagccaacacaccctggtggtggtctgcctggccgccatcttactggctgcctttttgatgacccggctgaccaaaaagctgcacctgcccaacgttaccgggtatattctggcgggggtattcatcgggccgtgcatgctcagcctgatcccccaggccgccatcgacaatatggatttcgtcaccgatattgcgctgagctttatcgccttttcggtgggcaagtatctgcgctgggacaacctgaagaagaacggcagccacgtgctgatcatcaccctttttgaggcgctggtggccgccgcggtcgtgacggtgaccatgatcgccgtctttcgcctgccggtgagctttgcgctgctgctgggggccattgcctcggccacggccccggcctccacgatcatgacgctgcgccagtaccacgccaagggccagtttgtggatattctgctggccgtggtggcgctggacgacgtggtggcgctggtagccttcagcgcctgcgcggcggtggcccagggcctggcgggcgaggggttcagcctggcgacggtgctggagcccattttgctgaactttgcggccatcggccttggggggctgctgggctacgcgctgcataaggtgatcgacgccaaccataccaaggatacccggctgatggtggccgtggccatgatcctggtggtgaccggcttttgctcggcgctggacctgtcgccgctgctggcctgcatggcgctgggggcggtgtacatcaacgccggcaagcagcaggagatcttcagccaggtggatacctttgccgtgccggtgctggccatcttcttcgtgctcagcggcatgcgtctggatctaacggccctttccagcgccggggtgatcggcatagcctattttctggtgcgcatcctgggcaagtacgcgggctgctttgcgggcgcggcgcttagccgtgcgcccaaagcggtacgcaattttatggggatggggctgatcccccaggccggggtggccataggcctggcgctgctggcccagcgcatcctcccggcggagaccggggggcttctgagcaccatcatcttaagctcctcggtgctctatgagatgatcggcccggcctgcgccaagggctcgctgtttctggcccacgtgatcccccgcgcggaaaagaccggccctgcggggctgcgccagccccgcaaggcccgcgccccgcaccacgggcacaagttcgccctgggcgccaagcggtaggggggctatcgcccgcttaaccgctccgggcgtatgcgtactgcagacgctgccgcccgccatcggctgatgcgccttccccgcttcttctcccaggggctgccgcccgcttaaccgctcttggcttcctatgtttccatacactctcgcccgccatggtttctgttccgtttctcggctccgccctaggggggctatcgcccgtttaaccgctccgggcgtatgcgtacggtaaacgctgttcgggtactctcatctgtcattccgagccgcaggcgaggaatctcttaacggccaccgcggcatggcttttccgccgcctcatgaccggcgcggacccttcttccctggccaactgcccacgcgagagattcttcgcgtggccttacggcctcgctctgaatgacagggggctatcgcccccttaaccgctccgggtgtatgcgtactgcagacgctgccgcccgccatcggctgatgtgcctttcccgcttctcctccccgggggctatcgcccttttagccgctccgggcgtatgcgtacggcagacgctgccgcccgccattggctgatgcaccttccccgcttcttctccccaggggcttgcgcccccttaaccgctctaccctttggccccggccatacgcctaccctgcgcaaaggcgccgtttaacctcatcacagcacaaaaaaggcggggagagccccgccttagcttgtatccgctttgtctggttcccccgtcctaactgcccaggcccaggttccccaggatgatgccccgccatttatcgttgatggtcccgctcttcaccgctgcgttcagcaccccgtaagccttggcgccctggccttgcagctgcttttgcagcttcatggcgttgagatacatctggtactggtccacggtgttctggttgtattggtcctgcatggtctccccgcccgagccagtggaggcggttttgccggaagaggtagccttacccgaggaggagcctttctttttgctcccgcccgagcttttggcgctggcggccttggctgccgcggcctgcgcggccagttcctcggcccgctgcttttgccgcgcgctctccagcctttgctggtaatccacatacaactcgcccagcttctgctcaaactccccgccgatctgccctaaggccagctccccctcgccggtggtggcggcgatctgccgctccagcgcggccagggcctggttcaaaacgccccgcagctcccccagagtattgccgtaattcatctccagccgggcggcattggtctcggccatgccgccgctaagccccagggcgctcagctgctggggcaggtcccgctgggccacgcgcttggccacgtaggcctggcgcgccccggcgtcatactccctttggtaacccggccgcctgctctccagctcctgcacggccagggcggtcttttgccgctgcagctgttcggcccgctgctgggcctgctgcagttggcggcgctgctcctcatagatggcctgcaccgcccccacataatcgtacacttccgccatgatcttcccccgtttctaccgttatccgccttcagtcccgtcatccgcctagcgcaccaaaagccccatgcccgccccggcaagggcgcccgcaagcgcggtaagcagcgcacgcaccagcgcctcccaccgctgggcggggtgggcgcgcacctgctctacatcctctcgcaggcgctccatctcccgccgctgggccttgagctccgccgccatctcccgcagggtcagggccagggcgtgcacgccctctaccagccgctgctgctcgtcgatccgccggaaggccgtgcgcatctccttttgcagcaccgccgcgtccgcccgcagcgcacccaactcccgtaccagctccatttcttccattcgcttctccccctaatgccactatttggtagcatagtgctccccctgggcgatcctcagccggcgtaaaaataaccgctgatgttgtacacgcccgccagtgccccatctaccagccgcatctccccatcggcgccgatgtagtaataggccgtcatagccccgcttgaagcgttgcgcgccatctgggcataggtgcgccggggccgccagccctggggcagggccagcacgcccgcgtcatctccgccggtgatcgacccggccaggtgcacgtagccccaggggtccttccagatctccaggctgctatcttccgtataatcctgccagccgttttggtagctaaaggccaatagctgccgctgcggcgcctccagggccgcgagcgcctgctccacgctctgcccatccgcccgcgccaccgccgcggaaagggtctgggggtaaaacacgctgccccccgcgtcctgtatctgtatgatgtcgtgtgccatctttcttcctcctttaccccaaccttgcgcgggtgtagtaactaccggccgtggtagagccgttcaacaggtgcgcgcagggccccgcgtccgcgccgttccacatccccccgcacgcccacaccgcctggtatgttgtggcgtccggcggggcataggcatccgcgtagccgttcttcttgcctccgcctaccgccgttgccaggcgcacccaggggtaacgcccgtcgcaccccagcgctgcgatggtgccgctctccgcagagagtgcatagtccagttttacgtagtcctccgttaacgccccgctgctgtagcgcgtggcgtccggcaggtagtacgcgttgtacgcccaggcccccgcgctggccgtgcgctggctcatcacatcgcacaaaaattgccaggcgttgccgtaggggttctcccgcccccggtacacgcaggggtacttgccgctctggttactcaccggcgagccgctggtcgcccgcaccccgtcggctgccccgttctcccaggagcggacaaatacggtggtctcctgggtaatatccaccggttccccgtcaaagtacaggtaggtctcactcgcgtttttaggggtgatggtggtcaccctgcggttttccacggtaacatcccccgtgcttccggtatggcttagcgtgatgggcacccccaccacgtactgggcggcctcgttgtaggcattgcccagcgccacccggttggcgccgctttccgccgcctttgccttagcgatgttatagctgtagctggtagccccggccattacgctttgcaggtctttggtggcgaactccaccgtcatcagcaggctttcagtgtaccaggtggccgtccgttccagcgcgtactgcgcacccagggtgcgcgcgccgtccatcatgccgttcaatccgccgtaggcgctaaaggcccccgcgcggctggtggccttgccgtcctccagggccatcagataggcggcgctgtaggaatggctgcgcaggctgccatccgaccccacgcaggcggggctgggcaaaaagccgggctggggcagcatagagatcagcttttgctcatagccgtctttcaccccgtcaaagtagtaaaacaggggcgtttccacgtagaccagcttgtccgggtcgctctggctgtagcccgcctcgccctcgtaggcggtgactacgaattccccgtcgctatcccggtagccgttgcagcgccgccgcccggcccagggcagcaccccgtcaaagtcgttttgcaccacttcatcgtccacgccggcgttggctaccaggcctgcggcatctcccacccgctccccggcgctggcggacgacccttctgcccagcgggcgccgtagacgccggcctgggccagcgtggcaaagtacagggtgtccggcacccgctgctcgggcgggatgctctcccccagcgggatcaccacatagggcaccttagccgcgcccatcacatccgccgcgatggggaaaaagttctgcccatcgtaggaatattccagctcccccagcgggttgatccggatctgtttgatctgctcggcccccaccttccggttcagcgcgtccatggccgattgcagtttctcctgcacggtatcgccttccagccccgcgatgggggcgctgcccacgttggccgcgccgctgccctccgccgtgctttgcaggtcgtctaccatggcgttgtaggcggggatgatgccgctgcgcgccacctcctccaccttttgctgcatctccagggcgctaagccccggaatatccggctggccgatgacgcccaggccctccaaatccgcctcatgaatcttcttaatcataggctatcgcttgtacctccccttctcccggtattccaggcccacctggtatagcccaaagggctggccgccggcgctgttttgcaggcggaaccgggtcttatccacctttttaatgcgtatctttttccccagcgtccggggggtggcgtccccggtccaggagagctggctccaccgcaggtccccccagctaaagtaccgggcgcggcccgcgctgtcccacagggtgcgccaggccccacgcacctggcttttgaccgtcaccccggtatccgccgccgcggccagctgcaccgcgataaagcggatggtcttgttgcggaagaactccctgccggaaaaatccgccatatcccagtaggcttcgatgggctgcccgtcgtcaaaatagctctcgggggcctgcacgtcggtggcaaagcggcagaccgccccgtccgcccggccaaagtacagcgccccatccgccccttcccacagcacccgggcgttcagccccgggaaaaggtagccctcgtactgccaggcgctctcggggcgggcccggtcgtaatcccgcaccaggccgtcgagcaggtaaaggttctccccgcaggccagcaggtaaaaatcccggtagcgggtggcaaaggcgtcggccaggccgggctccctggtcagcgccccgtccaggtaaaagctgcggctctgggtgtagcgctccccggtcacatccttgggggtgatggcgtacacgcccgcgccggtcaaaaacaggggctcggtgcccaaatagcaaaagctgtaaggggagatggccccctcgccctgcagcgcccccaccgccgggaaggcggcctgcccgtccgccatctcgccccggcgcaggatcacgttgcgtccgttctcgctgctggccttgtgggcggccagcaggtcccccacgatggagtagcccaccaccgccgcgtcgtcctgccccagcacgctgtagcgggtatccccaaaaaaggtggggtcgttatactcgctgtaccagtcgtaattggggtagtccccgttaccggtgacgaacagccgatccgccgccgcgtttactccgtagctttccaccaccttgcaggcgttgatccgcccggcgtagcccgcccactccctaaaggcggtcaccttcaggttgtcctggccggagatggggctctcccccggggcggtcacaaaggtcagccgcccagcggcccggtccaccgaaaaatccgtcccctcggtcagggtttgccagctgccgtccgcggccagcttttcgcactgcaccgggtcggtggccagcccgtcaaagagcagctggtacaccgtatcctccgccgtgcaaaggaagctctcctgccagccccgggagagcaggttcaccggctggtaatccgtgccgcccccgtccggacggcgggagatggccaccagcggcaccgtggccgcctcgcttaggggctgcacggcccattgcccatcggcctgcccatagcacagggcctgcttgccgtcaaagatgtagagcttcccgccgaactggcggctgacgctgcgcccgtcggccatatcctcccaaaccggctggtcctcaaagtacagcttgtccccggcgtggatcagctcccgcaccgtgtccccctgcgccagggcgtggcggccgttgatgcggccggaataatgggccagggtggtatagcccatgcgcttgcgcaccttgccgggcacatcccgcagcatgttgggcgcctccgggctgcgccccagcgccacccccgccggggcgttggtcaggtccacccccttaaaatcgctcagggtcagggacaaaagtcccccgtccccgccgcggatcacccctccccgcatcatctctccccctcctcgtcttccagggcggcaaagggcaaccgctctttgccatcccagccatcgtttttccctatcattggcataactcctttgtgctttagttcagtcccgcgcggccgttatcggcggctcttgcccaccaggggcatttgtttgctttgtcattccgagccgggctttcgcccttttatccgctcttgcaacccgcttttatcagcaactttcgcccgccaggggcgtttacttatttgccttgccactccgagccggggcttacgccctcttatctgctcccgaccttcccaaaacggccaagcttcaccggcccgccataggcatttgtaagaactgtcattccgagccattggcgaggaatctcttggcaaccgctcggttccgtccgcaccacgttgttctgattcggtcaggccaactgccaacgcaatagattcttcgctcagccttacggcctcgctctgaatgacaggggcttacgcccttttatccgctcttgccgcccgcttttattggccgccttcgcccgccaggggcgttttacctgtcattccgagccattggcgaggaatctcttgacaaccgctgggcccagcccataccgctctgccagggcaaagtgcccctccctctcacattcctctatccgctctccccttgtctccctcgtttgagggagggggaccgtccccaagcggtggtgggaggactgcgcatagattcaggccgctagccgcaggcttaacccgcgctgtcattccgagccgggctttcgccctttcatccgctccaacaggccgcttttattggccgacttcgcccgccaacggctttacccttctgtcattccaacctggggctttcgccccttgttccgcttccggcccttcaggctggtcagtcttcaccggcccgccacaggcttttgtttgctttgtcattccgagccattggcgaggaatctcttgactccctcttaaccccgtccgcaccacgttgttccgattcagtcaggccaactgccaacgcaacagattcttcgctacagcttcgcttccgctctgaatgacagggacttacgccctttcatccgctccaacagcccgctttttctggctattttcgcccgccaggggcttttcattccgccccgtcttattccgcgcacccgtacacgtcccgcaccgggcacacgcgcccccgcgttagcgcgttgacctgctcgacatacagggcgttataatacgccgccagcgtggtctcctcgtcggtcagcgccaggcgcgccgccagcgcaaagggcagcgccccgcgctccaactcaccttgggcgccggtctcctgctccagattttcaatgctcaacaccccgcccttttccagtcccttagccagccgcagcccgttatccacatcctgcacctcgcaaagggtggcgcccagcatcgccagcaccgcttcctcctcataatccgccaccgccgcgctgccctcgcccagcagccccagcgccgcgcggaataccgctctgcccgtcaagtgcatccccgcctttcctatttaaaatccccaccgtccataccctgggccatttgcccatcgcctgggactcccgtccccttgttccactctagccttccagcccggccagacttctccagcccgccaggggcgttttacctgtcattccgagcgcagtgaggaatctcttgacaaccgcttaaccccgtccgcaccacgttgttccggttcggtcaggccaaccgccaacgcagcagattcttcgctctgccttacggcctcgctctgaatgacaggggctttcgcccttttattcgctcttgccgcccgcttttattggccaacttcgcccgccagcggctttacctttctgccattccgacctggggtttgcgccctctaaaccgctcacggcagatacggtactcccgcgccttcgcccgccaacggctttacccttctgtcattccaacctgggctttcgccctcttatccgcttccagtcttccagcccggccagacttctccagcccaccaggggcgttttacctgtcattccgaacgcagtgaggaatctcttgacaaccgcttagccccggcaagtacacgtgcccttggctttccccatcccttgcctccctctggcgagggagtggcgtccccctggaaggggacgccggagggagagttgccgaggcgaacacatgagtaacatgtctataccgccccgccgccctggtcaagctcgtccaactgctaatgcaatagattcttcgctgcagcttcgcttccgctctgaatgacaggggcttgcgccctttattccactcttgcagccagcttttattggccgacttcgcccgccaggggcgtttacttgccttaccattccaacctggggctttcacccttttaccgctcattgcagcgccggtacccctgctgctccgcccgccaggagccgtattcgcctcccgcgcctcctacagccccttttccgccagggcgctgggataagccccgtccttgtaggcataggcgcgcaccagggtgcccgtcgcggtcacgtcgctctgggcgccggtcttggccgtggggctgtagcgcgggtcggtcccgtcggtggtgtaacggaaggacgccccgctatccccggtaatggctcccgccgcgctgatggtgggcgcagccagcaccgtacccttgcccgtgctggtatccacctctacatataccccttcgctccgcgcgccgaacacaaagcagtcgtaatactgccgcccctctaaaaggttgcccgagatgcccggaggatcctgatgcagccgggtatcgttcagcttcactggcgcggtggcgctgtttttgtacaccagcataaagttcacgtgcttgggccagcggccaaggggcaccttcaccacggccatgttgtcgtactggcccacctgacccttggcaagcgccgcctgccccagctcgtcgatggccagaaactcgtccgaatgcttgagcagcttgtacgtggcgttggatacgaacagcgtgcgcccctcctggggcacctccccgtcgtccagggccagcgtgccctcggagatgcgctcgcagatattcgcggtggtcagcgcctcgtcattcccaacaatgcggccggccaggttggccaggcggtccagcacgtaggcgtccatggtgggcaccgcccgctcggcgatctgcagggccagcatcttgccggcggcctttaagccgctctggtcggcgttgttgcccttgtcgatggtcagggcaaagctcttgtcctgggtcagggtcatctcctggacgatgtcctgcatctccaccggctcgccgtagcggttggtgccggtgcgggtgtagtcgttcatgggcaccgtcagcggggtgaccaccttgaccgtcttggccccgctccagtcgtaatcgtccgagagccgcccggtcacaaagctcttttccgcgaacatcgccgcgatctgttttgcatacttgtcgtgtaaagtaatcgccataatttttcctctcctttaattcatgttgtttagatcgagtcaaagccgctcaaaaaatcgtcggcctcgcctgcgccctcgccggaaacgctgcccagggacagcgcccggttgcggttctcctgccgggtgcgggccagctcttcccggagcatctggttttcatacgcccggtaagctgcaaggggttcttcccctcccgctatggcctgcgccaccgcctcgggcagcttttggaggtcgggataggcccgggccagggcggcaaagccgtcctcctcgccggccagccgggcgcgcagcgcgtcccgctcgcccttgacgtggtcgtaattcatccccttttgggcgtttgtgatcaggtcatggagccccatctccatctcctgcccgttgtacttcacggtgtagcgccgctcgtcctcccgtccggaaagcccctcttcaaagcccgcatccccggccccctccggggccgtgtccaacatttcctccgccggattggtttgatccgtcatactctttccctccatctatccttaggcggctggtttcgccgcctttgttccgctcaatgcatatctatacgtgtcattccgagccgcaggcgaggaatctcttggcaaccgctcggcttcgctgctccaacaaccttccggttcgatgcggttcttctcgtctcctcatcttcccactcaggtatcacttttttgccaatgcctgagattcttcgctcggccttacggcctcactctgaatgacagagtttatcgccctttttccgcccaagctccacgctcttgcctgcgcttgcgcccgccatttacgtttgtttgttttatgtcactttccagcacggctttcacccacgttcactgtggtacagcgaaacacttggagaattatttggcccattctcttcgaagtgactgaggaacctccgtccccaccacggagtggccgtttggggggattagggattgttaagggggtaaagggggaaatcggaatcccccttcccccttaacgaataaaattcgttccctaactttcctccctgtttttctatgagcttaaatttcgcggcgcgtcggccgcttgggcgcacctcacgaacacagagcgctgcggtcgatgtttcctgacactgccgctcgctccgcgctcctcttatctacaccacccggtgttccaccgtttccaccgcctggccgctctttcccgcatcgcaaaccgggttgcggcagtacagctcctggcaaaggtacacccgcgtgggggtctccgggctttggtccccctccacccgcgtgtaggtcttaccgatcttcagcgccgtacggcacctggggcacagcttcatttcccatccctcccatactcgtcatggcgctgcgcgcgcgcagcttgtccaaaatcttgcgccggttgcggatgtacgcgtccggcacgttttcaaggtaggtctccgcgtcctggatcacgcccttttcaaacaggttgtccagcgtctccacctgcatcagttcagaccagtaggtggaaggcccgatgtccaccgccagggcgtagcgcagcttgtccaggctggcaaagtcgaaccgcagcgccccgccctgctctgtcggcagcaggcgcactccatagtgcacccgggccaggtccaaaatgatgcgcaccacatcttccataaactggtaaaagcccatgcgctgcagctccagcggcatggcgctggatttttgcaccgcgatgatggcgctggtgttgtccggccgcacgttgcccagcgccgcgtcggtggcgcccatggtctcccgggtgtaggcgatggtcttttcgatcagcatcatcacctggttcgacatatccaccgccggcagggggctggccaccgccacctgcgggtctccctgcacggcgatggcctcgcccgcccggttgctccacccctcgggcagcagcgcctcgttaaacaccaccttggggaaggccattttcttgacgtgctccatccccatggcgaatagtttgttgatgaagatctggttgggcacaaggcccgtgatggccgcctgcccgtggtagctgtttcgcacccggtcccagttcatccaggccagggggtagagggtcaaccccaaatccacctcgggcttgaccacgcactcccgcgtggtcttgatggcgtgcaccctgccgttttccttccacaggcgcaccagcacggtcacccgcccgtcctcggcggattcgccctccccatcgggcttgaggttttcggccgcctgggcaaagccgttttgcaccatctccgcgcgcacactctccaccgtgcgccgcagcgccagcaaaatgtagggctggcgctgcacctgcgccacctgggggttgccgaagatcacgcaggtgttgtccaccacctcgcccacgatcgccccgccgtttagcgggtcggcctccacttcaaagcgcaggtacatcgccccgtccccgtccaccgccgcgttgcggatcacgtcccggttctgggtcttgagcttggcctgctccatcacccttgccacctcgccagagagggcctgccccagtccctgatccccgcctccggggaaggagacctgcaccgccacgtcgtcggaaacgatggtggcgataaagtaggccaccacccgttttaaaatgttgattaccggcttgtccaggtcgggcgcgtccaccccctcccactggcggccgatgtagaagttctcgttctgcttcaccgtttcgtacagcccgtgccgggcgttataggcccgcccccgggcatattcctcccagatcgcctggggctccaatcgctttttcatccgcatgcctcgtctttcccggggggattcccccttttatccgctctcatcctctgtggtttgtaccgtttgcgcccgccaggggcttctccgggtgtcctgcactcttcttttcgggggatatggtcccccttttatccgctcttgtctttgtttatttcccgtcgtccgcggcccgccaagggcttggatacctgtcattccgagccgcaggcgaggaatctcctggcaaccgcttggcttgtctgcaccgctccgttagggtaaatgtccgcaccgcacgccgcacgccaagcgcttttgcagccgtcgcggctccgccttcccgggggatatgatcccccttttatccgctctcatcctctatggttttagtgccgtttgcgcccgccagcggcttctatacctgtcattccgagcaacgcgaggaatcccttgacgatcatttggctttgctcacgtcggctacgtcccggccaaatacatcctttccgctctcttggccttctgctcaagcgccgcttccccgctaacgcatgagattcttcgctcggccttgcggcctcactctgaatgacagggctagagccctatacgatctgtcattctgagcgccagcgaggaatctcctggcaaccacttggcccggcccgcaccgcttgggcaaagagcccgacccgctctgctctccttggccccctcaaaggagggggctgccgccccttcgggcggctgggggagtttccccgccgcggcgcgtccttcacgccctattcccccagaggggtctgatcccgcccgtcatagcgccacagattctgccactgccgggcgatctgcgaggcccgccgctcgtacgcaagctcccgctccagctccttcatgcggccctgcatccgctcgttctccttttgcagcgcccgcacttcccgcgccagacgcgccgcctcaaacaacttggccattctctcacctccccagggggctgtcgccctattatccgctcctgtcttagctgattttccacacgcccacagcccgccagtagcttttccgggtgtccgtgctctccctcccgggggctgtcgccctattatccgctcctgtcttagctgattttccacacgcccacggcccgccagtagcttttccaggtgtcccgcgctccttttactcggcgctttctcccctttgttccgctctatgcctttgtggttttaccagcgcccactgcacgccagcggattttttcctctgtcattccgagccgcaggcgaggaatctcttgacgcccacttggcttcgtctgcaccgctgccgtcccagtaaagccccgcttcctgccaatgcatgggattcttcgctccgggggacttcgtcccatcctaaccgctctttacttcatgctttccttacatcttttcccgccatgtgctttacccctgttccaagctttcctccgctcggaatgacacgttccaacctttcctctgtcattccgagccgcaggcgaggaatctcttgacgcccacttggcttcgtctgcaccgctgccgctccggtaaagccccgcttcctgacaatgcatgagattcttcgctccgggggacttcgtcccatctaaccgctctttacttcatgctttccttacatcttttcccgccatgtgctttacccctgttccaagctttcctccgctcggaatgacacgttccaaccttttctttgtcattctgtgcaacgcgaggaatctcttggtaaccgcttgacatcgcccgcaccagcgccgcatagactaaacttctccaccatatcgcgcctttttcatcactcatgtatagaccagttgttctccacttcctgcacatgctaccctgtccttaatcccatcaggaggaaaacgtcatgccctattttgtctatatgctgaccaacccttcccgcaccgtgctttacatcggcgtgacgggcgaccttacccgccgcctggcccagcaccgtagcggcgagaccggcggctttaccgcccgttaccacacccatcgtctggtgtattttgaacagacgaccgacgttcgcgcggccatcgcccgtgaaaagcagctcaaaggctggtcccgcgccaagaaagacgctttggtggaatccgtcaatcccctttggcaggatctttccgcctcctggaaatgactttgtgcggctgctcgcctgccattgcgagccgggccttcgccccttttagccgctcaacccgctatatgccctcagctccgtaggcccgtctccctctgttcgctggggactcgcgcttcgcagcacgacttacatgctcgccttagcaacggcaaagtcaggcaactctcggttcgctgggggcttgcaccgcgcggcttacgccacttgcgcgcgccttacgctcaccgggtactacactcgctgcaaagtccatctttggggtcgcctctgttcactcgctttgctccttgcgtcactcgcgcttgtctcacgttcacttcaaatcatcgcacccttcggctccgcaggtccgtcagcctctgttcgttacgggttcgccctgcgcggcacggcttaagttcaccttctaacaacagcaaaggcccggcaactctcggttcgctgggggcttgcgtcgcgcggctaacgccacttgcgcgcgccttacgctcaccgggtactgcactcgctgcaaagtccatctttggggtcgcctcggttcgctgagggttcggccttcacggtacgacttacatgctcgccctggcaacggcaaaggcaggcaactctcggttcgctgggggcttgcgtcgcgcggcttacgccacttgcgcgcgccttacgctcaccgggtactgcactcgcttcatccgccacaggcggcgctcatttcgtaccctcacagaaatcatcgcacccttcggctccgcgggtccgtcagcctctgttcgttacgggttcgccctgcgcggctaacgccgcttgggcttacctcgtactcacagagtactgcgttcgctgcttccggcactgccggcgctcactccgtactccactggacgcggccactatagatttccaccggcgttcattccgcgccctcatcccccgtaccgcaggaaggccgccagcccccgctcgccccgatgcggccttgccgggtggggccggccggccacaaagtagcgcagcgcgtccggcgcgtgggtcagctcgtggggctgcctggcgcagtcctccgggtcgtccgggtcggccaggatggaactgaggctctcgatcagctttacgcacccggggaagatgcgcagccttggccccgcctccccgggatgcagccattccttcagctcgtaccagcccatcacccgccggttatccgcctttgtcagccccactccggcggcggcaaacccctcggccgcgctgcgcccggtatcctggcggcggttccacaggtcgggcggggcaaaggtggcccgtatccgctcttccgccccggtggctgcccgtatccgctccgcggccctggagatgatcaggtcgctctcaaagatctcccggtacacgtaccctttcccttccggcgacagggcgataaagtagcaggccaggcaatccagcccgtagtccagggtgcggtagcgggtccagtcctccggtatcgcaaagggggataccacgtgtacatcccgccggaactcgtcaaaatactggccctcgaacaggtcccagtccccatagagcagggcctgccggtcccgctggcccaggttctcgagccgccgtaggtagcccgggtccgcgtccagcaaaaagcggttgtccgccacccgcgcgggcaggtagatgcggctgcccccggcaaagcgccgctcctcatccggcgccagggcgtcgataaaccgggccttgacccaggcgtgccccaccccgccggggttggtggcgctcttcacctgtttgggatagggattggccccccgcagccggctgagcaggtaggtatacatccgctcggtaaaatgggtcagctcgtcaaagcggatcacgtcgtactccgcgctctggtagcgggtcacgtcccgctcgctgtcgcagtagccaaagtcgatcagcgatccgttgcagaacttccccatgtgccgggccgcgttgtagcggtaggccgcggccgggtaaagctgctccgccacccggatgagggacttttccagctcggggaaggtgcgccgcaagatcagctgcttgctgcccgggtagcgcagcgcgtaatacagcgcgtcgatcagctgcccatagctcttgccgccccccgccgccccgccgaacagcacctcgtccgcccccgcgtccataaaggccttctgccggggcgtcagggtgtaaacctgtgccaaatccgctcctcctttttggagggactcccgtcccctttaaccgctcattcttttccgcactctcctgcgttttcgcccgcccgcggcttttaggttttccccgcgcctgcggctttacttctctgtcattccgagcgccagcgaggaatctcttgactccctctcggccttgtctgcaccactgccgcccagttcaatcgccgcttttctgctaacgcagcagattcttcgctcggcctggcggcctccctctgaatgacagggcttacgcccatttatccgcacaccccctcgcctccctctgaggagggaggtggcaggcgcagcctgccggagggagagatattcccgcactgccgcccaaccgccgctccactctcgcgcgctctcctgcgttttcacccgcctgcggcccctgtcattccgagcaacgcgaggaatctcttgactccctctcggccttgtctgcaccactgccgcccagctcaatcgccgcttttctgctaatgcaggagattcttcgctcggcctggcggcctccctctgaatgacagggcttacgcccctttatccgcacaccccctcacctccctctgacgagggaggtggcaggcccggcctgccggagggagagatattcccacactgccgcccaagcgccgctcccgctcccgcgcgttctcctgcgttttcgcccgcccgcggcttttaggttttccccgcgccttcgtgcgggggacttcgtcccttttgtccgctcttgcccttgtgcgtttccccgtaccttgtgcccgccaagggccgctccgcttttccccgctccttcaaccgctcatccttttccacgctctcctgcgtttttgcccgcctgcggctttacttccctgtcattccgagcgcagcgaggaatctcctggcacccactgtgtcctgtccgcaccacactgccctggtccatttaagccaactaccaacgcagcagattcttcgctcggcctggcggcctccctctgaatgacagggcttacgcccctttatccgcacatccccttgcctccctctgacgagggaggtggcaggccccgcctgccggagggagagatattcccgcactgctgtccaaccgccgctcccgctctcgcgcgttctcctgcgttttcgcccgccagcggcttttaggttcccaccgcgcctgcggctttacttctctgtcattccgagcaacgcgaggaatctcttgactccctctcggccttgtctgcaccactgccgcccagttcaatcgccgcttttctgctaacgcaacagattcttcgctcggcctggcggcctccgctctgaatgacacgctaccaaccctttccctgtcatccctatccttcttcaggtcgcggctccgtcggctcagtcacccgtatctccaccagcgggccgcctgaagcatcctccagcggaaactccccccaatccgcaaagaaccgggccagcacctgcgccgccccctcgcgtccctccttttcaaagagcagcccctcggcgtaggcctgcacctgcagcatggccgcggccaccgcgcgcccccgctcgccgcccttgcgggaggccgcctgcatctggcgcacgctgccaaatcccagcgccccggccagccccgccggcgtggggggatgcgtcccctgccgcagcggcagccctgtgcgcttgtccaaaaacggctgcccactcgccgggtcgcagacggcccgccccgcgcagtcctcaaagtacgcccgcgccgcccgctcgatctcctttgcgccctgcgccttcatgcaaaccctcccgtcaacgttcctgtccccatcatagggcgccccaacgtcccccgggtgccccacctttaaccgctctcgcccttgcgtgccttctaaaggtatgggtttgggggcagatgtatctctccctccggcgcaacccaatgggtgcgccacctccctcgtcagagggaggcgagaagggcgtgctttaacgtttgtttaatcgtcattccgagcgcagcgaggaatctcttgactccctctcagccttgcctgcactgccccgcccagctcaatcgccgcttttctgctaacgcaaaagattcttcgctcggccttacggcctccctctgaatgacaacatagcgcgtgttaaagcatacttttccattcacctcccaggcatactacatgtcattccgagcgcagcgaggaatctctttacaactgcttggctttatttggggcgcggtggctggggtgcgggtcgggcaagtgctaatgcgtcagattcttcgctcggcccttggtctcactctgaatgacaaggcttgctgcccctaaatcacctctcgccccgcctgcaccactaccgcctcggccacgcccatccatatcgaaaaacaataaatttttattgcatttcgccctcatcccgcctataataaaggcaaaggcaggtgtaaaaaaatgaaacaacaagaactctcccgctggctcaggatgatcgtgctgctcaccggcgccatcaccgcggtatttttgtgcctgatcgccccgtccatggggcaggacatcgccgcggccaacccggagtacgccttcatgctggcccccgcgctgatctttctggccgtcagcgccgtccccttttacctggctctctaccgggcctaccgggtgctccagcaggtggggcgggatcattccttttgcgccgaaaatgccgcgcacttaaaggccatctcccgcctggcgctgatcgacaccctgtggtactttttgggcgctgtcgctttggtgattggtaacgtcggccaccccagcgtgctgctgggcatggggctggtgatctttatcggcgtggcggcggcggtggcggcggctaccttaagccacctggtgcaaaaggccgccgccctgcaaagcgaaaacgagctgaccatctaaaggagggcgctatgggaattcgagtaaatctggacgtgatgctggcccgccgcaagatgagcatgaccaccctgtccgaccgggtgggggtgaccatggccaacctgtccatcctcaaaaacggcaaggcccgcgcggtgcgcttctccacgctggagcgcatctgtgaggtgctggactgccagcccggcgacattctggaatatgaaaaggaggatgaacatggggcgtctacaggcacagctgcagtttctaaccgagatcgataagatgaaggacgttttccgccgcaatgtcaccatcaaggcccgccggccggagaacgatgccgagcactcctggcacatggccctttgcgctctggtgctggccgagtacgcgccgcccggggcggatgtgggccgcgccatcgccatggccctggtgcacgacctggtggaggtctacgccggggacaccttctgttacgaccaggcgggcaacgccaccaaggccgcgcgtgagcaggccgcggccgaccgcatcttcggcatgctgcccgccgatcagggcacagcgtaccgcgccctttgggaggagtttgacgccatggacaccccggacagccagttcgccgccgcggtggaccggctacaaccctttatcctcaacgtcaatacccaggggcacacctggcgtttaggaaagatcacccgcgcccagctggaaaaccgcctggcccccatcgccaagtggatgcccgccctgtggcccaccgttagcgccatgatcgatgaggccgtgcagcaggacctgctgcccgggggctaaagcccttttggccgctcctatgttgtgcgggacgcctcgcggcatgggcacgcaaggggcggcgtctgcttcctccaccctgctgtcgggggctaaagcccttttgaccgctcttgccgccgcgcgtttccctgcgccttgtgcccgccaactgctgcggtactctgtcattccgagcagggctaaagcccttttaaccgctcctatgttgtgcggaacgcctcgcgacatgggcacgcaaagggcggcgtctgcttcctccaccctgctgccgggggctaatgcccttttgaccgctcctgcgccttgcgcccgccatgggctttgcgtgccctgtcattccgagccgcaggcgaggaatctctttacaccctcttggtcccgtccgcaccgcctccgcccgggtaaaacgcccaccccaccttgccccggctccccctccccctcgcctccctctgatgagggaggtggcgggcgcagcccgtcggagggagagattcccgcggcatccgctcggctctgcccgcaccgctgccgcccggtaaaccccagccaacagcccatgcacgagattcttcgctcggccttacggcctccctctgaatgacagggctagcgcctccttagccgctcctgcgtcgcgtatttcctcacgccttgtgcccaccaactgccgcggtattctgtcattccgagcagggctaaagcccttttgaccgctcctatgttgtgcggaacgcctcacagcatgggcacgcaaagggcggcgtctgcttcctccaccctgctgccgggggctaatgcccttttgaccgctcttgccgccgcgcgtttccctgcgccttgtgcccgccaactgctgcggtactctgtcattccgagccgtaggcgaggaatctctttacaccctcttggccccgtccgcaccgcctccgcccggtagaccccagccaacatcccatgtacgagattcttcgttcggccttacggcctccctctgaatgacagggctagcgcccctttagccgctcttgcgccgcgcgcttccctgcgctttgcgcccgccaactgccgcggtattctgtcattccgagccgcaggcgaggaatctctttacaccctcttggtcccgtccgcaccgctgccgcccgggtaaagtatccgccccgccgcaccccggctccctcttccccccctcgcctccctctgatgagggaggtggcgggccccgcctaccggagggagagattcccacggcatccgctcggctctgcccgcaccacaaccgaaccggcgccgctcccatagacccaccacaccccgtcacgctacgaccatccaccctgaaaggagaatccccatgaaaatgagaagaagtgaccgccagatcaccgaccctgccgccatccaggccatcctcgatgcctgcaccatcctgcgcctggcgctggtggccgatggcaagccctacgtggtgcccctgcactttggctacaccggcgcgggcgagcgcctcaccctgtacttccacaccgcccgggagggccgcctgccccgggccctgctggccggcagccccgcctgttttgagatggatatccccggcgagatcattcgcggggaactggcctgcaacttcagccagtgctatgcctccatcattggggagggcacaccccatgccgtcaccggggatgcggaaaaacgcgccgctctggacgcgctcatggaccatgtggccggcccaggcccccatatttatgcggatgccgccctgcgcgccaccgccgtttgggccctcccggtggattccctcaccgccaagcgccgggggagctaaagcccctttaaccgctctttgcactgctaattcctataattcagttcccgccagcggcgttatcgctttcccgtcctcctcgctccggagctaacgctcctttgtccgctcccactcctgcacctctccacacacccagcgcccgccacgggcgcttttgctttcgctcttctataccaagagctagcacccctttagccacttttggcgctgctagtttctataattcagttcccgccagcggcgttatcgctttcccgtcctcctcgctccggggctaacgctcctttgtccgctcccactcctgcacctctccacacacccagcgcccgccacgggcgcttttgctttatcccgctcttctataccaaggaccagcacttcctatccactcttggcgctgctagtttctataattcagttcccgccagcggtgttatcgctttcccgtcctcctcgctccggagctaacgctcctttgtccgctcccactcctgcacctctccacacatccagcgcccgccacgggcgttttgctttatcccgctcttctataccaaggatcagcacttcctatccactcttggcgctgctagtttctataattcaattcccgccagcggcgttatcgctttcccgtcctcttcactccagggcttgcaccccttaaccgttcctactcttacaccttttcatacacccagcgcccgccacgggcttatttccgttgtcctccggtgctagcacccctttaaccgctcttgctcctgcacctttccacacacccagcgcccgtcacgggcgctttttcgctgtcattccgagtaagacttgcgcccccttagccgctcacgcgccgcgcattttctcgcgctttgtgcccgctaactgctgcggtattttgtcattccgagccgcaggcgaggaatctctcgacaccctcttggcctcgtccgcaccacctccgcccgggtaaagcgctccccctccgcacctcggccccccacttccccctcgcctccctctgacgagggaggtggcgggcgcagcccgtcgaagggagagattctctcggcaaccgctcggctaagtctgtacctcaaaccgaactggacaagcagcactcccttgtcaacgcgctagattcttcgctccagcttcgcttccgctctgaatgacaggcttgcgccccttaaccgctcttgctcctgcccctttccatacgcccagcgcccgccacgggcgcttttgctttatccttctcttctatgccaaggtctaccgccctcttatccgctcctgctcttatacttttccatacactcaacacccgccataggctttgtcccgttgcccaattcctcattccgggtctaccgccctcttatccgctcctgctcttatacttttccatacactcaacacccgccataggctttgtcccgttgcccaattcctcattccgggtctaccgccctcttatccgctcctgctcttatacctttccatacactcaacacccgccataggctttgtcccgttgcccaattcctcattccgggcctaccgcccccattatccgctcctgctcttgcacgcgactatagactttacaatgctgtcatttcgagcaacgcgaggaatctcttggcaacctgttgacctggtctgcactgccgcactctaacatcctgtcattccgagcgccagcgaggaatctccctacaccctctcgctcccgccatgccgcaccccatcgcggtcaagtgcccacccctctccgcccggcctttctcttttacctcgcctccctctgatgagggaggcggcgggcgcagcccgccggtgggagagatgccctgtccccacccgcgcaaccttcgcttcctgccaacgcaggagattcttcgctcggccttgcggcctccctctgaatgacagggctgccaccctcctatccgctcaccccccctgcatttttacacgcctagcgcccgccacttgctttgttgcgctgcctgccccctttccagggccagcgccctcctatccgctcatccctctgcatttttacacaccccgcgcccgccacttgctttgcctcattgcccaactcctcattccgggcctaccgcccccatatccgctcccactcctgcccctttccatacgccccgcgcccgccacgggcgcttttgctttatccttctcttctatgccaaggcctaccgcccccatatccgttcccactcttgcacctttccgcacaccccgcgcccgccacttgctttgcctcgttgcccaactcctcattccgggcctaccgcccccatccgctcccactcttgcacctttccatacgcccagcgcccgccacttgctttgtcccgttgcccaaccgccgccccctgcgccttcccctatctcctctggcccgcctcccccggcccccacttggcccgggccaaaagggcgaaaaaccgcctgcgcatttcgtaaaactggcgtctgccgcagggcgcccccagcgcctcaaagcgtaccccgtagcacacgttcagcaccagcgccgcctccagcgcctccccggcagcctcccgtgccagacgggcgatcagcgccacatccctttccagccgcgcccgctcccattccggcccgccccagccccgcagatgggccagccgccgctttttctcctccaactgccggcaaaagtgcagcagctcccggtaggcctcccggctgatgcccgccttatcgagaaccagcgtccgctcccgcatccgcctcgcctccttccaaatacagtccccctgcctgcccggccagcgcccgcagacgctttttcaccccggcaggcaggcgcacctcgttgcgctcgcgctcccgttccgcctcgtaggtcttgataaactgggcccgcagcacagcctgatgatccagctcgctcaggcacagctcccgccagccaaaacgctgtgccgcccggcgcaccggctcgggcagagagcgcagcgccgcctccccctcgtaaaagccgtaccgggagatggcccgcgccagcatcgtccaggcctggtcggcctcgggctgaccgctggcctcctgcagcccttccgccgcgctgcgccgcacgtccgcaatggcgggcgggtaggggctgatggcgatcaaccgcttggccgccgccagcaccagcgcctcgggcaggtcgcccagcatctcctgccaaagcgccacggtgtgctggtccgcccgtatcttacttgcgggataggctgccgtcagcaccgccagcagccgcgccgtctgcgccgccgtcatgcccgcaccccctgtcccaatccccgggaatccatctttctccacttcatatccgcctttctcctctccggggctagcgcccccttgtccgctttcaacttttcaggtcagccattctttatccgcccgccatgagcttagctcctgtcattccgagcgccagcgaggaatctcatggcatccactttgtcctgtccgcaccacactgtcccggttcattcaggccaactaccaacgcagcagattcttcgctcggccttacggcctctctctgaatgacagggcttgcgccccttgttccactcccgctcccgcacgtttccttgcgtcttgcgcccgccagtggcttccgccgcgtaacacgcttttgtttcccaaggctaccgcccttttatccgctttcggcttttcaggtcagccattctttatccgcccgccatgtgcttagcccccgtcattccgagcgcagcgaggaatctcacggcacccactttgccctgtccgcaccacactatcccggttcattcaggccaactgccaacgcaacagattcttcgctcggccttacggcctccctctgaatgacagggcttgcgccccttctaaccgctcttgctctcgcgcatttccttgtgccttcacccgccaattgctttgtttcgctgcccaactctgttccctcggggctaacgccttttgtcccgctcttactcttgcgcgtttccatgcgcctaatccctccaatggcttcacctcgtactccactcccgttccctcgggggctaacgccctttgttccgctcaaactttgcgcatcaccatgcgtcctgagcccgccactgtttcactcactctgtcattccgagcaacgcgaggaatctcttgacaaccgcttggctttgctttccctcgccgtacaggtcaagcgctgccagttgccaacgcacgagattcttcgctccagctccgcttccgctctgaatgacagggcttgcgccccttgttccgctcccgctcccgcacgtttccttgcgtctcgcgcccgccagtggcttccgccgcgtaccacacttttgtccccggggctttcgccctcttaaccgctcctactgttcttcgttcccaagcgccttcgcccgccaccttctcgccgggtttcctctcttcaccttcccagggctagcacccctttaaccgctcctactgttctttgttcccaagcgccttcgcccgccaaccacttcgctggatttccgcacttctcttcccaaggcttgcgccctttgttccgctcccgctcccgcacgtttccttgcgtctcgcgcccgccagtggcttccgccgcgtaacacgcttttgtttcccagggcttgcgccccttgttccgctcccgctcccgcacgtttccttgcgtctcgcgcccgccagcggcttccgccacggtaccacacttttgtccccggagctttcgcccttttaaccgttcaagctttgtacactgtcatgcgcctacacccgccatttgctttacctctctgtcattccgagcgcagcgaggaatctcctgacgaccgcttggctttactttccctcgccatacaggtcaagcgctgccagttgccaacgcacgagattcttcgctccagctccgcttccgctctgaatgacagggctttcgccctcttaaccgctcctactgttcttcgttcccaagcgccttcgcccgccaccttctcgccgggtttcctctcttcatcttcccagggctagcacccctttaaccgctcccactgttcttcattcccaagcgccttcgcccgccatgggccttatctctattccaaacagccctccgctctgaatgacaggggctttcgccccctcacgtctcccgctccatctgctgtgccagcgccagaaagcgttctaccgtgtccccccgtgcaacgggccggcagacccgcttttgggcgttgcgcagccagccgtccacaaaccggggcatcatcccggccggacgcaccccttgcggattggcccgcagccagttgtccatggcccgcagctccccagccagatccagttccgggaaggccgcctgcagctggccgatctgcgccgcacccagcgcatattctccgtctctggccggcagggtaaaaaccgtgtccgcttccagggcaaagggcatcccgccgggcccatccccaaagccggcttcctcctcatgggggatcgcccccgcgccgcgccgctccttcgcatcagtccgcgcacagtccagcctgcacgccctttgtcctcgctgccgaccagcctcgccgcacctctcgtgcgccgccctctgacccggcaacccgccgttcaccggcgtttcattctccgcgcgcatcggctcacattcacttttcccttcgtcatgcccgctttcttcccgctgctcttttgcgcttctaccggcctcacacgccctctcatacgcccccgcgttgccgtcctccggccgccccggcttttccatatcagcctgcacacagtcccgccgctcctgccctcgtacgccttgttcccgttgcccttccgcctcgcgcgctctaccgccgtccatccgcattgtattcgccgtgcacgtcacacccctgtcctgtccgcgcgctttcgtcggctgggcctgccgtccttttcctcgttcatgcggcgcacatgtcccttcatgctctcccgcgccgccgtcctccagcgtcctgcgcgcttgcgcctccgcccgatcccttcgccgtcccgcttccgtctgccccgcacacgcccccgcagggggcccttcctgctcgcggcctttgccgcgcacctcccgcggaggaatccccccgagggggttgggttcggttgggttcggttcggttgggttcggttcggtaggtgcgtcacactgcgtcacagccgcgtcacaacccgcgtcaccgtgacgcgtcacagctgcgtcaccaactgcgtcaccatccccgccgccctgcgatacctgctcctttctccgctcccggtagcgccgcgtccgctccatcgtctgcgcccgcttcctggcccgggtctccatcaaaaggctggtgcgctcctcccagccatgcagccggtaacccccgggcaccggctcaataaagcccgcctcgccccctttgggcggggtgcacagcgcctgcatcagctttttcgccccgccggtaaagcgcatcacctcacacagcgtctccccgtcctccaacgccaataggccgtcctcccggttggctaggcatcaggtccacagcctgcacagcttgcccaccaccatgtccttgtccatgtccagcgcccgcgccaccgccagtgtcttgggatggtcgggcaggttgtcgtgtagttcgatccacgccatcctctttactcgcgcctcctctccatttattcagggggatccccccatacgtcccttttgtggacttccatctacttatagtttaaataccttatttataaatatcttattaaaacatgaggtctggggtaaaaaaagagtccccggggctagcgcccgcttaaccgctcctgcgtcgcgcgttttcacacacgctgcacccgccaattgctttgttccgctgcccaactccgttccctcggggctaacgccctttgtcccgctcttactcttgcgcgtttccatgcgcctactcccaccaatggcttcacctcgtactccactcccgttccctcggggctaacgcccttctaaccgctcaaactccttgcgtctccatgcctccagttcccgccagcagctttcgccacggaccacacttttgtccccggggcttgcgcccttttaaccgctcttactcttgcaccttttcacacgcccagcgcccgccagttgtctttccctattgcctcactccgctcccggggctagcgccctttgttccgctcttactccctgcgtctccgtgcctccagttcccgccagcagctttcgccacggaccacacttttgtccccggggctagcgccctttgtttcgctcaaactccctgcgtctccatgcctccagttcccgccagcagctttcgccacggaccacacttttgtccccggggctagcgcccttctaaccgctcaaactccctgcgtctccatgcctccaacgcccgccaacaaccttattcattcccgcactgtcattccgagcgcagcgaggaatctcttggcaaccgcttagccgagctgcaccgcatcgtcgcgtaaacgccctcgcctccctctgacgagggagggatactcccggcaacccctcggacgggcccattcaacaaccgaaccggcgccgctccccatagattccccccgctaaaaccccagcggccaggccgccaggcggtattcgctctcccgctcctgctcctgtgccagcgcgctgcgcgcctccagcagccgggccgccgcgcccgcagcctcctcgccggcgctcaggccatcctcccaaaattccacgtccacaccccccttcagggttattgtacacttgcattttcgcgccttggttcgcatttttctattttttggaaatcctctcccccatttccagcaacttaccgctataattcgccgctgccggcgcacactatccttagcctgctttttgagaaaggagtggctaaatttgttggaaaaagatgcgctccaattggagacccggaaccgcaagcccccggataacgatgcggccttttacgatttggataaggtcgcctcgtttaccgagtgcacggggctggcgcccagcgggatcctgagcgatgaggaggcccagtcctacgcggatctgtacgccatccacccgcccagaacccccaagggcgattcgcccaacatggcggacacggctaaaaaccgccgccccatctaatggctccccaacgacccaactccaaaagccgccccgcccgggcggtttttgggctttcgcccctcttaaccactcttactccctgcgtctccatgcctccagttcccgccagcagctttcgccacggtaccaaacttttgtccccggggctttcgcccttttaaccgttctaggctctcgcgcgtttcacgcctcccgctcccgccaccgctttactcgctctgtcattccgagcaaagcgaggaatctcctgccgaccgcttggctttgctttccctcgccgtacaggtcaagcgctgccaatcgccaacgcgcaagattcttcgctcgggcttgcgcccttctaaccgctcttactccctgcgtctccatgcgtccagcgcccgccaacaaccttattcattcccgcactgtcattccgagcaacgcgaggaatctcctgccgaccgcttggctttgctttccctcgccgtacaggtcaagcgctgccagttgccaacgcacgagattcttcgctccggggctttcgccccttttaaccgctcaaactccttgcgtctccatgcctccagttcccgccagcagctttcgccacggaccacacttttgtccccggggcttgcgcccttctaaccgcacaaactccctgcgtctccatgcctccagttcccgccaacaaccttgttcattcccgcactgtcattccgagcgcagcgaggaatctcctgacgaccgcttggctttgctttccctcgccgtacaggtcaagcgctgccagttgccaacgcacgagattcttcgctccggggcttgcgcccttctaaccgctcaaactccctgcgtctccatgcctccagttcccgccagcaaccttattcattcctgcactgtcattccgagcgccagcgaggaatctcttgccgaccgcttggccccgtccgcaccacatcgtcgcgcaaaagccctcccctccctctgacgagggaggtggcgcgcccagcttgccggggggagaaatgcccccgcactgctgtccaaccgccactccctgccaacgcaatagattcttcgctccgggggacttcgtcccacctggccgcactttacttcatgcatcccttacgtctattcacgctatgggctttatttctgtaccaaacagcccttcgctctgaatgacaggtctttcgccctcttaaccgctctaggctctcgcgcatttccctctccagcgcccgccaacaaccttgttcattcccactctgtcattccgagcgcagcgagggcgcggaacgagcgccggcagtgccggatgcagcgaatgcagcgcccaatgagggtacgaaacgagcgcgcccggtgggcgaagcagcgagtgcagtacccggtgagcgtgaggcgcgcgcaagtggcgtaagccgcgcggcgcaagcccccagcgaaccgagagttgcttggttctgccgttgttagagcaagcacttacgacgtgctgtgaagggcgaatccgcagcgaaccccgagttgtctggctctgccgttgttaggacgtgcacataagccgtaccgtgaaggccgaacccacagcgaaccgagcgttgccttccctcccgctccgacgaaattcgcaccccgcgcgccccgcccgcgcccgtataaatccccggccccaaggctatgctaaattcggaacacatcaaacgacggggggaattcctttgatcaataaagttgaaatatgcggcgtggacacgtccaagctgccggtgcttaccaacgaggagatgcgcgcgctcttccccaagatccacgcgggggacaacgccgcccgggagacctttatccgcggcaacctgcgcctggtgctcagcgtcatccagcgctttaataaccggggggaaaacgtggacgacctgttccaggtgggctgtatggggctgatcaaggccatcgataattttgataccaccctgggcgtgcgcttttccacctatgccgtgcccatgatcatcggggagattcgccgttacctgcgggataacaacgccatccgcgtcagccgctccctgcgggatacggcctataaagccctgcaggcccgggaaaagctgaccaacgcctccggcaaggaccccaccgtggccgagatcgccaaggagatggacctgccccgggaggacgtggtctttgccctggacgccattgccgagccggtctccctgtttgagcccatctatcatgacggcggggacgccctgtacgttatggatcaggtgcagggcgaggacagcgacgagcagtgggtggaacagatcgccctgcgccaggccatgagccgcttaaacgaccgggagcgcaagatcctcaccctgcgctttttcgagggcaagacccagatggaggtggccggagagatcggcatctcccaggcccaggtctcccgcctggaaaagggcgccctggagcgcatgaaaaagcagatctaggggctattgccctcttaatcgctcttgcgtcgcgcatttccgctcacccccgcccgccaatgtgcctgcgagttacctctctgtcattccgagcgccagcgaggaatctcttgacaaccgcttagccccgtccgcaccacgttgttccggttcagggcttctgtgcgtttccatgcgcccacccccgccagtggctgtatgaacctgccctgctctttctctaagggcttatgcccctttagccactcttactcttgcaccttttcacacgcccgcgcccgccaacatccctgcggattaccatgctgtcattccgaacgcagtgaggaatctcttgactcccgcttagccccgtccgcaccacgttgttccggttcagggcttctgtgcgtttccatgcgcccacccccgccagtggttgtattagcttgccctgctctttctctagggctttcgcccttttaaccgctcttactcttgcaccttttcacacgcccacccctgccagtggctttatccctgctccagtctgcccttcgctctgaatgacagggcttgcgtcctcttaaccgctcccgctctcgcgcattccatacctccaagcaagccaacgtccctgcgagttacctctctgtcattccgaacgcagtgaggaatctccttacaaccgcttggctttgctttcccttgccgtacaggtcaagctccgccaacagccaacgcatcagattcttcgctccgggggacttcgtcccacctagccgcactttacttcatgcatcccttgcgtctattcacgctatgggctttatttctgtaccaaacagcccttcgctctgaatgacagggctttcgtcctcttaaccgcttccaatctcacacatttccataccaccaagcccgccaatgcccctgcgagttacctctctgtcattccgagcgccagcgaggaatctcttgccgaccgcttagccccgtccgcaccacatcatcgcgcaaaagccctcgcctccctctgacgagggaggcggcgggcgcagcccgccggagggagagatgccctggcaccacccgcccaaccaccgctcccactctcacacatttccataccaccaagcccgccaatgcccctgcgagttacctctctgtcattccgagcgccagcgaggaatctctcggcaaccgcttagccccgtccgcaccacatcatcgcgcaaaagccctcgcctccctctgacgagggaggggacaggcgcagcctcccggagggagagatgcccgcggcacacacccacccaaccgccactgtcccgcttttcctctcccgccccttccgctctgtccggcccaagttcccctctccccattccctccgcgctcaccgcttctccccccacgcataccgctttgccgaagccatttgccccctccccctgactttcccccgccatccgccccctcccgtgctataataaagaaaaaccgccccctcgggcggcaaaaaaggagcgttccaccatgaaagatgcctgccaacgggagctggcgctgctcgagcagctcaaagcctacgacaccccctcggtcaccaacgtggtggccacctacccggaggataaggagaactgcctgggcctttaccacccctggcagggccagtggtacaccgaccagcgcctgcgctgcatgtatccggagctgggccgccgcgccggctttgcggtcacctgcgtgtatggcctgcccgacccgggctttacccgcctctcctttggggatctgctgcgcgcggtggatgcggcccccggcccggcggtggtgatcgtcaagcagaacttccccgaggagatcaagcgcaaaaacggcctgctgggcggcaatatgatgacggcgctgcgctctgccggcgcggtgggggtgatcagcgacggcccctcccgggatgtggacgaggtgcgcgcgctggggctgcactacatgctcaccggcgttacccccggccacggcccctttgccctgcaggccatcaacgtgccggtggaggtgtgctccatggccgtctcccccggggagatcgtccacctggatgaaaacggcgcggtcaagttcccccgccaggccctggaggcggtggcccttcgcctggagcgcctttccaaaatcgaggcgcgccgccagcaaatgctgcgcgagacctcggatgtggcgcagcttgcccgcatcatggccggcctgtacgattaaaaagcgtatttttcgcccaaatcccgtaaagccgcccctttcccttgcatgaggacaagttggccctacatatgaatttacaaaatatgttttttatacggccccgcgctgtataagccccattttatgcgggaatagtatatacaaacaaactgcaagggagatgacgggagatgacctcattcgaggcgacggcggcagcccaggcccacgtaggctggacccaggcggagaccgaccttttgcgcgcccgcgcggcgcagattctgcaggaggggcggcccctgcgcgaagtatttgaagagatcgcccgcaagaccgggcgcaaaagcggcagcgtgcgcaattattactatgcagccatccgcccccagctgcggcgggagatggccctgcccggcggggccaacggcgcccacgggccctttgtgccctttaccggcgaggagatacgcgaccttttgcgcgcggtgctgatggcggtgggccggggcgcatcggtacgccaggccaccatggagctggccggcggggataagacccgtatgctgcgctaccagaataagtatagaagccttttgcgctctcaccccgcgctggtgggcgaggtggtggccgagctgcgggagcagggcgtccccgtcaaggacccctttgccggcaaagcgcccctgccccaggcggagcctgcgccgggcgaggcggccgcctccgcgcccgagtgggacgaggcggagctggccagcgccctttcgcgcatcttcagcctgctgcgcgggcaaaacggccccggggtgatggccctggtcatgggcctggaggatctggcctcccgcgccgcccgggcgggctcctggcgcaagcgcttagagcagtttgacgccctctccgcccggcacgacctgctggccgtgcgcctgcaacagacccagcaggagctggaggccgccaacggccagctggaggccctgcgccaggcccagcaaagcctctcgcccctggtggagctgaaccgggatttcctccagcagggcaccgcgggggacttaaataccctcaacgcctatatgctgcgcttaaaccagtgcctggagggcagcggcctgctgcaatagcgcgcctgtctttaggccataaccaaaggcccggatggaattccatccgggccttttttatgcttccggggcttgcgccctttttaccgctcctacttcagcgcgtttctatgcgctcactcccgccaatagctttattctgtcgccacactccgctccggggcttgcgtccttttaaccactcctacttctgcatgtttctatgcgcccactcccgccaatagcttttctgtctgtcattccgagcagcgcgaggaatctcttgataaccgcttggcttgcccacaccacgccgcttaagttaaatgcccacgcccaagcagctttggttctcctcttttaccttgcctccctctgacgagggaggcaagagaaagggaaaacaagctgcggagcataagcgaaacggctggaaaatacttttgcttatcggcatcggagagtttgaaaaacctctgtcccctccacggagtggccgtttggggggattagggattgttaagggggtaaagggggaaatcggaatcccccttcccccttaacgaataaaaaaacgttccctaactttcctccctgcctcgcgttaagcctggttcattactgaacaaaaaactatacttttatccattcacttctcaggcatacacaagtgtcattccgagccgcaggcgaggaatctcttgacactctctcagccctgtttgcaccgtcgctgcatagctcaagctccgctcccctacccacgcccgagattcttcactacggctacgcctccgttctgaatgacaggtggagagaagcgcttgcttgcacatgaaccgggccgccgcttctcaatggcaggctggggaaccacgaatctgcctacaacctctcgcccccgctccatctccttccaattctttgctccgctggtccgtcatcctctgttcactgtgggtttgctcgcgcccgcccggccgcgcacgcagtctctgtccgcgccgcatcctccacggtcaagctcccgctttccttttcgctcccccctacgacaccttctcaaactggctcatgtacaggtctgcgtagaagccgcccttggcgatcagctcgtcatgggtgccctgctcgacgatgtccccatccttcatgcaaaggatcaggtccgcgttgcggatggtagaaagcctgtgggcgatgataaagctggtgcggccccggaccagattgtccatggccttttggatctgcacctccgtgcgggtatctaccgagcttgtcgcctcgtctaagatcagcaccggccggtcggccagtatcgcccgggcgatggtcagcagctgcttttgcccctgggatacgttgcccgcctcctcgcccagctccatcccatagccgccgggctgggtcataataaagtggtgggcgtgggccgccttagccgcggcgatcacctcttcatccgtggcatccagccgcccgtagcggatgttctccataatcgtgcccttaaacagccaggtatcctgcagcaccatgccaaaggcattgcgcagctcgtggcggtcaaagtcgcgtatgtcgtgcccgtccagggtgatctggccgccggtcacgtcgtaatagcgcatcaaaagcttgaccatggtggtcttgcccgcgcccgtggggcccacgatggcgatcttctgcccggcgcgcacgtctgcgttaaagtcgtttacgatgatctttttcgggtcgtacccaaagcgcacgtggttaaagcgcacgttgccctgcacgtcctgtaagtgcacggggttctccggcgaggccacctcttcctcctcatccaaaaaggcgaacacccgctcggccgccgccgccatggattgcagcatgttggtgatctgggcgatctgctggatggggttggtaaagttgcgcacgtactggataaaggcctgaatatcgccgatggtgatggccccctggatggcgaagaacgcgcccgaaatggccaccgccacgtaccccaggttgcccacaaacaccatgatggggtgcatcagcccgcttaaaaactggctcttccaggcgctttggtacagcacctcgttggtcttgtggaactgctggcgcaccgcgccctcctggttaaacgcccgcacgatctcgtgcccggcgtacacctcctccacctggccgttgatgtggcccaggtactcctgctgggtgcggaagtacttctggctctttttcaccaccgcgccgatgaaccccaaagagatggggaggatcacaagggtgatcagcgtcatcagcgggctgatggtcagcatcatcacgattacgcccagcatggtggccaccgaggtgatcagctgggtcacgctctggtttaagccgttgcccagggtgtccacatcgttggtgatgcgggatagcacctcgccgtaggtgcgggtctcaaagtacttcatgggcatccggccgatcttctcggtcagctcccggcgcagccggtagcacagcttctgggtcaccccggtcatcacatagccctgcacaaagctgaacagggcgctcaccccgtacagccccagcacccagagcaggatggtgccgatggccccaaagtcgatgccgccggtgccctgtatcttggccatcagcccgtttgccagttctgtggtggcgttgcccatgatcttggggccgatgatggagaataccgtcgagccgatggcgaacagcgccaccacccctactgcgatcttgtagcggccgatataggccagcagttttttgatggtgcccttaaaatccttggccttctcgccgctgcccatggggccgtggccgcccataggcccccggggccgtcccgcgggccgcccttcgggcgcgtattgctttttggtcatgcttattcacccgcctttccgtaatcttctcccagctcgtctggcgatagctgggattgggcgatctgccggtaggtttcgcagttttgcagcagctcgccatgccggcccttgcctaccaaccgtccctcgtccagcaccagaatctggtcggcataaaggatggtggagatgcgctgggccacgatcagcaccgtggcgtcctttaccttgggccccagcgccctacgcagcgcggtatcggtcttaaagtccagggccgaaaagctgtcgtcaaagatgtagatcttcgggtccttggcaatcgcccgggcgatggagagccgctggcgctgcccgccggaaacgttgctgccgccctgggcgatggggctatcgtacccctcagccttctcggcgataaagtccgtagcctgggcgatggccgccgcctcttgcatggccgccgcgcccgcctccggcgcgccgtagaggatgttgctctcaatggtgcccgagaacagcacgcccttttggggcaccagccccaccgccgcccgcagggagccttgggtgatttcccgcacgtccaccccgtctaaggtgatctggccgtcggtcacgtcgaagaaccgggggatcaggttgattaaagtcgatttaccgctgcccgtcgagccgatgatggccgtggtctggcccggctgggcggtaaagtcgatatcgcgcagggtgtacccctccgcccccgggtatttaaagtccacatggtggaaggccagcacgcccttggggtcttttaagtccacggcgttttcgctgtcgtaaatggagggtttggtattcaccacctcgtcgatgcgctcggccgccaccgccgcccggggcagcatgatggagatcatgcagatcatcaggaagctcatcacgatctgcatcgtgtaggtgataaaggccgtcatggtgcccacttccatcgtccccgcgtcgatgccgcccgccgccgtccacacgatcagcacgctgatcccgttcatgatcagcatcatgatcggcatcataaaggtcatcgtccggttggtgaacagcatggtctttgtcaggttgcggttagccccgtcaaagcgctcctcctccaccttttcccgtccaaaggcgcggatcacgttcaggcccgtcaagatctcccgggccaccaggttcactttgtccaccagcacctgcatcagcttgaacttgggcatggccaccgccatcaggaaggccaccagcgccacgatggccagcaccgccacgccgatgatccactccatccccgccccggtctgcaccaccatgatgatgccgccgatggccaggatgggcgcgtacagcaccatccgcaggatcatggtggagaccatctggatctgctggatgtcgttggtggagcgggtgatcagcgacgcggtggagaacttgttgatctccgccgagctaaagcccaccacgttgttgaacaccttctcgcgcaggtcgcgccccacgcccgcgcccacccggctggccaaaagcccggccagcaccgcggccgccgccatccccaacgtgatggccagcatcagtccgcccgtgcgccacaggtagccgctctggatgtccgccagagacaaccccacggcctcgtactcggtcttggtaaagttcaccgccgtggagtggatcaggctctcgcccatggcggccatctgctcttccacctgctctcggatggcggtcaggtcaacgccctgttcgccctccatctggcccgcgccctgcccggctagggttccgcccggggcctgcgccgggtcgccgccctgttctgcgggctgggcctgttctgcgtccggggtctgtgcgcccggctgtccggcagcttcgccctgttgtccgtttgcctgcccggccggagttccgtccggggcctgcgtcccctgctgggccatggccgcctgcatctgggccagctggccctcgtccatctgctcgatcatcgcgcccatcaaaatgggggtggtaaactgctcgtctagcgcctccatgtccttagccgcatcctcggtcaggtggtagtagccgtcctcccccaccgcataggatgcctgccaggcctgcttttcatcctcggtcatcagcaattgcagcccttcaaagctctccttgcgcatcaccgtgggcgtagcgtactccacgccgctgttctggatgcccacgtcgatgatctttgaggtgtagttgggcaggctcaggtcgcacaccgcctgcaccagcagcagcaccacaatggccaccaccgccttccagtacggcttcatattccgcaatatcttgatcaaaccttcatcctccttctttggggggacttcgtcccctttagccgctctatctaaagcgtaaagccttcacttgtaaggcccgccagtagctttgctttctctccacatctccacttaggggggctttcacctctttagccactctatctaaaagtttaaatccactgcattagaggcccgccatgggctttttgctcctgttcttctctctccgtgggacttcgtcccccttagccgctctatctaaaagtttaaatccactgcattagaggcacgccataggctttttgcgcctgttcttctctctccgtggggtttcgtcccctttaaccgctctatctaaagcgtaaagcctttactctcaggcccgccacgggcttaccagcttgtcattccgagcgcagcgaggaatctctttacacccgcttagcccagccttatcttctctgccggggcttagtgcccttctctccccccgctcctcctctcgccccctgcccccctcgtttgagggagatggcaggcgcaagcctgtgacggagggagtaggggacttcgcccccttagccgctctatctaaaagtttaaatccactgcattagaagcccgccataggctttttgcgcctgttcttctctctccgtggggtttcgtcccctttaaccgttctatctaaagcgtaaagcctttacacaccctctgttcactgtgggctcgcgcttcgttccttccgtcactcgcccttgccacacgttcacagagcactgcactcgctgcttccggcactgccggcgctcgctccgtgctcccgccagtagcttcacccttcaaactgtcattcagagcgaggcgtgccgagcgaagaatctccttacacccgcttaactttgcctgcaccgccacagcctcggtaaagcgctcttttcgccccactccgctcctcctctcaccccttgcctccctcgtttgagggagggggaccgccgaaaaggcggtggtgggcattctcatcccggcaaaagcgatccccgttcttctccgcgcgcggctttcgccacttttctgtggggagtcctcgcctgcctatccgcgtccgtgccgctccacccccgcccggcgcactccgtgccccggcccgggccgcatccgctcgtccaggccctgctcctggcgcacccgctccatttcctcacaaaagccctgatacagcttttggaagatgcggtaaaactcatccagctccccgggctccaggtgggccaccgcccgctgcataaacgccttgatccgcgccagatcctgcgccatggcctcgtgccccagcggggtgatcttcaggtacccgccccgccggtcgcgctccacagtcaccgcctccagatatcccttttcccgcagatgccgtaccgagcggctgaccgccggcggcgagatcgtcagccgcctggcaatggccgacacgctgcacccctgctccccctgctccttttcgatctccttgatggtctttagcaccatcatctccccttgggggatcagccgcagcgcctccgccaggttcagctgccggaaccggtgcatggtcctgaaccacctgtcctcctgcgttggcatgccttcgcctcctttaacgttttgcgctcgtcctatcgtcctgccctgcgcccctcgccgggcccgccacattcgcgccatattttaaccacgttaattatcagcacgctaataattaactatgttaaatattttatgcatttccaccgcgtttgtcaacgcgccgcctgtgaacagtttgtgaattctcggggcttgcgccccctgttccgctcacggttccgcgcgtttccacacacccacgcccgccaacggctttattcttttcccccgctctccttccctgggcttgcgcccctttatccgctcccagccttccagatcagccaaccttcaccggcccgccaaggaccttatccgcccgtcattccgagcggggctttcgcccccttatccgctcacggccttccagatcagccaagcttccccaacccgccaaggaccttatccgtctgtcatccccaccaggactttcgcccttttaatcgatcattgttctcagcacatcatgctacttcgtccgccaatagctttgccgctctgtcattccgagcggggctttcgcccttttaatcgatcattgttctcagcacatcatactacttcgtccgccaatagctttgccgctctgtcattccgagcggggctttcgcccttttaatcgatcattgttctcagcacatcatgctacttcgtccgccaatagctttgccactctgtcattccgagcgtatgcgaggaatctctttacaacctctcgaccctgtccgcaccgctccaccgcgtcaaggtgcctccctcgccgtctcagttttcctctcacccctcgcctccctctgccgagggaggtggcgtcccttagggacgccggagggagagttgcctgctcttgccgtcgccgtgcaaaacacataagccgccccgggccgcaaacgcaatctgcgctaagcccgtccaactgccaatacaaaagattcttcgctgcagcttcgcttccgctctgaatgacaggggctcccgccccctgttccgctcacggccttccagatcagccaagcttccccaacccgccaaggaccttatccgcctgtcatccccagcggggctttcgcccttttaatcgatcattgttctcagcacatcatgctacttcgtccgccaatagctttgccactctgtcattccgagcgtgagcgaggaatctctttacaaccgcttgtccctgccttgcccccttgcgcggtcaagtgctccgtacttccccgctttggcaattccgcctgctttctcgcctccctctgccgagggaggtggcgtcccttagggacgccggagggagagttgcctgctcttgccgtcgccgtgcaaaacacataagccgccccggtctgcaaacgcaatctgcgctaagcccgtccaactgccaatacaaaagattcttcgcttcagcttcgcttccgctctgaatgacaggggctatcgccccccctgattcactcacggccttccagatcagccaaacttcaccggcccgccaagagccttattcgtctgtcattcccagcagggctttcgccccttcatccgttaacggttccaggctcgtcaaacactcgctatcgccatgagcttattcataggtagccgcagcgcactctgggccaccgcccccttcatccgctccaacagcccgcctttattggccgttttcgcccgccatgggcttgacccatcccctctagccgctcgcgctcccgtgcgtcccctcgctccgcactcccgccaatagctcctcccctatcatccccaccagggctttcccccatccctcccctcgcccgggcgcgcaaaagcccccgccaaaaaggcgggggccgcatataggtctatttttttgtttacacctcggggatctgaatctccacttcgtggccggcttcggccgagtccttaatgccgcagatgatggcctggttgtacaggatctggctggagggtaccggcggcttgccgtttgtcttgatcgcatccaggaaggagcggatcttcttatcaaacaggcccgggccctcgttttcgatcacggggataatggtctccacctggctgcccgccagctcgtagtacagcgtcatcggcccgcccaccgtgccgttccagcactcggtggaggggatgcgcagcgaccccttcttgcccatgatgatggtatcccccggggtatccaggtgcatggcccaggcgatgcggaagtctaaaatgatgccgccctcaaggcggataaaggccgccgcaaagtcgtctacattaaagcggctggcgttctccggggccgaatactcgtagctggtgccgaaaaagtcggaggtgtagcccgtcaccgtcaggggcttggggtagccgatggcgttaagcaccatgtccagcgagtagcagccaatatcgcccaacgcgccgatgcccgcggtcttttgctcgataaacgtggagttggggatgcccctgcgccgtccgccgccggtctggatgtagtacacctcgcccaacgcgccggattccacgatctttttgatcatcttcatgttctcgtccagccggggctgaaagccgatggacagcagcttgccgctctttttctccgcgcggatgatggctgccgcctcctccatggtcacgcacatgggtttttccagcagcacgttcaccccgtgctccagcgcgtcaatggtgcactcggcatgggtggtgttgtaggtgcaaacgctgaccgcgtccagctgctcgttttccagcatctcgtggtggtttttgtacaggcgcacgttttccaccccgtaatctttaaagaaggcctccgccttcccgtcgatcaggtccgcgcccgccacaatatccacatccggcatgcgcaggtagctctcgatatgggattccgcgatccagcccgtgccgatgatgcccaccttcagcctgcgctcggggtcgatcacctgctggggtttctttttctgttggaactggttcaatacctcgtcgccaattgccgccatcttcatctctcctttatccggttgtgccccgccaaaaggcgggcccttgacctttattatacatccttgacaccgtggaaaccacccctattttcccccgggatgcaaatttttgcaccgccagggtgcatccatctctgtcatccccagcggggctttcgcccctttttcccgctcacggcctttaaaatcggccaaacttctccagcccgccaagggccttatccgcccgtcattccgagcgtgagcgaggaatctctttacaaccgcttgtccctgccttgcccccttgcgcaggtcaagtgctccgtacttccccgctttggcaattccgcctgctttcttgcctccctctgccgagggaggtggcgcacctaaaggtgcgccggagggagagatgccgccaaacaaaaactcatactttaacactcgctatgttgtcattcagaacgaaggcgcagccggagtgaagaatctattgcgttagcagaaaagtggcgcttgagctgagctgcgcaggtggaggcagagccgagagattgccatgagattcctcgccagtggctcggaatgacatgtgcagcatactgttgatgagtggaaatgcttacttatcctttcacttcccaggcatacccaagtgtcattccaagggcgcggagcgaacgccgtaaggcgtgaaggccgaacccccagcgagccgagcgtggcctggctttgccgttgctggaaagaacacctaagccgcaccgctccttcccggcaaagccctctcgctgctgcccagccttaccgcctctgccggcaaagctgccgccccctccccctaccgcagcgcgcgcacccccgcctgcagcagggcgatcagccgccgcccctccgggggcaggctctcccgccgggggtagatcaccacgtccttgttcacccccgcgtccgtacagcgcacctgcaccaggccgtggcggctcagctcctccgggggcaccgggctggcccacaggtaagcacccggcacggtacgcagcaggtcaaactggctgccccggtcgtagatatagatgcgcttttgcacctgctgcacccgttgcaggttctccagccgctcaggcggcagcgccggcacctgaaaatccccgtgtaccagctgggggtatttccccagcatcaggtaggggatgttgtgcagcagcgccagtggatggtccttgtgcatcaccagccccatccggaaggaccacaggtgctcgtgctgcaggtggtgctcggccagcaggcccagaaagtgctcctcgtagatgtcctgatagcgcagcacccccagcgcgctgcgcccgcccgccacatcctcaagcacttccatggagtgggtctccttgtactgcacctccagcgcctcgtccccggcggcgtactcggccataaaccgggcaaaggcggtggcgatgtaggtggcccggggcgcggatacctccaggcgcttccccccctcctcccgcggcgcgtacagggattgcagcgcgtccattttatctaatatctcccgggcgtggcgcagaaactgcagcccctcgccggtgggctccaccccccgggcgttgcgccggaaaaggctgatgcccagctccccctccagttctttgatggccttggacaggttgggctggcccatgtacaggttctttgcggcctgggagatgctctgggtccgggctacctccgccacgtagcgcagctgttgaatgttcacgcgcatccctccttgatcttgcagggcgcccgtattttaggcgccccttacttacctccattatacacgaacccggcgcaaaatgcaggcgcccgcccttcggacataaaaaaagggccggagccttccgctccagccctatcttccatgcgctataccagcaccgtcaggtaatactcggtcacgtccatcgtacccaggctggtattgtatgcaaggtaataaaacttatattcgcccgattcttggggcagggtgttgtacgcatccagcgtggcgttgtagagcataaaccggtcgtaatgcccggtctcaaaggtgcccgcataactgtagggcaaaaggccgatcagctccgtcctgatgtcggtcgtccaccgctcatcttccagcaccgccccgcttaaccggtccacctgcgcctgctcttcaaagatcacgtggctgtcccgcagcacgtttaccttgtcgttggtggaaaaccgcgtgccaaaatcccgggtggtgatccggccctgttcgggcatctccacgcccaccgcctgccccacctgggccacgtaaccataatcatacgttccgctgggcccgacgaacaggctgggtagccccattccgcagacataaagggcgacgatcgccccggccacgatattcttcgtgcaccggtagccctttttacggtatacgatgcccagcacgatggaggccagcgggatgggcagcacaaacagctccccccacatataatcgccctgcgcctgcgtcatgggcgagatggataccaccagcgcaaaccctataaaaatgctcagcaacgtcagcataaacagccagcgcagcatgctgttgatccggaactcccgcttgagcttgatctgcaatgcgtttagttccttcttttcgcgcctgaacaaattgaatccgcctttccgccgcaccgggcgcattttgcggggcgttccccgcccctctatcctaccacaggcccgccccggccggcgctcacctgcgcgtgagggtgggcgttttgcgcacagcccaaatgcgccttgatccgggcgcgcacccgctccaggtcggtatcgcacagcaccggcaaaaatttcgccagcgcctggggcgcaaaattccaccagcgcagctgtaaaagcaggccggccagctcgtcgtcaaaccgctggcggatcggccttgccgggttgcccccggccagggtataggggggcacgtcccgcgtcaccaccgagtatgccgcaatgatcgccccatctccaatccgcaccccgggcaatatcgcgctgttgcggccgatccatacgtcgttgcccaccacggtgtcgcccttgcggggcaactgctccatatggggtggcacggccgcctcccacgcaccgccaaatacggcaaacggataggtgctcacgctgcccatccggtggttggctgggcccatgataaagtgcgccccgctggcaatggcgcaaaacttgccgatgatcagccggtccccaaattcgggccagttaaacagcacgttgttgcgctcaaagcccgtggggtcgtcggggtcgtcataataggtataatcgcccacctggatgttgggggccgtaatcacgtttttgataaaacaggtggtgccaaattcattggggaacaccgcgttcgggtcgggtaatcttttcatctgctatcgctccttttatttttaatcatcgcctcctttccgcctcctggcgccgttgctacgccgcgcatccgccttatcgctttcacatccgctcacctcgttttaaagttcccgttttccttccctccaggcccgccgggccgtaacccctgcctcttgtgggaatatactaacataaaatgataattaagtggggatcttcatgtactgctcctatccatcctgtaatagaaactgcgcaaactgcccctgcccgtgctgccccatgtggataggccccaccgggcctgccggcctccccggccctacggggcctactggcgctaccggccctgccggggctgccgggcgcaccggcgatgaagggcacattggcgataccggcgctactgggcccaccggtcccaccggagctgccggcattgctggccccaccggccctatcggccccactggccccactggccccaccggctctaccgggtctaccggctctaccggtgctaccgggtctactggtgctaccggccccactggccctaccggctctaccgggtctaccggtgctaccggatctaccggcgctactgggcccaccggtcccactggagctgccggcattgctggccccaccggccctatcggccccgcaggggctgccggatctattggccccactggccctaccggctctaccgggtctactggtgctaccggccctaccggccccactggccttaccggcgctgctggggctaccggccctattggccccgcaggggctaccggatctatcggccctactggcgcagtcgggtctaccggtgctatcggccctaccggccccactggccttaccggcgctgctgggtctaccggccccactggccctaccggcgctgctggggcagccggtgctaccggccccactggcgcttccggggctgttggggctaccggccccactggcgcttccggggctgttggggctaccggccccaccggcagcgtgcctgacgatatcttcgcctcttttttcgacctaaacgccctgctaagcgtaggcagcctcatccctctcttcccccaggtgaccgaccccaccgggaacatcgtcgcggccgattcagagcatatcaccctggcgccgggatactatctggtttcctacaaggtctccgcagtatttgaggcgcccaattacatgcagatcacgcccgcctataacggcgcggcgcacctggaagcgggtatctatttcgccaccaccaccaatggctctagcgcgtgcggctctgcgcactttatcatccgtgcccccgctcaaaccacctttaccctcacctactcgggctcggccaacgccatcgaaggggatgtaaacctcatcatgctcaagctgcgcaggcccctgtaaacctggggtgggcaggcgctgccgcgagactcaatttttgcgccatctggcacaggcagtcaatttagtgcggtccgccacgttgcacgctactcctgcgctactccgtttttttccaaaacccacacaaaaaacacccgcaatcgctgtcatttcagacgattgcgggtgttccccttggtggagataagcgggatcgaaccgctgacctcttgaatgccattcaagcgctctcccagctgagctatacccccacgggcaggccttttgttggctgctccgttattatagcgcagctacccatttccggtcaagcccttttttcaattttttcgttgatttttgccgtcccggggctgtagccctttgttccgcataagcccttgcgcgtttctattcgcttgcgcccgccaacggcctcgccgtgttctcgcacttcacccgcccggggctgtagcccttctaaccgctcaacctttcgcttcaaacccagcgcctccgcccgccataggctttactcgctccctcattccacgctgggctttcgccctttttccgctccgggcctttcgctgcagccccagcctctccgccccgccctagaccttactcattccctgtcattccgagcaacgcgaggaatctcctgacaaccgcttggtcagtcccgcaccacatcgtcgcggaaaagcccttgccgccctctggcgagggaggtggcaggcgcagcctgccggagggagagacccgctgccgcctaagctccgccaacagccaacgcatcagattcttcgctccgggggacttcgtcccacccagccgctctttactacctgcgtcccttgtgtctattcacgccatgggctttatcctgtcccaaacggccctccgctctgaatgacagttgcggctctctccccatgcttggcctgtaccactgcggctttttaaatctgtcattccgagcaacgcgaggaatctcctggcacctgcttggccaagcctgcaccacatcgtcgcggaaaagcccttgcctccctctgacgagggaggtggcgcgcccaaggcgcgccggagggagagaccctgccaagcgcccttctaaccgctcaacctttcgctttaaacccagcgcctttccccgccctccggctacttgcccatcttatccagcaggctaacgatctcctccaccttcacctcggcctgggcctcgtcctgccccgtcagggcctggcgcacacagtggcccatatgcgcgcgtaagatctccttattggccttgcgcagcaccgattccgccgccagtatctggttgcagatatcgatgcagtaccggtcctgggtcaccatcttttcgatcccgtcgatctgcccgcgcgccgtgcgcagcagccgcaggatcgtgtcctgatccgccatcatacgccccacaccccttttgctttacgcgatgcccgttacctcgtagcccgcgtcctccaccgcggccttgagcgccgcatcctccacttcgccgcttaaggtcacggtagcctcgcccttttccagatccaccttggcctgcacgccctccaaagcgttcagcgccttttccacccgcgcgctgcaatgcatgcaactcatacctgctaccttcaataccttcgtcatcttttcttcctccttattttttgcagggtctgcccccgcttgttcgcaattctccgcggcaggggccgccttttcgcctacgttctcttccaaatcaatggggcaagccccctgccccaccgggcaggccgcccctatgcttccaaccgcgccggcctccacccccgggaatttgggcttgaacagccgcagccgcagggcgttgcccaccacgcacacgctggacaggctcatggcgaacgccgcaaacatggggttgagcagccagccaaaggccaggtaaaacacccccgccgccagcggaatgccgatggtgttgtagatcagcgcccagaaaaggttctccttgatgttgcgcagcgtagcccggctcagctgtaccgccgcgggcacgctaagcaggtccccctttgtcagcacgatgtccgccgattcgatggccacgtccgtccccgcgccgatggccagccccacgtccgcccgggccagggcgggcgcatcgttgatgccgtcccccaccatggccaccttcttgccctgggcctgcaaccggcgcacctgggcctccttgtcctggggcatcacgtcggcgatcacggtgtccacccccgcctggcgggcgatagcctgggccgttgccgcgttgtccccggtgagcatgatcacctccagccccatgccttgcagcaccttcaccgcgtccgcgctggtgggctttaaggtatcggccaccgccagcacggccagggcgccctgtgcatcggctaaaaacaggggcgtgcgcccgctctgcgcctgcgcttcccccgcggccttcagcaggccggcctgcgcgcccttttcctccaatagttgcaggttgcccaaatagtagcgcttgcccgccaccacgccgcttagcccccttccggggatggccgtaaaatcctgcgcatcgggcagcgtcagcccacgggccttggcgccctccaaaatggcgttggccagcggatgctcgctcttttgctccagcgccgcggtgatgcgcagcgcctggtcctcctccacgccctctgcggggatgacctgcaccagcaccggcttgccatgggtcagggtaccggtcttatccagcaccaccgcgtccaccccgtgcagggtctctaaagcctcggcggatttaatgaggatgccgttttccgcccccttgccggtgcccaccataatggccgtgggcgtggccagccccagcgcgcaggggcaggagatcaccagcaccgcgatgccgatggacagcgcaaaggccacactttgccccgcgatcagccaggcgatggccgccaccagggcgatgaatatcaccaccggcacgaaaaccccgctgatcctgtcggccatccgggcgatgggggccttggaggcgctggcctcctccaccaggcggatgatctcgctaaaggcggtatcctcccccacccgggtggcggtaaaggtaaagtgcccgttgccgttgatggaggcgcccaccaccctgtccccagggcctttttccaccggcaggctctcgccggtcagcgcgctctcgtccagggccgagtagccctctaaaacctcgccgtccaccggcaccacctggccggggcgcaccaccacggtgtcccccacccgcacctgggccaccggcagctcggtctcctgcccgtcccgcagcaccacggcggtcttgggggccatctgcaccaggcgggcgatggccgcgctggtcttgcccttggcccgggcctccaggtatttccccaccgagatcagggttaagatcattcccgcgctctcaaagtacaggtccatggcggcgtggtgtacgctcatcatatcccccgcccccagcgcgtagccgatgcggtacagggcgatcaccccgtagaccagcgccgcccccgagccgatggcgatcaggctgtccatggtgggcgcgccgtggagcagcgatttaaatccattgataaagtagtgccggttgaggaccacgatgggcagcgtcagcaaaaacagggtgagcgcaaaggccatggcgttggcctcgcccaaaaagaagcccggcaccggccagcccatcatgtgccccatggataggtaaaacagcggcaccaaaaagcagatggaggcgatcaacccctttttctggcgctgggcctcccgggccggttcatcttgcgcctgcgccttgccgccgcttttttcgtcccccttggggaaggcgccgtacccggcatgctccaccgcctggcagatcgcgccctcattggtagcgtccgggtcaaaggtcacgttcatgctgttgcccagcaggttcacctgcacgtcctgcacgccttccaccttgcgcaccgccttttccacgtgcgcgctgcaggccgagcaggtcatgcccgtcacgtcaaacgctttttttgtcatcttcctctcccctttcgtagggttttgataacggcacttttaccggtctttacaccggcccgtgccgtgtccgttctcatgccacccccaccccctgggggtgtatatacagcatagcgccccgcgccgcttttgtcaagtccagtatgcccccgcgccccgcccgctatgcggggctttcgccctttttgccgctcgtcctttcgcttcaagcccagcgcccttccccgccatctgctttacttccccatcattccacgctgggctgtcgccctttttgccgctcatgccgttcttcgctcccaagcgccttcactcgccgtccgctttaccttctctgtcattcctcgcggggctttcgccctttttgccgctccatctttcgccttaagtcccgctccctcacccgccagtggccttatctgaactgtcattccgagcgggctttcgcccttttgccgctccgtctttcgcctcaagcccagcgtctccgcccgccaccggcttcacttcctctgtcattccgagccataggcgaggaatctcttgaagaccgcttggccccgtctgcaccacgccgcacaggtcaagcacccattccttttactcccgtctatccacttcctctcgcctccctctgacgagggaggtggcgcgcccagggcgcatcggagggagagacccgctgcgcctaagctccgccaacagccaacgccgcagattcttcgctccgggggacttcgtcccacctagccgcactttacttcatgcatcccttacgtctattcacgctatgggctttatttctgtaccaaacagcccttcgctctgaatgacagggctgccgccctctttccgctcaggccttgtgcaccgccatgcgcttacacccgccatttgctttaccactctgtcattcctcgcgggctttcgcccttttgccgctccgtctttcgcctcaagcccagcgtctccgcccgccaccggcttcacttcctctgtcattccgagccataggcgaggaatctcttgaagaccgcttggccccgtctgcaccacgccgcacaggtcaagcgcccattcctcttactcccgtctatccacttcctctcccctccctctgacgagggaggtggcaggcctggcctgccgggggagagatgccctggcaccacccgcccaaccaccgctcccactcttacacatttccatacctcccccgcccgccaacgtccctgtggattaccatactgtcattccgaacgcagtgaggaatctccttacaaccgcttggctttgctttcccttgccgtacaggtcaagccccaccaacagccaacgcatcagattcttcgctcggccttttggcctctctctgagtgacgggctttcgccccttttgccgctcgttacaaagtggtcatttcataacagtgcccgccagcggcgttgccgttttatcctgcgctccacttataggctttcgccccttttatccgctcgccctttcgattcaagcccaacgcctactcccgccgtccgctttaccttccatacattcctcgcgggctttcgcccttttgccgctccgtctttcgcctcaagcccagcgtccccgcccgccaccggcttcacttcctctgtcattccgagccataggcgaggaatctcttgacgaccgcttggccccgtctgcaccacgccgcacaggtcaagcgcccatctctctcttactcccgtctatccactccccccctcgcctccctctgacgaggaaggtggtaggcacagcctgccggagggagagaccctcccctaaaccctatctctcaccccatcaggaaacatatggacaattttccgcaacctacggccctcgccctctcccccggccagcaggtatcataaaggtaatccaatgcggccgtgcgcacgcccttatggtggctggcacattcccgccgcctctggcggccgctaccccgcaacacccaccaacccacgtgcgggtaacgggaactttgtccccaaaccgctcaagaacaaccacccgtcccgtctctggcgggccactacccataacacccgccaacccgcatgcggttcaaggggacgctgtccccaaaccgccaaagcacgaccacccaccccgcctctggcggccgctaccccgcaacacccaccaacacacgtgcggctaacgggaactttgtccccaaaccgctcaagaacaaccacccgtcccgtctctggcgggccactacccataacacccgccaacccgcatgcggttcaaggggacgctgtccccaaaccgctcaagaacgaccacccaccccgcctctggcgggccgcaactcataacacccaccaacccacgtgcggctcaaggggacgttgtccccatacgaaatatgaagggggaattccttatgaccaaaatcacctttatgggcgcgggcagcaccatcttcgcccgcaacgtactgggggacagcatgtgcacccccgccctgcgcgagagcgagatcgccctgtacgatatcgacggccagcgcctgcgcgagagcgagatcatcatccgcgccattaacgagaacgtgaatgccggccgcgcccgcatcaccacccatctgggggtggaaaaccgccgcgccgccctgcaaggcgcctctttcgtggtcaacgccatccaggtggggggctacgagccctgcaccgtcatcgattttgatatccccaaaaagtacggcctgcgccagaccattgccgataccctgggcatcggcggcatcatgcgggcgctgcgcaccatccccgtcatgcaggattttgccgaggatatggccgccgtctgcccggacgcctggctgctcaactacaccaaccccatggccatgctcaccggctacatgctgcgctacacccccatcaagaccgtggggctgtgccacagcgtgcaagtgtgctctgaaaagctgctccaggccctggatatggccgataagctccccggccgccgggagaagatcgccggcatcaaccatatggcctggctgctggagattttcgaccgggagggcaacgacctgtacccggagatccgccagcgcgccgcggccaaaaacgccgctgggaaacatgacgacatggtgcgctttgagtacatccgccacctgggctactactgtaccgagtccagcgagcacaacgccgagtacaatcccttctatattaaatcgaagtatcccgagctgatcgaccgctacaacatccccttagacgaatatccccgccgctgcgtcaaccaaatcgccggctgggagaaagagcgggacgagatcctggccgacgggaagatcacccacgcccgaagcaacgagtacgccagctacatcatggaggctatggtcacaaacgcgccctataagatcgggggcaacgtgctcaactgcggccatctcatcgaaaatctgcccgcggacgcctgcgtggaagtgccctgcctggtggatggcagcggggtcaccccctgccgggtgggggccctgcccccggtgctggccgccatgaacatgaccaacgtcaacgtccagctgctgaccattgaggccgcccgcacccgccgcaaggaggacatctaccgcgccgccatgctggacccgcataccgccgccgagctgtccatcgacgatattatcgccatgtgcgacgagctgattgaggctcacggcccttacatggccatgtaccgctaagaggggctgtcgcccccttaaccgcacaaactataaattaaagcctggctcccagtcccggagccgggctttttctttttctattctcccaggaccgccgcccttttaaccgctctcaacaccgcatttcctaattcgcctgtgcccgccataagggtttgtttgttgactctcgctgcaggaccgccgccctttcaaccgcataaccacaaatcaaagcctggcccccagtcccggagccaggcttttcctttctctatcctccaagggctgtcgccccattatccgctcctcggcctcgcacttttctccgtctttttgcccgccatttgctttttctctttgtcattccgggcagggcttgcgccccctttccgctcatacatcgcatattgtcctgcgcttccgcccgccagtggcttctccctttctgtcattccgagccgcaggcgaggaatctctgggtatcctcttggccctgcttccaccacattgtacaggctaagcattgctcactgccaatgcaacagattcttcgctcggcctttcggcctctctctgaatgacagggcgcgtctgcccatcctctctcccccttgcctccctctgatgagggaggcaagggggagagaacttgaaacagggctgtcgccctcttatccgcaccatctgtaaattaaagcctggcccccagtcccagagccgggctttccctttttctctcttccctgggcttgcgcccttttatccgctctcaacatcgcatttcccaattcgcctgtgcccgccataagggtttgtttgttgactctcgctgcagggctatcgtcctcttaatcgcacaaaccacaaattaaagcctggcccccagtcccgcagccgggcttttcctttttctattctcccagggctgtcgcccttttaaccgctcctattttctgtgtactcgtacggcttcgcactccaagcgctttatctctttgtctttcccagcaggctaccccccttatccacgccccttcatttttcctctctgcctacacctcgcccgcctccaataccccgataacgagaaaaagccgggctcctttcggagcccggccttctctctttaggggtcacacgccaagcgatacgtgtcatgtaatgcttatattgcctactggtcctgttcagctaccagctcttccagatcgctctggagtttagccagggtatccttccagccgttctcatccatggtcagcgccgcctgggtaaacacctggtcgaacatctgcccctcaacagaagaagcgctgggcggacaggcctcaagcggataaaccatcggcacaacattggggataacgtctttgataatcatctgctggttaggattggtgcacttttcataaaaactggtgcgcgccggcagcgggttcatatcccccttcgcgaagcactcgcccgtgttttcactgtaccacttgagcacgcgcagggtaatgtccttgtgctgcccctgctcgaagatcataaagccgttggtgcagttttgatattttttaatgccgccgtcataggtctccatcggcgggataaccgctacatccaggccctggctcatcgcgcctcgcagctcctcgcagccgccgttgataatgcccaccttttcggccaggaaaagcttgcgcgcgtcctccgactggtagccctcaatcccctcgggcaaaatgccagcatccttcatgtcgcggataaactgcatcaggctcaggtttgcctccgtatccacgttggcgttgccgtccgcgtcgtaccaggcgccgccgttcatggtgccgtagttaccgacgatgccgccgttgaccacgccaaaggcaacgccgtagatgtcgctgccccggctgcggaaggctttgcccacctcgatcatctctttccagctcccgggcatcgaaaggcccatttcatccagccaatccttgcgaatcacggtcatccgcgggtcaaaattccagggaatgcccacttgcttgcccttgtacgtccagtactccagcgccccttcggggaagtcggtgtccgttccctctttcttccactcattcacaatccagctcaggtccgccacctcgcccgacaccgcgaactggaagggcatgtacccgccgccggtggcaaaatccggcgcggcgtttgcggccaccgccgtggagaaggcctcaaaccagccgctccagggcaggttggtgtagctgaaggttacgttggggtccacctcttcggtgtagcggttcagcgtcgtctcggcgatggccgggtagctctccgccgcgccccaggccatgtcccagaatacgatctgggtgggttcagtggccattccttcgccgccttgcccttgggcgctggtcgtagccgcctccttctccgcctccggcgcgctgcagcccaccatcgtcagtgccatggctgcagccagcatcaggctgactaccaaagtccatctctttttcatgcgtacattcctccttcaatctttggattcgtccgctttgcgtgacataaccccaagacctctccccccttaagaagaaatcttgtactttttgttgttttttatatggttgtgtgtgcatgacttaaaagctgatctttagaacgctgtgcggtggcatgcacaggctgccgctgcccgcctgctccaatagatttgtctctgaaaagaaggacggcggcagtacattgtcgctggaatagagcacggcttccctgcaggcgccatacttggaaaagttcactgttttacactgccggtaagaagcgttgatcagggtaactgtcacccttccctcccggtccattgtggccacggcctcctgtgaggcaaagcacaggtggttacccgcgtggcaccgcattaaggcgaatatctgcccctgggcggacatgcgcacgccgtcgggttctacgcagagcatgccttcgttcaccgcctgaaagtggcaggcgatggcgatgccgctcttttcggcctcttcaatcaaaaggtgcatggccagcgcggcgtaaatgccgtccgtcacgctggaaggcctgtaccaggcgtaccacacgttccactcgtccagagaaatccgcatattggggctgagcatctggtgcgtctgacggatcaggcagcgcatgcgagcaatcgaggccagacaccggttgtattcctgctccacggccatcaggtccgtaaagcagggcgcgtacccatagtaatgctgcgagatcatctgcgccatgccggaaagggggcgtgccgaaagctccgcccattcccagttgggataggggccggaagagcacaggctgaggttgggcgatacctccagcattttcttgccgtgctcctgcacggttttgcagtacccgcccggggtattgtccccctccatgtgcccgtagccaaattcattccccaacgaccagagctggacgcggtagggttccacatacccgcgggccgcacgcagcccgccgtagtgcgtggtgctgtccccattgcagtattctacccatgccgcgttttcttccggcgtattccaacaggggttgatggtgataaacggctcagcgccgatttcgcggcacagggcgataaaatcatcggtgttcatttcgttaaaatcgtagcccatggtgtgcggctgggtttccagccctaaataggattggaagggcgcgcgcatatccgccggaagcaggccgtccatccagttgtattcccccgcaaaatttccgcccggccagcgcagcacgcctatgcccagcgccgccatggcatgcaccacgtcgcggcgcatgccccgaaaatgatccttgggcaaaagcgaaagcgccccaaagcaaacgctgcccgcctcctcccaggtaatgcgcaggtccgcgtccgcgtcgcctttgccgggggtcagctcgatttcataccgggtccagtcctcggcctgcgccgcaacggtatgccgggcgtatacgcgttcccccgtccggtccgtcagcgctatggaaaccgcgattaggccccgggttttaatcaccatggcaaaaaggtagggccgctccgcctgaatggagacgccgtgctgccccaacccggccgccgctccggcgcgggggttcaagatgtgcagcgcgttgcactccgccatgcgctgcatatggtagccctctccatgccgcgtgtaggggtcgtcaaaggtaaaaatcgcctgtttgccgatggggtaccacgccatcgcgcatcccatcccggccgtgggcttgcccacaaacttccggttgcgcagcatctgcgccgacaggccgctgtacaggcaggagcgggtgtgctccaaattgctgccgaacagataaggagaaaccaaaaggtcgccggcgtcaacaggttcgagcaccagcgtttccccctggcccgctgcctcatggatcgtgcgtccgtcctcgtccggcgcgcgacactcatccagattactgctgcgcgccacatggctggattcgccgctcaatatctccaccacactggtgcgcagttcggctgccagccggcttagcagggccacatccggtatgctttttccgcgttcccatttggataccgctttatcggtaatgtccagccgctcggcaagctccgcctgcgtcagccccagggcggctctccgctgtgcgataaaacggccgatttgtgtgatattcatgcgtttatcctcctgaattaaatccagtataaaagaaaaggtgctccggcacaatcgaccgttggtttaccacctgtttagggggcctgcgccctctttaccgctcatacatcgcatattgtcctgcgcttccgcccgctctctgcttcccccctctgtcattccgagtgtaagcgaggaatctctttacaccctctcggccctgcccgctccgccgccgcacaggtcaagcgtcccctctcgcctccctaattgagggaggtggcaggcgcagcctctcggagggagtttctccccagcttccgcacggatcaagcgccaccccctgccaacgcatgagattcttcgctcggccttgcggcctccctctgaatgacaggggggacgttgtcccccttaaccgctcttttctattgtggctgtcccacatctccccgccattatcttcccctccccgtcattcttcccagggcttgcgccccctttccgctctccctttcctgcgtcccccttctccatcttccaccttccgcattccctctttgtcattccgagcgtaagcgaggaatctctttacaccctcccggccctgtcagcaccacgctgcacagcccaagcgccatcctctgccaacgcatgagattcttcgctcggcctttcggcctctctctgaatgacagggcgcgtctgcccatcctctctcccccttgcctccctctgatgagggaggcaagggggagagaacttgagacagggctgtcgccctcttaaccgctctcaacaccgcattttccaattcgcctgtgcccgccataagggtttgtttgttgactctcgctgcagggctgtcgcccttttaactgctctcaacaccgcatttcccaattcgcctgtgcccgccataaggatttgtttgttgaccctcgctacagggctgtcgcccccttaaccgcacaaaccacaaattaaagcctggcccccagtcccggagccgggcttttcctttttctctcttccctgggctgccgccctttcaaccgcacaaaccacaaattaaagcctggcccccagtcccagagccgggctttcccttcctcaactttcgtcctctttaccgctccccatattcgtctagccctgtcattccgagcgtagccgagggcgtgaagcctcgcctgcccttccatcacacaaaatccattccatccgctttacccgcaccccgcccatcgtataaaataaggtatattctttaggatggtgaaaggatgaactacagcctgtacgcctgcgcgctggtccaccgctatggccgggagatccttgcctccccgggcatgcagcaaagcaggctttatctccagcatggccatgtcagtgtatacagtcactccctcgccgtggcgctggtctgcgtggccatcgccacccgcctgcatatccgggccgatcagcgcgcactggtgcgcggcgccctgctgcacgactattttctctacgattggcaccataaggatgccagccaccgctggcacggggtgcaccacgccgcccgggcgctgcaaaacgcccagcgggactttgccctgcgccctgtcgagcgggatatgatcctgcggcacatgttccctttaaatctgcatccgccccgcacgcgggagggcgtcctcctctgcctggccgataagctgtgcgccacgcgcgaggtggtctccggccgcctgccccggcgcagcccccgcacaggataagcgcggccgcttttcccctgctctccgtcctgcgcttctttatccccaaccttccctctgctcctttacccgtcccttcccccgcaactctccacaaccacaaacggcaggggccggacaaaactgcccggcccctgccgcggggaacaacggacgcctgcatagggtcagggcgcccgcttcacaaaagccgccgggatggttcgccggccgcttaaggacttccgactttcgttctgccctccacgccaaaaggggcgcgccttacgcggcttggccccttctggccacgagggcggtatggggaacggttccgcttataatctctcctgccgctatttgtcgttggcggcgatcagctcctccaggtccttttgtaccttgcccagggtctccttcatgcccgcctcgtcctgggtcagggcgctttgcagcagcgtcatcgccagcttttgcccctcgatagaggaggtggagggccgcgcgctggtcaacgggtagcacagcggcgccagctcaggcagcacgtccttgatcatgatctgctggtactcgctggtgcactgctcgtaaaagctggtgcgcgccggcaacgggttcatatcgcccttggcaaatacctcgccggtgttttcgctgtaccatttcagtgccttcatcgccacatccttgtgcttgctctgttcaaacaccataaagccgttgatgcagttttgccctttcataatgccgccgtcataggtcttcagcggcgggattaccgccacgtccagcccggccgccaggggctcacgcagctgggcggtgccgcccatcaggatgccggccttgcccgcgataaacagctttttgccgtcctcgccctggtagccttctatgccgtcgttcagcacgccggcctttttcatatcgctaaagaacttcatggtgctcagcgtgctgggcttattcacattgccgctaccatcctcgttgtagtacagcccgccgttcatggtgccaaagtggttgaagcacgcgctgtcgttcactacgccaaaggtgacgccgtaaatatcgtccccccgctggtcaaacaccttggccacatcgatcagctctttccagctggtgggcatggcaagcccggcctcgtccagccagtccttgcggatcaccgagagccgcgggtcaaagttccaggggatgcccacctgtttgtccttatagcgccagtagtccagcgccccttcggggaaatcggtatccgtgccctctttcttccactcgtctacgatccattgcaggtctgccgcttcgcccgtcaccgcgaactggaagggcatgaacccgccgccggtggaaaagtccggggccgagttggaggccaccgccgtggagaaggtctcaaaccagttgctccagggcaggttggtgtagttaaaggtcacgttggggtccacctcttgggtgtaacgcttgatggtggcctccgccagcggcggataggtctccgcgccgccccaggccatgtcccaaaaaaccagttccaccggctcggtagccatgccggccccgctccccgcgctgcccgaggtctcaccgccgctccccgcaccaccggcgtccggcgcgcccccacagcccgctatgctcagccccatggctgccgcaagccccaagctcaagagcatcgtccatcctcgtttcatagtatccctccttcttctcgccgtgccgggccgcggcccggcacgcgcctatcgtgcggattttttcgccacatccgttgttagttcatatttatttcacaatccttcatcttaatttcatattatacgctacttttacctccgtcaagcccctcgcagactttctttccattattttctaaggcggcaattgcagcccgccctgcgcatccaggcctgctttgcggccccgcctctctccctgcattccctttgcaatacgcctgtcagttgtctttccaccctgtaccgcaggatgcacttttctgtgtcctcctattgggtcagcgtttccctctccgccatcccccaatacccttaaccgtttatgtccgcccgcttccatccgccgccggacgtcctccccgccagtggccaacccgcttttgcccatccccgcctgcccgggcgcagccgcccttagccgctcccagggctaccgccctccttttccgttccttacagagtagttgttttagggcaacgcccgccagcgacgttgccgttttatcccgcgctcctcttgggagctgtcgcccctttaaccgctcatgctgttttatggttccttccgctccttcgcccgccattagctttacctctccgtcattcctcacagggctttcggccctttaaccgctcatgccattttgcggttccttccgcttcttcacccgccattagctttacctctctgtcattcctcacgggggctgtcgccgcttaaccgctctcacgccttcaacttttctggaacagcggcaggccggtggccacagtgccatccgtcacctcatgatccgccaatatctcttcctggctgaggaacatgtaccccataaagcccggctctcctggcaaaccgctctcatccgcccaggtcacatctacgtgaaagctgccttccggcagcatcaccaggttccaaacgtgggcttcgcccccagcctctccggtcacctcccggcaccacaaatctgccttttggcaaaggtaacggtacgcctccgcgtagccctggcaaatgctcctcccgcccagcagcgcgccatacggtgtagccgcgccggggttgctcatctcatcatcatactccgtgcgctccgccagctcctgggccaggtacaaatactgttgacagaccgcagcgtccggatccatgcccgcgacgatctcatcgcagcaggtctcaaattcgcttatccccttgcgtaccaacgccttgtcctgtgcgccatccaagcgccaggtacaatagtaatgcgcatccaggctgaccacctcgcccttcgcattgttgacctcctgcaacataaaataattatttgtctgcggatgcgtgcgctgtatctctccccaagccattaaggcatcatccagtactgggtatcccacccgagcagccacatagctaaaatcctctaaagccaataccttgggtagcatttcctcataaagcgcatattgtcgttcggtcaatccttccggctcgggctgctcgtaaccccaacgtagttgctgtgtatcatcttccattaaataagtaaagcatcccagcatatggtcgggccagctgcccagcaattccggatcgtatctaaaccactggatatccccattatttagcaccacaccaacatcgcggtatggcccgttgccctcgcgcagccgaatgggttctgcctgcgtcgggtcagcgccctcgaccgacaaagaggcgatgcgcacgccgtccgtcgcatcgtaaaccgcataacctccgccctcgtccagcgacgcgaagcataccttcacgcccatccccaggtcataatccgtcgagtaggcccgccaggtccgccaatccgcgcctatcagctcctctggtttctctatttccgcccgcacgttgggcatagccgctacaccgtccaccaacagcaaagcgcaaaccaccatggcaatacatcccagcaccagtaccgcgcccactccggtcatcacgtgccaagccttgcggcgggtccgtaccgccagcacaatacccaccgccaccattgctgcacccactacaaaaccgattaataaaaacaaagcgttacccaaaatctccaaattcactgtcccttccccctttttcgtagcctatcatctactcatcatcgctattccattataaaatagcgttcttctcagtccatcacctctccagggggattttgtcgccccgcgcaaaaattgatttctcccgctacaaccgctgtcattcctcccagggtttccgcctcctcttccgttcatatattgcgcattgtcatgcacccacgcccgtcaccggcttcgccttctccgtcattccgagccataggcgaggaatctcttgacactctcttggccttgactgcatcacctccacccccttcttccactctcaccttcgttctaccccatgctttcctgcccgccattagctttacctctctgtcattccgagccataggcgaggaatctcttgtccctgcctgcaccacttccaccctggtcaagctccgcctcccgcctggcgtcatcgctcctcgccccgtctgatggggaacgcacccccgccgcaataaggaagaaccgggcctttttcggggcccggttcttcctctttaggggtttacacgtcaagcgaaacggatttttctcatccttatttcattactggtccaggtcgtttaccaggccctccagctgggtctgcagcttggccacggtatccttccagccgttctcgtccatggtcagcgcgctctgggtcagctccatcgcaaagcgctgtccctcgacggaggaggcgctgggcgggcaggcggtcagcgggtagcacagcggcaccgcgttggggatgacctctttgatgatcatctgctggtactgctggtcgcactgctcaaagaagcttgtgcgcgccggcagcgggttcatctcgcccttctggaagcactcgccggtgttctcgctgtaccatttgagcaccttcatggcgatgtctttgtgctggctctgctcaaacaccataaagccgttgatgcagttctggtacttcataatgccgccctcgtaagtctcaagcggcgggacgatggctacatcaaagcccgcggccagggattcgcgcagttccgagcaaccgccgatcaggataccggccttctcggccaggaacagcttcttggcatcctcgccctggtagccttcaatgccctcgggcagcacaccggcttttttcatgtcgttgatccacttcatcacgccgtaggtttcctgcttatccaggtcggcgttgccgtccttatcgtagtagatgccgccgttcatggtgccgtagatggtcgccacctttccgtcagccgctacgccgaaggaaacgccgtacacgtcgtcgccccgctggcggaacaccttggccacgtcgataaactcctcaaagttggtgggcatcgacaggccctcttcctgcagccaatcgttgcggatcacggtcatccgggggtcaaagttccagggaatgcccacctgtttgtctttgtacacccagtaatccagcgtcccttcggggaagtcggtgtccgtgccctctttcttccactcgtctacgatccagcttagatctgccgcctcgccgttgaccgcgaactggaagggcataaagccgccgccagtggcaaagtcgggcgccgagttggaggctaccgccgtggagaaggtctcaaaccagttgctccagggcaggttggtgtagttaaaggtcacgttggggtccacttcggtggtgtagcggttcagcgtctcctcagccaggggaggataggcttccgccccgccccacgccatatcccagaagacgatctccgtgggttccgtggccatgccggtaccgccgccgctggcgccagatgaggcctccccgccggtggacgcgctgctgtccggcgcgccgccgcagcccaccagcgtcagccccatggctaccaccaggatcaggctcagtgcaagagtccatctctttttcatgtgtccactcctccttcaatctttgggtcgtccgctttgcgtggtatacccttagatctctccccccttaagaagaaatctaattgacaagtaagtagggacacctctccctgggtcatcgtcttttttctgcttatggaattattagctgtcgtgtcctgcttttttgtggcccgagcgggccgcttcagatgcctttacggcagagtcctggttcgatccgtctttttaaaatgtgctatttatgatatcttatgccagatttgtttactttgttcatattgtattcacattatgccggttatccgcgcaaaaatcaacccctttttgcttaaaattgattcctatttttttacttaaaagtttgcttttttccatcggtcttttggcatagctaacaaatcgcgccgctttggctttgtctgccagtcgatcctgctctacctttttccgttctctacttttcgtgcattgccatgcacccacgtccgccaccggcttcacctccctgtcattccgagcgcagcgaggaatctctcgtcaccctcttggccccgcccgcaccgcgccgcacaggccaagttccgctttcctgcctatgcacgagattcttcgctcggcccttcggcctccctctgaatgacagggcttgcgccctcttttccgctctttcccctgcgtattgctctgcgctagttcccgccaataacctagccagattctctcacttacctttccagggcttacgcccctttttcgctttttcccctgcgtattgctctgcgctagttcccgccaataacctagccagattctctcacttaccttcccagggcttgcgcccctttttcgctcttttccctgcgtattgctctgcgctagttcccgccaataacctagccagattctctcacttacctttccagggcttacgcccctttttcgctttttcccctgcgtattgctctgcgctagttcccgccaataacctagccagattctctcacttacctttccagggcttacgcccctttttcgctttttcccctgcgtattgctctgcgctagttcccgccaataacctagccagattctctcacttaccttcccagggcttgcgcccctttttcgctctttcccctgcgtattgctctgcgctagttcccgccaataacctagccagattctctcacttacctttccagggcttacgcccctttttcgctttttcccctgcgtattgctctgcgctagttcccgccaataacctagccagattctctcacttacctttctagggcttgcgccctcttttctactccctgtttttctatgctctcatacgctttcgctcgccatgtactccctttctgtcattccgagcgcagcgaggaatctcttgacaaccacttggccccgccctgtctgcacgaccggcctcacggcaaagcgtcctcacctccccatccaggccatcctctttccacctgcctcccctccttgagggaggtggcaggcgcagcctgacggagggagtaatcccccctctccgcccccgctgtttcctccgctttcctacccgccaagtgctttccccctttatcattcctcgcggcctatcgccccctgatcgctcatacgttgtgcgtccccgcatgctttcgcccgccatttgccttatctctctgtcattccgagcgcagcgaggaatctccttacaacctctctcgccccgtctgcacgaccggcctcacggcaaagcgtcctcacctccccatccaggccatcctctttccacctgcctcccctccttgagggaggtggcaggcgcagcctgacggagggagtaatcccccctctccgcccccgctgtttcctccgctttcctacccgccaagtgctttccccctttatcattcctcgcggcctatcgccccctgatcgctcatacgttgtgcgtccccgcatgctttcgcccgccatttgccttatctctctgtcattccgagcgcagcgaggaatctccttacaacctctctcgccccgtctgcacgaccggcctcacggcaaagcgtcctcacctccccatccaggcccgcctctctccacctgcctccttctttgagggaggcaggcgcagcctgacggagggagtaatcccccctccccatccatcgcccccacttctcatcccttccaccccgtatcccttttgccccgcagcccgggcacgcaaaaagggccggtctcccggccccttctgcttttcaggggaacgaacattaagcgaacgcgattagtctatttttcttataacaagccgcctttactgatcgttggccgcgatcagatcctccagatccttttgcagcttggcgatggtctgcttttgcgcagcttcatcctgcgtcagcgcgctctggacgatctgcatcgagaagcgctgtccctcaacagaggaggcgctgggcggagaggcgggcagcgggtagcacatgggcactacgttgggcagcacgtccttgattaccatctgctggaactcgctctcgcacttgtcaaagaagctggaacgggtgggcagcgggttcatatcgcccttggcaaagcactcgctggtgttctcgctgtaccacttgagcaccttcatcgccacgtctttatgcttgctctgctcgaacaccataaagccgttgatgcagttctgtcccttcatgatgccgccgtcataggtcttcagcggcgggaccaccgccacatccagcccagccgccaggggctcgcgcagctcggccgtgccgccgatgatgatgccggccttctcggccataaacagcttcttggcgtcctcgccctggtagccctcaataccctcggggatcacgccctcgtccttcatgtcgcggatccacttcatcaggctgtaagtctccggcttatccaggttggccttgccatccttgtcatagtacagtccgccgttggccgtgccgtaaatgttggcgatcttgccgtcggccgctacgccaaaggagatgccgtacacatcgctgccccgtttgcggaacaccttggccacgtcgatcatctcttcccagctggtgggcatcgcaagcccggcctcgtccagccaatcctggcggatgacggtgatgcgcgggtcaaagttccaagggatgccgatctgcttgcccttataggtccaatattccagggccccctcagggaagtcggtatccgtgccctctttcttccactcgtctacgatccattgcaggtccgccgcttcgcccgtcaccgcgaactggaagggcatgaacccgccgccggtggaaaagtccggggccgagttggaggccaccgccgtggagaaggtctcaaaccagttgctccagggcaggttggtgtagttaaaggtcacgttggggtccacctcttcggtgtaacgcttgatggtttcctcagcgatggcgggatacttctccgccgcgccccatgccatgtcccaaaagacgatctccaccggctcggcggccatgcctgtgccgccgctggcgctggaagacgcgtccccgcccgtggtcgcggcgccgccggcgtccggcgcacccccgcagcctaccatgcttaggcccatggccgccaccaaaagcaggctcattatcagggtcagtccttttttcattgctgtgtgtccctccttcaattttgggtcgttcgcttcaagcccttacccttagacctctcccccctcctgcccttttgcgaagaggtcttgcttgcctttttgccggcctgcccgtaaaatgggtacagaaaatacgcccctgcgcttacctgtaagcacaaagcccaccccagccgctatgttgtttaccgcctgttgtagaaagatgggcgcccctgccgcccgggcccctctggaatagatcagcttggaatatttgcctagaattacgtcgaattacggttttatttcacgttttagtcataatttattcatattcttcactttatattcacattatgcctgctgcgcttctaaaaagcaacccctaaggtaaaaatagttttacaaattttgtcgttttactttttaatctgtcccggccccctcccgcgcaatttcctccgcttttccaaccatcatttgccttacccccgcgttattcctcctggggccatggcccaccttggccgctcctgcccttgcgcattgctttgcgctttttcgcccgccaaatgctttccctctttgtcattccgagcagggctatcgtccccttaaccgctccccgcccttacaattttctccgtccctttcgcccgccatttactttccctctctatcattccaagcgcaagcgaggaatctcctgacaaccgcttgcccctgcacgtgccacttcctttaagttaaagcgccctcaccgccccacccttacaatattctccgtccctttcgcccgccatttactttccctccctgtcattccgagcgcaagcgaggaatctcctgacaaccgtttggccctgcacgcgcctcttcctttaagttaaagtaccctcatctccctgtccttacagttttcaccgcctctctcgccctatctccttaccgccttctctaccctgtctgcacgaccggcctcacggcaaagtgccctcaccgccccacccaagccatcctccgttcccctgcctgccggagggagcgtcccccttccctcccctcgtttttccttgtccgccgccggggcgcggcatcccctctctcccccaacacaaaaaggcccccgcctctatataggcgggggcctcgatcttcagcttgtcctctagcgctggccgcgtcttttcagcagcgcctcgatcttctggtgcgggtcgataatggtggagaccgagatatcgtgattcagcgccgcgataaagtaggcgatgtacttggatacatccacctcaaagaaccactccttcttgcgcagctcctcgggcacataggtcaagttgctgcccagcacgcccgagatcacgccctcctcgtaggccttgtcaaaggcggcgaacccgccggtgaagatgccgtaggtggcgtaggcgaagatgcggcccaccttctgcttttgcaggctgtaggcaatgtccagcatgctctcgcccgaggagatgatgtcgtcagcgatgaacacgtccttgccctccacggagctacccaggtactcgtgggccacgatggggttgcgcccgttgaccacgcgggagtaatcccggcgcttgtagaacatacccaggtccacccccagcacggaggcgtagtacatgttgcggttcatggccccctcgtcggggctgacgatcataaagtgctcccggtcgatgttgatgtccggcacgtgcttaaacagggtctttagcacctggtagctgggcatcacgttgtcaaagcccatcagcggcacggcgttttgcacccgggcgtcgtgcgcgtcaaaggtgaccacgttgctcacccccatgtgctggagctcctgcagcatcaccgcgcagtccaggctctcccggtagctgcgccggtgctggcgcccgccgtacagcagcggcatgatcacgctgatgcgcttggccttgccgctggccgcctggatcaggcgctttaagtcctggaaatggtcgtcgggagacatggagttctgctggccgaacatgttgtatttgcaggagtagttgccaacgtcgatgatgaagtacaggtcatccccccggacggtggatttgatgatgcccttgccgtctcccgaggagaagcgggggcactcgctctctacgataaaggtctcatggtcgcgtccggcctccttggcccagttgagcaggtggttgttgatcttatcccccagctcccttgcgccctctaaggggataatacccagcggtcctacgcagtccgcctcgtcgaaaaacaattgcacttccacattctccgtctgcctctggttgtccatttccaaactccttttattctatttgccggcccgcatggccggtacatttcctgtcggcgtaattataatagcacattcccaaaggattctccaccgcgcgtggcgttttttgtaaacttttttagattttttcacctccgcgcccctttaccggcggattaccccgccgccaaacgtggtacaatagggatagaccgcatggcggcgcgccgatggggcaaagttcgctcctgtcattccgagcggggctatcgcccccctaaccgctcatacgttgtacgttcccgcatgctttcgctcgccaattgctttccttctctgtcatcccgagcgaaagcgaggaatctcacggctaccgccaaagccctgcacgcagtgcacagcggcggcatactactcgcatgtgcccgtctgcaccgcgctgtttagctacagcgtcctgccgcaccgcgcaactcgggtaacgcccccttctcgcctccctctttgagggaggtggcaggcgcagcctgccggaaggagtttccccctcgccgcgcataggccgcctggcccgcagccaatgcgagaggttcttcgctcagcctcacgccttcgctctgaatgacggttcaccttgtggcttcaggattatttcataagaacggtgtttctgtcattccaagcgtaagcgaggaatctcacggctaccgccaatccccggcccgctgtgcgctgtttaggcctacatactgcccacgaccggtaaaccccggcccacagccaacgcacgagattcttcgctcagcctcacggcttcgctctgaatgacgattcaccctgtggcttcaggattatttcataagaacggtgtttctgtcattccgagcgtaagcgaggaatctcacggctaccgccaaagccctgcacgcagtgcacagcggcggcatactacccgcgtgtgcccgtctgcaccgcgctgtttagctacagcgtcctgccgcaccgcgcaactcgggtaacgcacccccttctcgcctccctctttgagggaggtggcaggcgcagcctgccggagggagttccccttcccgcgcccggccccttaacaaacgtccaaaatccaccaaacgaaaggatggtattttcattatgctagacccacggatcggccttctggcccacaacctcatcacctattcggtggaccttcagcccggcgagcgggtgcttatcgaggccatcggcatcgataacgcccttacctgcgccctggtgcaggaggcctacaaggccggcgggctgccctttgtgcagctgcaaaacaacaccgtgctgcgcgcgctgcaaatgggctgtactgacgagcagctttccctcatggcccgcctggagggcgagcgcatggccaacatgcaggcctacatcggcgtgcgcggcggggataatatgagcgagctttccgacgtgcccccttcccagcaggagcgctaccagcgcctttactgggagccggtgcacgggcgcatccgcgtgccccgcaccaaatgggtggtgctgcgttaccccaaccccgccatggcccagctggcgggcaccagtaccgagcagtttgaggattactatttcgccgtttgcaacctcaactacgccaaaatgtccgccgccatggacgcgctggtgtccctgatggagcgcaccgaccgggtgcgcctgaccggcagggataccgacctgcgcttttccatcaaaggcatccccgccatcaagtgcgatgggaggatgaacatccccgacggcgaggtctttaccgccccggtgaaagattcggtggagggccatatcgcctttaacaccccctcgctggaggcgggcttcaccttccaggatattcggctggagttccaaaagggcaagatcgtgcacgccaccgccaacaacgaaaagcgcatcaacagccttttggataccgacgcgggtgcccggtacgtgggcgagttcgccatcggcgtcaacccctacatcacccgccccatgcgcgataccctgtttgacgagaagatcgccggctccttccactttacccccggcgcctgctacgatgaggcgcccaacggcaacgcctccgccctgcattgggacctggtgttcatccagaccccggagtacggcggcggcgagatgtattttgacgatgtgctggtgcgcaaggacggcattttcgtcctgcctgagcttaagcccctcaaccccgaaaacctcaaataactccgccgcaaggatgaacaaaagcgccctgcaatgcgcagggcgcttttgctatgcccgctctttcctctaaaaggctacccaacggggcgacagcagaagccctgcccataccgcgccgcaaggatagagcacctttccacgcaaaacgccccggcaaccggaggcgttctcgcatcttaaagggtttatatgatgttttcgatcagcggcgccgtgcgcaccggcatgtgctcgatcatggccgccagtgccgccagttccgcacccagctcgtctaaggactggtcgctcttggccatggccgcggcccgggcaaagctccctgtaatcacgtccagctctccgtggtcgcaggtcagctcccagccgtggcgtatctcctgccagcgggcctgagcctcgtcaatcctggccttggcggatgcgtgatctcccgcatcgatggcgctgatcgccccgtccaccaggcccagcatctcgtccgcgtcgcttttgatgcccaggtaggaaaacaggctcagccccaaaaacagcaccagcgccaccgcgatgcagatctccttggtcttcataccgcacccctccttttgcgcttgcccttttcccgaacctgaaactgcagctgcccgctggtgttatccagcagcaggtacagcacgtcctccggcccatgcaggccctgggcgcgcaccttctcggtcagccagttttcgtccttgcccgccttgtgcaggttcatccggttgacctttccatccagaatcagcgtgtagggcagggacgcgggctggacggtgacgttcaggtcgctgggcgtggccggccgcttgtcggccgattgcagcacgctgagcatgccgctgggctccagcaccgccgcgtccacctcgctgatgtcggtcacgccgttttggcgcagctgctcgagcaggtcgttcagcgtgcaggtctggcggcgcagctcccgctcgtcgatcttgccgtgatagatcaatatggcgggccgcccgcagatcagcgcgcgggccttctcgctttttaataggataaaactgatgacctggtggatcaccagcagcgccagtatgggcgcgatcccgtagatcagggggatgtccacatcgctcatgggcgtggcggccaggtcggccagcagcagggccagcaccagctcaaagggctgcaactgccccagctggcgcttgcccatcacgcggatgaccacgatcagcgccacatacaggatcagggcgcggataaacacggtaagcatggcttttccttccttccataagacattcctttttattcttgaccgccgcccaccaaaacatacccgcccgcgtgccgaaacaatgttttataagtttattgacgaacgcgcaccgccatgctatgctgtgcctgtggccctgtttaggcacatatcagggggatagaatccgtaaaggctttagcccccctgtcattcagagcggaggccgcaaggccgagcgaagaatctcacgcgtaagctgttagccaaggtagcaccgcccgcacaccgacgcccggcacacccttctcgcctccctctgccgagggaggtggcgcgtcccgggcgcgccggagggagagacgcaatcccctccatcccctgtcattcagcgcgaggccgcaggccgcgcaaagaatctcacgcgtaagcaggtattagcgcttgagcgagaatgtagtggctcaggcaaaaccgagagggagtaaagagattcctcgctgcactcggaatgacggggataaagtacgcgcggagtatggaaaaagggcgcaaccctgaatgagaaattgcggacagcacaaatcctgctggcgggcgcgacaggcagggcaatgccaaaaggtatagagcggaaataagggctttagcccccctgtcattcagagtgagggcaccagcccgagcgaagaatctctggcattggcaggaagtgacacttgaccgagaatgtagtggctcaggcaaagccgagagggagtaaagagattcctcgctgcgctcggaatgacggggataaagtacgcgcggagtatggaaaacgggcgcaaccctgaatgagaaattgcggacagcacaaatcctgctggcgggcgcgacaggcagggcaatgccaaaaggtatagagcggaaataagggctttagcccccctgtcattcagagtgagggcaccagcccgagcgaagaatctctggcattggcaggaagtgacacttgaccgagaatgtagtggctcaggcaaagccgagagggagtaagagattcctcgctgcgctcggaatgacggggataaagtacgcgcggagtatggaaaacgggcgcaaccctgaatgagaaattgcggacagcacaaatcctgctggcgggcgcgacaggcagggcaatgccaaaaggtatagagcggaaataagggctttagcgataaataagaagtcacggacagcacagaacctgctgacgggcgcgacaggcagggcaatgccaaaaggtatagagcggaaataagggctttagcccccctgtcattcagcacgaggccgcaaggccgagcgaagaatctctcgcattggctgttggccgggccctaccgttcccgcccacgcgaacaatctcctgcgccagcagtcggccaaggcagcaccacccgcgccccgccgcccggcacacccttctcgcctccctctgatgagggaggtggcgggcgcagcctgccgaagggagagacgcaatcccctccacccgtcattcagcacgaggccgcaggccgcacgaagaatctctcgcattggctgttggccgggccttaccgttcccgccagcgcgagaaatctcacggcctcctctctccccggcccgcacccgccccgcaagggtaacgtacacacaccctgcctccctctgacgagggaggtggcgctcgcggcctgccggagggagagattccctcaaccgcccacacccaccccaatggcaacccaaagcgccttccagcgcttttcacccatacaatacccatcaggcttaaattttaaaagggggaaaattttatgcaaaaagatatgctagccgcctataccgtggataaccgccagatggagctgcgccgcatcccggtgccccagcccggcccgggcgagctgctcatccgcatccgccacgtgggggtttgcggcagcgacctgcacgccttcatggccgagggcgcgcgctacaaggccttgccccagggcgggttcatcctgggccacgagggcgcgggcgaggtggtcgccttgggcgaaggggtgcagggctttgccgtcggggacaaggtagccctggagccgggcagcacctgcggcaagtgcgaattttgcaaacgcggcctttataacctctgccctgacgtgcagtttctctccgtctgcggccagcgcgacggggtgctgcgcgagtacgcctgccacccggcggacctgtgctttaagctgcccgagcatatggataccctccagggcgcgctgatcgagccggtggccgtgggcatgcacgccgcctccctgtccggggcgggcctggggatggacgcggtgatcttcggcgccggctgcatcgggcttatgaccctgctggccttaaaggcccggggcgtggggcgcatcgccgtgtgcgacgtggccgatatccgcctgcaaaaggccaaagagctgggcgcggcgctgaccatcaactccgcccgggaggacgcggtggccgccatcctggactttaccgccggccggggcgcggacgtggtgtttgacgcctcgggcaaccccgccgccatcgggctgacccaaagggcggccaagagcgcgggcaccatcgtgctggtgggcaacccctccggcgccatgcccgacagcttcgacctgcaggatttcgtcaaccgcgagctcaccctccgcggcgtgttccgctaccgcaatatctatcccaccgccatcgcggcggtcgcggcgggcatccttccggtgcaaaaggtggccgatcggatttatccctttgcccagacccagcaggcctttgacgagagcatcgacaacaaggccgccatcgtcaaggccgtcatcgccctgtaagctcttttgcccgcgcggcgcgttccgttacatgatgaggaggaagaatatggaactgggatttttcagccccgaaatttccggccagaacgtcgaagaagtgtttgccaaagcccgcgccctgggctttacccaggtgcagtacgattttgagacctcccatggcgaggagatgcccgccggctttggccccggcgagcttgagcgggtggcccaggccgcccgcgataacggcgtctccatcgcggccgtcaacggcacctttaatatggtggatagcgacccgatacgcctggaggcctatatccgccgctttaccgccatcgcacaggcctgcgcctatttcggctgcaagatcgtcaccctttgcaccggctccaaaagcccggagggcatgtggcgctattcgcccgccaccgctgaggagccggtattccagcagctgctggaaaccacccggcgcatcctgcccgtggccgaaagctacggcctcaccctgggcgtggagaccgaggccagcaacgtggtgtttaccgcccggcgcacccgccggtatttggatgagatcgccagcccccatctcaaggtgattatggattgcgccaacctcttccccgccggcaccgcccgccgggagaacgtggccgccaccatcagcgaggccttctccctgctgggcggggacgtcgtgctggcccacggcaaggacgtggccgagggggacgcggtgcgcttttcctcgcccggcatgggtattgtggattacgacctgtactttgacctgctcaagaagatcggctactccggcccgctcatcctgcacggcgtgcacgacccggcggatttcgccccgtcgatcgccatcatgcgggaaaagctgctggccgccggcctgtaagtaaaggaggtcagcccatgtatacggtatttgacccgggccactgcggcgtttccgccagcgtgtacgagatcgcgcccctggctcaaaagtacggcatcggcggggtagccgtgccccagaacctgctggaggaccccaaggccggcgtggcggcggcggactttatctttgaccatggtctgcgctggagcctgctgcccaccccggccgacttttttaccgagagcgtgaccgacgcggcgtttgattccgctctggagcgcttcaagcgctgggcggacgcgggcgagaagatgggcgtgcgctactgctataaccatgtgtggaacggcagcaacgcccgcaagtccgaggcccagttcgagtgggtgctgcgccgcctgcgccgcatttggaaggtggccgacgaccatggcctgcgctatggcatggagtttttagggccctgcccgctgcagcgcagcttccgctacccgttctttaacagcctctcgggcattttggccctggcggacgcggtcagcccccgctgcggctttctgttcgatacctaccactggtacaccggcagcgatcagcgcgtggacgaggcctatctggccgccgcccaggtggagcgcatggtcaacttccacctaaacgacggggtgcccggccgcacccgcacccagcaggaggatctggagcgccagctgccgctcacctccggcatcatcgacgcggccctgccctaccgcctctttgagcgggcgggctacaccggccccgtattgtgcgagccgctgcgcccctggcagcaaaacgccgagggccgctcgctggagcagactatggcccaggtagccgccgcctacgagcgggtgcgccaagccgcccaaacgccccccgcccaggccgcgcgctaaggccaaacatccaaaggacgccctgccagggcgtccttttttatttttccccctcgggcagcgcctcaaattcctcccgggtgatgcgccaggcgtcgtggggcatttcggtattgtaataatgcttgataaagcgccgcaccggcctcatgccgttgcgccgggccaccgcctgtgaggccaggttgctatcccggatgatggaataaaccgcccccgcccccagcgtctcaaaggcgtacgcccgcaaagccctggccgcctcggtggcatagcccttgtgccagtgccgccggcagaaaaggtagccgatctccagcaccctgtccgcctccacgctctgccaggtcagccccgcctggcccagaaacgcgccgcttttccggtccagcaccgccagcagccccagtccgtcctcctcccggtagcgccgcagctggttgcggtaccaggcctgcacctcctcctcggtgaaggcgtgctcataggcggtcatcgccaccggatcctgtaagatctcccgcagccccggcagatccccctcctccagcggacgcatgcgcgtgcgcgcggtaatcagttccattgatgatcctctcctttgccgtttttttgccgtactctccctggcatccgccgccccgcgggcgcataaacatagcattgggggcctctccccctgggccgacgtcccccatctcttctaggaaaggaaggatcatccatgccgcgaacctatcccttcgccccgcaaatgctgccctatccctgctatgggctaacccccggcctgcaagccgatggcgtatatctgcaccacagcgtcctctacagcggggatatagccgccctcaacgccctgctggcccaatatccggacgcgcagggcctgacgctgtccgcccttttgaccgatccgctgccctccgtgcgcacggtagaccgcgcccgcatccgccacctggcgggcagcctttttagccacgagctctactttgccggcctctgtccccagggcgccgcctcgccccagggggcgctgcgcgcggccattctcgcccggtacggaagcctggaggcctttaaatccctggtgcgccaggccgctggggatattctgggcgtgggctttgtctggctcaataccgatgccgccggcaacatccacctggcaatcaccaacgattaccgcaccccgcagctgaatctctttacccccgtgctggtgctggacgcctgggagcacgcctacttctccccctattatacagggctggatgcctatgtggaaagctggttttccctgctcaactggcgcgaggccgagcggcgctataacgccgccaccgcgctcgggcgcccccccggcggctcttaacaattttttcataatatttataagtaattttaacagaaatgatgtatcccgttcatcatctttgggtattctaacattgcgacagagaagcaaagagatacgaatgagcgacagacaactttttacaacctacatacccctctctcaagttcaaaggcccccgtcccccgggggcctttggcatggggctaaaagccctttttaccgctctatacttcttgccatcaccaaactcatcgcacccgccagtagctcttgcgctgtcctcgccttctctttttgggctatcgccccttttaccgctctgtactttttaccattcctcatcttttcacgcccgccagcgtctttgttcgctttcccggctccgctcccgggctaaagccctttgttccgctccgtactttttatcccattccccagccttccacgcccccacgtgcttgtcctccttgtcattccgagcgcagcgaggaatctcttggcaaccgctcggcttaacttatgcgactttgctctcggtcaagctccgctccctgccaatgcataagattcttcgctcggcccttgggcctctctctgaatgacaaagggactatagcccgttttaccgctctatacttcttgccctcacccaactcatcgcgcccgccagcgtctttgttcgctttcccggctccgctcccgggctaaagccctttttccgctctataccttttatcccattcccccgccttccacacccgccatgtgcctgacctccccgtcattccgagcgcagcgagggcgcggaatgagctccggtggaaatctatagtgcccgcgcccagtgggcgaaaaagggcacgatgatttctgtgagcgtaaggtaagggcgaacgccgtaaggcgtgaaggccgaaccctcagcgaacagaggcgaccccaaagatggactttgcagcgaatgtagcgcccggtgagcgtaaggtaagggcgaacgccgcaaggcgtgaaggccgaaccctcagcgaacagaggcgaccccaaagatggactttgcagcgaatgtagcgcccggtgagcgtaaggtaagggcgaacgccgcaaggcgtgaaggccgaaccctcagcgaacagaggcgaccccaaagatggactttgcagcgaatgtagcgcccggtgagcgtaaggtgaggacgaacgccgcaaggcgtgaaggccgaaccctcagcgaacagaggcgaccccaaagatggactttgcagcgaatgtagcgcccggtgagcgtaaagtaagggcgagcgccgtaaggcgtgaaggccgaacccccagcgaaccgagagttgcctggctttgccgttgttagaacgagtaccaaggccgcgccgccaccgtcccctttccaaacaaaaaaggggccggatcgctccggctcctttacctcacctttggttatttctcttttttccgcccattcaccgtttcgcgcaggtgtttgagcgatgcgtcgatcttctcatacctcgcatccggcagactgccttcgcgcaaatctccatcggccatgcgcttgaccaggtccctgcgctggccctcgctcagcgtccggtaaaatttcagcatcagcgcctcctcggccgtcagctcttctcgttccagcttcggctctacgccgttcccgtttttctccatggcccttccctcccttggcggtatcctgcttgcccttattatacctccgcgccgccggttatggaaagactattgtaatattttggtattacattttctggaaatctactgctgctccagcgcctggcggccctggtcggtcaccggcatcagccaggcccggcttctaaagcgccgcagacacagcagcaccttgggcaggtcctcggccagcagcatcaccaggtatacggtggtaagctcccacttgaacaccagcgcgcccaagcagcttaaaggcagggccagcagccatacgcacagaatatcgtacttgagccccgtgcgggtatctccccccgcgcggaatacccccacgatcaaaatataggggatgttgcgcagccacagctccagcccatagcacagcataatggtatgggccgcggcgttcaccgtggcgctgacgttaaaggccagcatgatcacgtcccgcagggcgatcaccccgccgcccaccagcagcgaaaaggcgatggccacaaaggtaaaccgccgcccgtcgtccacggcctcgcgcatcagcccgctgcccacctttttgcccaccagtaccgcgcaggcatggcacagccccacgaagaatacaaagccgatgttctcgatggagcggaagatggtcagcgccgcgtaaaactgggtatccacgttgccgtacaggatgttgtaccccaccgtacccaccgcccagagcgattcgttcagcagcaccggcagggagatccgcaaaaactggccgataaactcccccgtccagtggaacagccgcttggccggggcgatcatgatattccgggtcttgagcgctacggcaaacagcaccagcgggctgatccaggccgagatggccgtggccagcgccgcgccgcgcacccccattcccagcccgaagatgaagaccgcgttgagcaccgcgttggccgccaccgagatggcggtgacgtacatgggcagcttcacctgctcggtggagcgcaaaagcgtggtaaaggtctggttcagggcgatggccgggaagctcagcgccgccagctgcaggtaggccaccccttcggccgccaccggcccttcctgcgtaaacaggcccagcacccagcccggcgcgcacagccccactcccataaagagcagcccgcccgcggccgcgcacaccagcagcagcccataggtgcgctggatgcccggcatgtccttcgtgccccagtattgggcgataaagaccgacgcgccgctcataaacccgaatagcacgatgttcagtagccagctccactgcccggccatgcccaccgcggccagcggcacctcccccagctggccgatcatgatggtatccaccagcgtaaacgagctggtcagcaggttttggaaggcgatggggatcgccagccgcagcaccgcgttccagaaatcccgtcccccaaaatacttttcaagcatccgttctctccccttcgggggtgttacccccttttatccgctcttatcttctgcgggtttatcggcacccgcgcccgccacgggctttagggcctttcttcgtccgctctttccaggggtattaccccttttatccgctctttcccttcacgggtttatcggcacccgcgcccgccacgggctttagggcctttcttcgtccgctctttccaggggtgttaccccttttatccgcttttatcttctgcgggtttatcggcgtccccagcccgctgtgcgccctctcctgccgcttttctcactgtcatcccgagcgcaggcgagggatctcacgcgtcctctctttctcccgcttatgcgaaaaacccaggcaaccgctgtcccaatccccgcagtccgtggcctggcaccacccactgcgcacgcaatagattcttcgctccggcttcgccttcactctgaatgacagggctttcgcctttctccgctcacatcttctgcaattttatcagcgcttctgcccgccaatttcatgcagtcttatgctcgctctgggcggtaaggctaacgccctttccctcgctcgcccgcgcagttccatcggcgaacctatccgccatgcttccacttctgcctcctcacccgctgtcatcccgagcgcaggcgagggatctcaggcattctctctttctcccgcttatgcgaaaaacccaggcaaccgcctttctccgctccacccatgcaccggtcctcacatcgggcgccccagcccactccgcgcacctgtcatgctaagccgccctttcacgcgccctaccggcgcgcaaggccctctgtgcccaattctctcttgcggccgtttcgccccgtgcgggcttccataccttatttttgccccattccctcatggctgcttttccctaacaaaaaagcggcaggcaagccccgcgctttcccgcgcagggccggccataccgctttgcccttctcctttatacaggcctagcccgctaccgcgcggcgggccaaaagcagagcccctgccacgccgctgttgatccccagcccaggcggtacgatatagccgtccattccctgcagcacggcctcgtgctgtacataattgcccagcagccgccccgtctccttgcggatcatggggaacaggtgctcctgcgccattacgcccccgcccaggatgatcttctcaggcgacaggcagaccaccgcgttggcacacatctgtgccagatacccggcctcaatgctccaggcgatgtgatctcggggcagctccttggcgctcacgccccagcgcttctcaatggccgggccgcaggccagcccctccaggcaccccgtgtggaaggggcagatcccctcgggcataatgtcctccgggatgggccgcatcagcatgtgtccaaactccgggtgcagcagcccgtgtaccagattgttctcgatcaccagccccccgccgatgccggtgcccaccgtcacatacaggcagctgcccagccccttggccgcgccccaggtgtactcggccagcgccgccgcgttcacgtcggtgtcgatctcgcagggcacgcccagcgcgtcccgcagttggggcagcagcgggtggttctgccaggccagtttgggggtcgtggtgatgtacccatagctgggggattcctttttcagatccaccgggccaaaggtaccgatgcccagcgcctcaattcccttatctttaaaaaagccgatcagcagcggcatggtctcttccggcgtggtggtggggaagctctcccgctccagcacgtccccgttctcgttgcccagcgagcagaccatcttcgtgccgcccgcttccagtgcgcctaacctcatctgtcttcctcctcgctttcaagggcccgcggctgctccgtcaggccgttcaaaagctattttatcacacccgcccggggctgtcgccctattatcgcatattctctttaggatttctttgctaccgttcccggagccaggcttcctcgcttcgcatactcgcccggggctgtcgcccttaaccgcatattctctttaggacttctttgctaccgttcccggagccaggcttcctcgcttcgcatactcgcctgcggctgtcgcccttaaccgcatattctctttaggatttctttgctaccgttcccggagccaggcttcctcgcttcgcatactcgcccggggctgtcgcccttaaccgcatattctctttaggatttctttgctaccgttcccggagccgggcttcctcgcttcgcatactcgcctgcggctgtcgcccttaaccgcatattctctttaggttttctttgtgctgtgcgataaggtatgcctttttgcttgtaggcctgtcattcagaacggaggcgaagccgaagtgaagaatctattgcatcccttcttggccaaacaccctttaagcggttgtacctgtatgcaataccgattggttatcaggagattcctcgcctaaggctcggaatgacagacgaagaagtgttacgtgcgcgcaaaagcataggttcgtgtgcgcaaagcgcaaccctaaataccatcattccaaagcgccagcggggaacctctttgtaactgcccagtccaaacagcctctgccctaggccgcctcgtggggctcgttcttcgccccatgctcgtggacgatggccttgccccgccaggcgccccgcttgtaaaataccgtggtgatggccgcgcccagcacccaggccaccagcagggatacgaacaacgaatccgggctgcccgccggctgcgccgcgctcttggtaaagtacgccatcgcgtaggcgatgggcacgcggatcaacaccgtggtcaccagcgagatccacatgggggtcatggtgtcccccgcgccccgcatcacgcccgagaggatctgcgtcaccgccatggccacataccccacggccaggatgcgcagcatccgcacgcccaggtcgatcaccgtgtcggtggtggtaaacatgcgcatcagcgcctcgccgaagatcaggatcagccccaccagcaccgccgaggtcaaaagccccatcttcatgccgtcgcgggtgccctggtccacccggtccatccgccccgcgcccacgttctgcccggcaaaggtggtcatggccgtgccaaaggtgaagttgggcatcatagcaaagccgtccacccgcatcaccaccgtggatacggcgatcacgctggtgccaaagctgttggtcagcgattgcaccacgatggccgccgccgagaataccgcctgggtcagccccgctggcaggcccagcttgaccagctgcaccaccagctttttattcagcttcatggtatgcaggttcacatccagcgtctcgcgcatgcggcacagccgccacaggcacagcaccgccgagatcgcctgggcaatgatggtagcccaggccacgccggccaccccccagccaaaggaagccacgaacagaatatccagggcgatgtttagcccgcaggccaccagcagaaataccagcggcatcagcgaatcgcccatcccgcgcagaataccggctacgatgttgtaaaacgccaaccccgcgcagccgataaagatgatgttcagataatcgcaggccatggcgtagatgtccggcggggtatcctgcagggtcatcagcggcccggttaaaagcggcccggcgatcatgatgaatagggaggccagcagcgtcagcgtcagggtgcagcccacggtcttgctgagttgctcgcgctgcttggccccaaagtattgggataccatgatgcccgcgcccgtagccacgccgatgaacagcaccagcaccaggttaaagatcggcccgctggcccccaccgcggccagcgccgtatcccccacgtactggcccaccacgatggagtccaccgtgttgtacagctgctgggccaggttgccgatcagcagcggcacggaaaactgaaccaaattcagccaggggtgcccctttgtcatatcctgcgcgccaaagaattttgagagtttccccgccatattgcctcctcgcagtttctccccttcccatgctgtgcagggctagcgttctcctaatttgcagttgaaagagaaagaaagccgccttttggcggtcgctgggtttagagaagaatcttctttaaaagattaagattgtataaacgtattggaatatcatatcgcgttctatttttatagtcaagggggtacttgcaagttttcccgcattttggtaaaacgttcggttcaaccgtgtcatcccgcggatggttgtgcccgcgcgggccaatgtggtaagctaatggtgggccggtggcgcggcaatgtatgcctgtgcccaccagaaaggactaagacggcggcggctctcagctaggtttactcattcgcccgctcatcaagtccatcgctgtcattccgagcgtaagcgagggtgcggaactttccgccgccagtggcggagtaagtgagtgtagcgcccggtgagcgtaaggtaagggcgaacgccgtaaggcgtgaaggccgaacccacagcgaaccgagagttgcctgcctttgccgttgttagggcaagcacgtaagacatgcctgcaccgcgcagcgcaggtcaagcgccactcccctgccaaacgcacgagattcttcgctcggccttgcggcctccctctgaatgacaggcttgcatgtgtaagttatgctaatttgttcacctatcaagcccatcgctgtcattccgagcgtaagcgaggaatctcttgacatcctcttggtttggcaggtctcctagtcctgcagggcaggcgccactctcggccaacgcacgagattcttcgctcggccttgcggtctccctctgaatgacaggcttgcatgtgtaagctatgctaattcgttcacccatcacgcccatcgctgtcattccgagccacaggcgaggaatcttttgacgtcctcttggttcggcaggtctcctagccctgcagggcaggcgccactccctaccaacgcatcagcagtcagctgcgcttgacctgcctgatccattcaatccacaatatataaaggaggaatcctctatgcgatcccgttttcgccgccccgccgcgctggcggccctctgcctggcggtctgcctgtgcctggccggttgcagcctgtccacgcccgccggcctgccttacgcgtccgcatcatcctccccgtccagcgccgcgtcctctcccgtctccgtaccggcggctgagggcgcgcttaccctgcacttttttgatgtgggccagggcgacgccaccctggtcaccaccccggccggggagaacatccttatcgatggggggccgcgggccagcggccaggccctttgcggctacctggacgcgctgggcatacgccgcctggaccgggtgatcgccacccatccccacgaggaccacatcggcggcctggtcgcggtcatcccccgctacgagatcggggaggtggtcatgccctactacccggccaccaccaaggtctatcgggacctgctcaccgccatcgaccaaaaggggctgggtatcacccccgcggcccagggcatggcgctggacttggacagccagaccgcctgccaggtgctctggcccccggaggacgccgagaaagccgccggggataaccccaataacgccagcgtggtgctgcgcatcacctttggggaggacgccgtgctgctcaccggcgatgcggaacaggaggtagaggcccagctggagggcgaacttaacagcggcctgctcaaggtgggccaccacggcagctccacctccaccagcgcagccttccttaaaaaggtgtccccgtgcttcgccgtcatcatggtggggcaggataacagctataaccaccccaacgccaaggtggtgcagcgccttacgcaggctggcgcgcaggtactgcgcaccgatgaggcgggcaccatcaccctgcaaagccagggccagggctggcagctggtacaggaataaaggaggatcatccccatgccatacgccattatcgaccgttttgaaggggacatggccgttctcgaaatgccggacggcgccatgcgaaccctgccccgcgcgtccctgccccagggcgcccgcgcgggcgacgccctgcgcctgaatgaggcgggcaaccccatagccctggaccccgaggagaccctccgccgccaggccgaggtgcgcgccctgatggacaagctctttcgccggggctaaagcccttttaatcgcatagacgttgctagcaaagcccatctcccattcccggagccaggcttctccttaccccatcctttcccgtttggggccaccgccctcttaatcgcatagactttgttataaaagcccatctcccattcccggagctgggctttcttctttctccatccctctccccccggggctagcgccctcttaaccgcatagacttcataccaaagcccttctcacgccaacctgtcattcagagcccggcccgcggtcgggcgaagaatctctcacccacctctcgccagcgcctatccactcccccccggggctgacgcccttttaatcgcatagacttcattctaaagccctgttcccattcccggagctgggctttcttctttctccatccctctcctcccggggctgacaccctcttaactgcatagacttcataccaaagcccttctcacgccaacccgtcattcagagcccggcccgcggtcgggcgaagaatctctcacccacctctcgccagcgcctatccactccccccggggctgacgcccttttaatcgcatagccgttatgaattgaagcccagctctcattcccggagctaggctttcccgcttcccacgagattcctcgctctcgctcggaatgacagtgtgggtaaaactaaacctccgctcccccttccatcgccggattctccccttgcctccctcggcgcagggaggtggcaggcgcagcctgacggagggagcgtccccctctcccgtccgcataagcttcattataaccccagcctatacaaaaaaagcacaacgctcccgtcattcagagcccggcccgcggtcgggcgaagaatctctcgcccacctctcgccaacgcctatccactccccccggggctgacgcccttttaatcgcatagacgttgctatcaaagcccatctctcattcccggagctgggctttcccgcttcccacgagattcctcgctctcgctcggaatgacagcagagcattgaagaaaggcacaggcctgtggcggtcgcgcagttaggatttatccccagaactaaacgcaaaaaaggacgccgacccgtcattcagagcgcggcctgcgtcccggaaccgttcaagcccgtccctggcgggcgcaagcgtataaatgcgcacaaaagtgggtgcggcaaggcgggcggcagccccgcgcgaagaatctcctgcccacctctcgccagtgcttccccccatcccttggcacgccctcgctcccccattttccccaaacggaagcgcgcccggcagatctgtcactccagatgtgccgggcgcgtttccctcactgctttcgcttcaaaagtgtgttcccccggcggcgcttccccctttgcgcgccgccctatggcattaacagccgaaccggatgttctgcaaccgggcccggccgctggccaccgtcaatttcacctgtacttcctccccttcggggatggtgcccaattctatccgctggggtttatccgtcgagggcgccagcagcaccgcccgctccgggcagcccgggatctctaccagcagctccgcctcctcatcggcgtaatagtccagtgccagcgggcagggctgcgtcacatcccttatggtgtagcaggcaaagctgccgtccctaagccccagcagcaggtggctgcgccagggggcgcggtgatcccgcccgggcttcttcttcataaactgggtccagtggggcttatccggcgccacataccccggctccggcatgatgtgcatgccgtcggccaggcggaagtcaaacaggttgccgtaggcgtaccccccgtcaaaggagaggccccgcccgggcaccgggtcgtagctcaccgccgggatggcgatgcccggccggcgcaggatgtgccgatcgctatccaggtcgatgcggcggcagttctcaaatttcacgttttccagcagttcgtcaaaaatggcctggctcttttcaaagctgggcttggtgccgccctcgcagtaatcccgcaccagggcccacgcctcgggtaggggatagccgtacccgtggtgagaaactccgggctggtcggcaatcttccagcaccacatgttaaagccgatgtggtactgcacgtgcatctcaaagaaggtggccatccagtcgttggagccgttggtctcccccagccagaccggcacgttcagctcggcggatttggccaggtagcccatcatgctgcccggctcgggcgaggcgccgtagcagtgcacgtggatgcaccagttgtggcactccggatccatatcccggtcgaagatctccaggcggctggaaaagcggtgcccctcgatggagagcatgtgccgccggtcaatcttgcggatgcgggcgatcagctcgtcataaaaccgggagagctggggcagcaggtaatcccactggggcggggagagcggctcgttgagcaggtcgtacccgcctacgatccagcggtccttatagcggctggccagctcctcccaaaggcggatggtgcgctcgtaattctcggcctcaaacatgtggggcacgttgtccagcccgtcgtcgcaggcgatgccgctctgcccgcccggggccgcgtgcaggtccagtatggcgtagatgcggtactgctcgcaccagtccaagatctggtccagcatggcaaaggaatcctcgttccagtggtagcccggttcctcgggcaaaaaggcccaggcgcacagcggcagccggatggagttgtacccatcctccgctacctgggcaatatccttttcgcctaaatagttgcggtaccaccggggccaaaaggcatccctataggcggtgccgcacagctcggcgatggtcgtactcatggagcgggcgcggtccatccgcccgggcaggcggaagtcctccccccagtcctgcaggccgttggtgccccccaccataaagccctcggggttgttccagttgcccatgccccagccccgcaggatgacctcctcgcccttgccattgaccatgatgcgcccctgggtgtggagaaagccctccacccgctcgcggctaaaacaattcgccatcgttaaaacccccttcattggcgtggcggcaaagggcggggccttgcgctctctcgctctttacgcgctgttaatcttttttcattataacggcgggcgcaaaggggaaacaaggccggtttttttacctctataggggggatttttaccgtcccgtcggacccaggcagcgttttacctcaatttaccagacaaaaagcgggtggaaggccagggtcgttatgataaaatataggtcgaaaggactagtttaaggcacgtccttttgttggcaaaccggtcgaaagcccgggacgcaaagctaaagggccttcaccttcggtatggcagccagttgcacagcttttagcatttcattattgcggcattctgacgctaaaatgggcgctgtgggcccggatcaaacgccaaccaaccccaaaaatgaacgaagggaggatagaaaaagcgccgcgcgcttcagctaataggcaatcaatcaacgaggaggaaaaccaaaagtgaaaaagaaaaacttcctttctatcctgctggccattgcggtttgagcggggatgctgcctgccgcttccgcccttgcccagggcagcgccagcctgagcgtcaacctgcccggcgtgatcgtggcgggcgagccagctgaatttaccgtcacctcccatggaacgaccgctcagggcctggtcaagggtacttttagctatgacgccagcaaggtcgccaaactggagtactacgagaccgccggcaacgccggctggcgcgagctgaccggggatagcttcggcccttcttccggcttcccgctgatggacggggctaccagccgcttccgcgtcaccttcaaagagggcggcacctttactacggatatccagctcaaggccgtaaacggcggcgcggtggtggcccaggctacccccagctttatcgtgaaaactgcgcccacgctcactgtcaacctgcccggcgcgatcgtggcgggcgagccggccgaattcaccgtcacctcccatgggcagaccaccctgggcgcggtcaaaggttatttcagctatgatgccgacaaggttgaaaagctggaatactacgagacgtttaacgatgccggctggcgcgaactcaccggcgatagcttcggccccgacagcggcttcccgctgaccgatagcgccaccagccgcttccgcgtcacctttaaagagcccggcacctttaccacggatatcaagctggtcgccgtagacggcggcacagtggtggcccaggctacccccagctttaccgtggcggccgcccccagcctgacggtcgatcttccggatacctttgccgtaggccagcccaccgagtttacggtcacctctcacgggcagaccaccctgggcgcggtcaagggctatttcagctatgatgccgacaaggttaaaaagctggagtactacgaaacgtttaatgacgccggctggcgcgagctcaccggcgacagcttcggccccgaaagcggcttcccgctgaccgatggcgccaccagccgcttccgcgtcacctttaaagaggcgggcgagtttgaggccagcatccagctcaaggctgtaaccggcggcgctgtggtggcccaggctacccccagctttacggcggtgcacgtccacaatcccgtggctgtggaggggaaggcccctacctgcaccgaggcgggcaacatcgcctactggtactgcacggattgcggcaagtactttagcgatgccgcctgcacgaaggagatcgccctttccgatactgagctggcggtgatcccccacgattatcaggacggcaagtgcacgatgtgcggcgcggtggataccgcctcgctgcccctgccccagcccgccgacccggcgcagaccggtgacgccgaacagacggaaaccggcgccgccagcacgactcccaagaccggccagtccaacgatctggtgctctgggccgcgctgatgctggccgttgccggtattaccgcgggtggcgcagcatatgccaaaaagcgcaatgccaggggataacctttaagcctgacaaaaggccggccccgtatcgggagccggcctttttgcgccctttgggcggtatcactgcgcttttcgcctttgttttccatataaaaagatggttgacagcttgttatgcggggcgtatactataggacgaaagtattagatattatttaatactttataatgaaatatagccggcaaaccggccgaaaggctgggacgcaaagctagagggccttcacccccccattggggtatggcagccagttgcactttttctcgcaccgttttttcggggcggccttcttgcaacgcaaagggggccgcccctttattcgtccctccctcacgcggcagggccggcgataaaagagaggatggaagacaaatgaagcatcatgtaaaggcgtttttggcgctggtgctggcggtctgcctgctggccctgcccgctacggggctggccgcgggcgaggaagctaccggcatcgaaagcctggagcagctggggcagatcactgcctcgggcagctaccggctggatgccgacatcaccgtgccggacggggtcatgctgaccgtgccggccgaactgaacatcaccctggacttaaacggccataaggtggaaaagccccagggcaacggccgcatcttggataactatggcaccatggtcattaacgattccaagggcggcggcgtggtagacgcctaccgcaacgccgtgggcaactttggccatatgaccattaacggcggcacctttatcacccactcgaccgaaggcggtacgaccattttgaacgaggccggcggcactatggtctttaacagcgtggtgatcaatgcctccaacttcgcccacgtcaacgagggcacctgtaccatcaacggcggggagttccattccacctcctctaaccgcaatggcaactgggcttactgcgtgcgcaattccaatatcatgacggtgaatcacgccaccatcaccggcatccagggcgcgctggcctccaatgccggcacgctgacggtaaagggcggcaatttctctaccgattgggatgattccgcctccttctacgcgctctacatcgccggcgaggcggacgtggtgcagggctttgtgtacgggggcaacttctccagccccaaacacgccatccacatcggcaacgataatacgaacggcgacggcggcatcaatgccgacgccaccacgacgatttacggcggcacctttaacggcggcatttcggccatctacggcgcccaggtcaccggcaacccctatgtagagggtggcacctacctgaaaaacggcgcgcccgacccggtggtaaaaagctacctggcaaacggctttgtctttgaggagagcaccggcaaggtgaaggatgcgcgcgtcagcgccgtaacgctggaccgcagcagcgccaccctcaaccccggggataccctgcttttgaatgctaccgtcaccgcgggcgaggcggcggataggaccgtgacctttgccagcagcgacgcctctgtcgccaccgtggacgcccagggcaacgtaaccgcccaggctgccggcacggcgcagatcaccgccaccgcaggggacaagagcgcctcctgcaccgtggtcgtggtggaaaaggcccagcccccgcaggtggacccggacgaacccgtggatactgtcacccccggcctgccccagcaggcggccgatgcggtcaacgaccagcttaaggacgtggtggatcagatcgtgaccggcggcacgccggatgcggtcagccctcagacccaggctgctatcgcccaggcggcccagcagggcagcgccatcgccctgcagatacaggcccagccggtagacccccaggccgtgggcgcggacgcggaaaaagcccaagccctggccggtgaaaacgggcagatcgcccagtatctggatatccgcctggtgatcacggcggacgggcagcccatcggcacgctggatcagctcgacgcgcccgtcaaagtgcaggtgctggtgccccaggcgctgctcaaagagggccgcagcttctatgtcatccgggtgcacgagggcgtggcccaaaagctgcctctaaccctgaacggcgctctgggcgagtttgagaccgatgcgttctccacctacgccctggcctatgaggacgagcagcccgcccagggcggcggcgaaacggtcctgcccacgccgcaacccgctgccccggccacgcctaccccggcccccacgcagtctgccggcagcacgccggataccggcgagtccggctccctgctcccctatgtgattctggcgctgctggcctttgcggccatcatctgcacgctgggctataagctgcgcgcgcatagggccaaataaatcaagacttttagagagaaaaggatctgcgggacctaccccgcggatcctttttttgaccccgtgcgcaaaaaaccatactttaacgttcgcatcctattgtcattcagagcgcaggcgaagccggagcgaagaatctgatgcggtggcaaagaagcgactcttgaaccgtagggatggaggacatgcgcagccaagaaagcgtcaagagattcctcactggcgctcggaatgacataattggaagcgataacctgcgtgggaaagtatacttatccattcgcttctcaggcatgtcaagtatcattccgggccctgggcgaagaatcgaaccgagcggcgtatagcccgatgcgagaacttcggtgcaggcaaggtgcgtgtgcaaagcgcgtggacctgcaccggcttggggcgggaatgttttttgtatatgcagccgatcgcgctgccgggcgcgggaggctgcaaaccggctcgcgccagggcggcaggcacaatataaaccatatgcgcaaaagggcgaacctttgcttgcaaatgggtaaggttgtgcagtacaatgtttttgtcaaacgtttcttataaaagttaataatccaatgtgcgaaaggagcccgaatcgtgaaaagctttgatttctattctcctacagaggtcgtctttggcaaggacagcgagcagcaggtaggcgcgctggtcaaaaaatggggcggcagcaaggtgttgctgcatttcggcggacagagcgctaaaaagtccggcctgctggatcgtgtagaggcttcgctgaaggcggagggaatcccgttcgtcagcctgggcggtgtgcagcccaacccgcgcttgagcctgatctacgaggggatcgaactgtgcaaggccgagggggtagactttatcctcgcggtgggcggcggctcgaccatcgactcggccaaggccatcggcgtggggctggggcatccggacgaggacgtgtgggagttctattttggcaaacaggtcaaaaaaatggcgccggtgggcgtggtgctgaccatcgccgccgcgggctccgagacctcgaactcctccgtggtcaccaaggtggaagaggatggcacgcacgtcaagcgctccatcgatcaggacgccatccggcccaaatttgcggtgatgaaccccgaattgatctacacgctgcctaaataccagatcggctgcgggatcgcggacattatcatgcacacgctggagcgctatttctccgctgccgaaacgctgggcaacgatttgaccgaccggatcgccgaatccgtcttaaagaccatgatccagtacggcccgcagtatctggccacgcctgacgattacaaggccgcctccgaggtgatgtgggcgggttccatctcccacaacaacatgaccggctgcggcaacggcggcgattttgccacccacctgatcggccatgagctcagcgcgcgctacgatgcggcgcacggcgcgaccctgaccgcggtttggggcgcctgggcgcggtatgtgatgagcgaaaacgtgctgcgctttgcgcaatatgccgttaacgtttggggctgcgactttgattcggccgatcccgagcgcacggcgcttgcgggtattgcctgcacggagaagttcttcgcctccatcggcatgcccatcaacatcccccagatccaaagcggcgtgaccgaggaggatatggcggcgatggcggatatgtgcgtgtcccgcgggcgtacggccattggcgggtttaaaaagctgagccgggatgatgtgtacaacatctacgtggcggccaaccgctaagggataaaagagaagtaagggaaaagagccggaagggagaccgggcggcgggcgcagcgcctttgccgcccgcccccgcggctcttttttaatgatcccaaccgggcgtgaaaaagccgccccccgtttttgggggacggcttttgtcatgtgtatgcggggaagcgatacggccgctcgcgccttacagcgcctccacctggtcggccgcggcgtccagataatcgccgttatacagctcgatcagcccgccgtcgcaggcggcagccaggtgcggatccacgggcagcttgcccagcaccttcaggccgtacttttcggcgatctcgtcgatatggctctcgccaaaggccttgatctgcttgccgcagtccgggcagaccacatagctcatattctccaccaggcccaggatggggatattcatcatattggccatgttgaccgccttttccacgatcatgcccaccagctcctggggggaggcgacgatgatgatcccgtccaggggaatggactggaagacggtcagcggcacatccccggttcccggaggcatgtccacaaacatatagtccacgtcgttccagatcacgtccgtccagaactgcttgaccgtgcccgccaggatgggtccgcgccagaccaccggatcggtatcgttttccagcaacaggttgatgctcatcacgtcgatcccggtcttggtgcgcacgggatagatgccatcctcgctgcccatggccttttccttaatgccaaaggccttggggatggaggggccggtgatatccgcgtccagaatcgccgcgtgtttgccgcgccgctgcaggcctacggccatcagcgaggtgaccagggacttgcccacgccgcccttgccgctgaccacgcccaccacctttttaatgctgctgagctgatggggcttctccaaaaaatcctgcggggccatgcgggaggggcaatcctcgccacaggtctcgcaattgtgcgtgcaattttcagcttccgccatgtgttccactccttcaccatacaaagcataggcccctaagtattgggcatatgtctaaaattaagcatactgcccaagcgccggtttgtcaagaggggggctagcgcccttttagccgctcccaccgtttgcgggtttaggtgcgcaaaggcccgccaaagacaagggaaggaggcccgtcttttgaggggggctagcgcccgtttgaccgctcccaccgtttacgggtttcggtgcgcagaggcccgccaaagacaagggaaaggagcccgtcttttgaggggggctagcgcccgtttgaccgctcccaccgtttacgggtttcggtgcgcagaggcccgccaaagacaagggaaaggagcccgtcttttgaggggggctagcgcccttttagccgctcccaccgtttgcgggtttaggtgcgcaaaggcctgccaaagacaagggaaggggcccgtcttttgaggggggctagcgcccttttagccgctcccaccgtttgcgggtttaggtgcgcaaaggcctgcctggccattgccatacctgtcattccgaagccgcaggcgaggaatcttttgacaactggtttgcctttcttacctctgtacagcggcgatcaagcgctgcccagtatcgacgcgtgagattcttcgctgcggggctgccgccgctgaaccgcgctctaccttgtccgcaccccgacgccaccgcccgccatcagctttgcttttttccgccctccgctctgaatgacagggctaacgcccgcttgaccgctcccaccgtttacgggtttcggtgcgcagaggcccgccaaagacaagggaaggcggcccgtcttttgaggggggctagcgcccttttagccactcccaccgtttgcgggtacaggtgcgcagaggcctggccattgccatacctgtcattccgaagccgcaggcgaggaatcttttgacaactggcttgcctttcttatcctgtacaacggcgatcaagcgctgcccagtatcgatgtacgagattccttttgccctcgctcacctgccccgcaacggcccctctaccgcgcccggctccgcctgctgcaaacgccctcaaccccggcgcgctacccgcgcggcaggttgcgggccatccgggccatgcgcgggtaggcgtacgcaaaaaactcccggtagctctcgcaaaagcggttgggccccagcgcgccccgttcctgctcccggtggcggcggcagccgccccggcacagggcgcgccaccggcaatcctggcaagccgcctcatggctgcggccctcctgcaaaaaacgggccagcaccgggctcttcatcagccgcggcagggattgttctttcaggttgcccatgcgccactcatccagcacgtaaaagtcgcaggggtacacgcccccgtcgctctccaccagcagatagcccccgcattcgccccgcatgtcgcaggcctcgggcgggcggccgcaaagcatgcccacatagttgtcaaacagccggatcgatacgtatttccccgcgtaaaacgcccgctcgtattcatcaaaacagcccttgaggaaccccgcgtaatcctccggcgtcagcgagtagtccgcccccgccccgccaaagtcgtccaggcaggggatgaactgcaaaaagccgtagggcgccagcgcccggaaaaccgccttgggcgctctggccaccgggcccgagaccacgcacaggatgttaaaggccaccttgtattgctccagtagatgcgcggccccctgtacccgcgcatagctgcccgccccgtccgcgccggggcgcagactgtcgtgcagggcctgcggcccatccatggacaggcccactaaaaacccgtgctgcgccaggaaggccgcaaacgcctcgtccagcgcgtatccgttggtctgcagggcgtagtgcaccgcaaggccccgggtgttatactcccgcaccagggccacaaagttctggaaatagtccagccccgccagggtaggctcgcccccctggaagccaaaggtcaccgctccatcggcatattggaaggcgcggcgcaccaccgcccgggcggtctccccgtccatcaccccgtaggatttcaccgcccgcctgtcggatacgtccgcataaaagcagtagcggcagcgcatattgcacaggctggacgcgggtttgatcagcaacgtcagcggcggcatagcgcccctcctttcctcttctcttgtaaccgtatcttccgggcctttaggcggctgcgatcttgcaggctgcacgccctttccccgtaccgcacgagattcttcgcgccagcttcgcttccgctctgaatgacagacgctatgctttacctgttcaatgcctgctccacccgcagcccttgcttttccccgtcattccgagccgcaggcgaggaatctcttgacgaccacttggccctgcccatgccccgccgtactggcaaagcgccttggcgccctctgatctacgcccgcatcgccacagccccggcaaatgcccttgcctccctccttggagggaggtggcaggccccgcctgccggagggagttgcacctcagcccgcgctgtattacgccgcccttgcccattcccctaaaccgcgcaattcatacgccgcttttctgcccacgcatgagattcttcgctcggcctttcggcctccctctgaatgacagggctttcacccctttatccgctcttactatttacatcctcacacggttatcgcccgccagtggcttttctcctctgtcattcccaactgggcttacgccctttttgccgctcctgccttttggcgttagccccgcttctcctgcccgctagttgcttctttctttgtcattcccagcggagctttcgccctcttaaccgctctcactattttgcgcttccagccgttcaccttttcccgtcattccgagccacaggcgaggaatctcttgacaaccacttcgcaccgtccgcaccaaaccatactgataaagcgcctccccactcgggcggggattcctcacgccccgatggaggcccccgcctcctgcacccgggccatacgccggtatagcccctcttgggccatcagctcctcatgggtaccccgctgcacgatgcgcccgttctccagcaccaaaatcaggtccgccttgcggatggtggagagtcggtgcgcgatggccacgatggtcctgctgcccgccagctcgccgatggcctgttggatctgcgcctcggtctgtacgtccaccgatgctgtggcctcgtccaggatcagcactggcgcctggcacaacaccgccctggcaatggcgatgcgctggcgctgtccgccgctgagcctggccccccgctcgcccaccggggtatcgtacccttccggcatggccatgatgtcctcatggatgcgcgcggccttggccgcctgctcgatctggcccagcgtggcctctggctgggcataggcgatattctgggcgatggagccgttaaacagaaaggtatcctgcagcaccagggagatgttgcggtgcagcgagcttagcgtcagttcccgcaggtcctgcccgtccagggtgacccggccggccgtggggtcgtaaaaacggctgatcagctgggtcagcgtggtcttgcccaccccggtggggcctaccagcgccaccatcttccccggttccgctgtaaaggtgatctccgagagcaccggctttttggggtcgtaggcaaagctcacctgctcaaaggcgatgcgcccctgcgcccggccgatctcccgcgcccccggtaggtctttgatgttcatgggtgtatccagaatctcgatcacccgctccgccccggccagagcctgctgggcctgctccagcagctgggcaagcgaggtcaccggcgcgtaaaaaagcgtcagatagagcagaaaagccacgatctcggatacgtcgatctgccctaaaaaggccagatacccgccaaagcccactacgatgacgctgcccagcgccgttaaaaactccacgctggggtggaacaccgcgtttaagttcagcgcccgcagcatggccacggtgaacttgcgcgccttatgcagcacctgcccgctggcccgctcctgctggccaaaagcctgtatctcctgtatgccggagaagttatcctgcaaaagggcgctcagctcgccctggctgcgctgcatggtgcgaaaattaggctgtacctttttaacgaaaaaccagcccgacagcaggatcagcggcagcggcaggcaggtcagcagcgccagcttaaagttgatggataaaaggatgaccgtcacccccaccagcgtcacaaggttggtgatgctctcgggcatcaaatgggcgtaaagcagctcaaaggtggcggtgtcgttcatcacccggctcatcagctcgccggtctgtgtgctgcggaaatagcccatggagaaggactgaatggtgttgtacacccgcaggcggatctcctgcaccaggttccaggccgccttgtgggccatgtaattgcttaaataccgcagtaaaatgcgggagaggtacagccccaaaagtcccagcgccaatccgccgatggcctgcagcgccgcctcgtccacccccgcgcttacgatgccggtcatccggctgagcagctggggcgcgtacaggttcacccccgtcagcgccagcgtggcaaagatggcgatcagcaatagccctctgtagcttttagcttccttggcaacccgccagagtactttcatcggtggatattcccctctcatccatgattttgtctttcccagggcttacgccctttcaaccgctcttactgttttacgtcctcacacggttacagcccgccagcggcttttctccttttccattcccagcggggcttacgccctttcagccgctcttactgttttacgtcctcacacggttacagcccgccggcagcttttctcctttgtcattccgagcaacgcgaggaatctctcgacaaccacttggccctacccatgccccatcgtgcgggtatcgctccacgcttctgcccacgcatgagattcttcgctcggcctttcggcctccctctgaatgacagggcttacgccctttcagccgctcctgccttttggcgttatccctgcttctctcgcccgccagtcgcttctttctttatcatttccggcagctttcgccctcttatccgctctcactactttgcgcttccacgcgttcatctttttcttgtcattccgagccgcaggcgaggaatctcttgacaatcgcttggccctgcccgcataccgccgtgcggataaagcgccctgcccgcgctgacttgcgccgggacacatcctcgcccgcaccgccacagccccggcaacgcccttgcctccctccttggagggaggtggcaggccccgcctgccggagggagtagcttcctctcacgccgcgcttttccccgtaccgcacgagattcttcgcgtcaacttcgcttccgctctgaatgacaggcgctatgctttgcctgttcaatcccaacccacgcccccttacttcccccgtcattccgagcagcgcgaggaatctctcgacaaccgatcggccccgcccgcacctcgccaggccggcaaagcgcccccgcggcctttgacccgcgcggcccttaatccagcacctggtcgatcacgccgccccccaggcagacctccccatcatagagcaccacactctgtcccggcgtcaccgcacgctggcgcgtctcaaagtccacccggatctcgtccagcccggtgcgggtcacccgcaccccctggtcgccctggcgatagcggaacttggccgtgcaaacaaaactttcccgcgcctcgtccgggtcaaaaaagtgcagcccgtgggcgatcagcccgcccgagtacagctcgggcgcgtcctcaccctgcgccacatagaggatgtttctttccagatccttgcggatcacaaaccatcgccgcccgtcgccctgggcgtccccgccgatgcccagaccccgccgctggcccagggtgtaatacatcagccccatgtgctggcctaccacccggccggtgtggaaatctatcatctgcccgggctgtgccggcaggtactgggcgagaaactggcgaaagtttcgctcgccgataaagcagatgccggtcgaatcccgcttgccggcggtgaccagcccctcctgggcggccagcgcccgcacctgggccttggtcatcccccccaccgggaagagcgccctgtccagcgcggcggccggcacctcgtacaaaaagtagctctggtccttgcccgggtccaccccccgcagcaggcgaggcttgccctggggcgcatcgctgcgcacaaagtgcccggtggcgatcttgtccgccccgatggagagggcgaactccaaaaacgccttaaacttgatctcccggttgcataaaatatccgggttgggggtgcgcccccgcttatattcctccaagaaatgggtaaacacccggtcccagtactcccgggcaaagtccaccgtataataggggatgtcgatcacctcgcacacccggcgcacgtccgcaaagtccgcgtccgaggtacaggccccctcctcgtctttttcctcccagtttttcataaacacgccgatcacctcgtacccctgccttttgagcagcagagccgccaccgaggaatccaccccgcccgagaggcctactaccacgcgctgcgccatttgaccacgccccgtttccttaggaattttgccttcatccgcccacagcccgccggcccgggcgtttctttcattatagcttgcgccagccgccaaaagcaatggggctgtcgccccctttaccgctcatttcttaactgtcccccaatcgttcgcgcccgccatacgcttttcccttcctcactcccttctcatacaaggctgtcgccccctttaccgctcatttcttaactgtcccccaatcgttcgcgcccgccatgcgcttttcccccccatcctcccttcgcatacaaggcttgcgtccctcttgccgttccgcccgtttcctctccgtcaagtacctgcatccgccatatacttttatctgtcattccgagccgcgcgaggaatctcttgttgctctcccaaccctgccacaccgctgccgcacaggtcaagcgcatcccctgccaacgccccagattcttcgctcggccttgcggcctccctctgaatgacaaatgctattcttggcttttccttttttccctcttactcgctctgggctgtcgcccccctttgccgctcatttcttatctgtcccccgctcgttagcgcccgccatatacttttaactgtcattccgagcagcgcgaggaatctctttacaacctatcggttctgcctgcacctcgccatgatggcaaagcgcctcttcgcaccctctgcttcgctcccccgccgccataacttcagcaatgcccgtgccgggtggcagcagatcccgcccgccagctgccgttgcgcttgacttccatcctttttaccgccccgcgcatttcctcttgtcaaataccctcgcctgcgtacagccttatccttcttatcccgcctgggcaaaggttaaggccgcagggaaaaacctgcggccttggtttagttcagcgaattaaatctaaaacttagccgtcacccaggcgtaccacagtcagtgccgcgtcctggaagctgaacccatcctggttgactaccatctccagatactccggcgcgcccgtcactcggaagggcatcgagaagctgaccgtagccacctcagaggaggcggtaaaggagtgccgggcgatcgcgccgggcaccatcgtcccgttcaggttcatctgcacctcggccagcgccggtatagaggtgcccgagttgggcgtaaccgatgcgctgaaggtggcctggtaaatgcccggctgcaaaatctgcacctgcgggtctcccggattatggaagatggagttacccactaccagtggcacatcggtgaagatcagatttccgcccgcagcaggggactggctggacggatcgaccgtcgccagcacatccagcgtaccgccgccacctggttcgccccgaggaattacaaactcaaatatcgcgttgttttcatcgccaatgttgatgacctgcgcatcggtcccgggttcgcctgtgatgaccgggcctacctggatagttgccgcaggacccgtggggccttccgcgcccgccgcgccttccgggccggtcgggccagtctcaccctgcgctcccgtatctcccgtcgggccagtggggccttccgctccagccgcgccttccggacccgtcgggccggtctcgccctgcgctcccgtgtctcccgtcgggccagtggggccggtcgctccgtctgctccatccgctcctgccgggccggtggggccggggcagcagcatgccggcgggcaaggcggggggcaaggcggacggcagcagttctgtggccggttgcaataatcgctcatatttttccactccttcgggatacatcttcccttttcttcatctataatatatggatagaaccctctccgcgtgcgtaacccgtacaccggccggtcagctgatcgctccatccatttttctgacggcgttccttgcgcaccgcactccggttcgtcaggccctgttcaccggcctcagcgctactcctaccgatcttctccccggcaatctcgcctgcggcgctcccccacggtttccagcgtcgcctcgtattgtatatctctctaattttcaactcactatgcaaaaggcgcaccccatcccccaaaagcgcggcgtgcgccttgccatttttatatatacgctaatgcttttctaaaatactcccgggcctgccccgcttctcccgccgcttacttcaccttctccaccgccgcgtcggcaaagctgttgtccaccagcccctcaaagggcacccgggccttgagttcgcccgcctcgtccatgatgtcctgcaggcgtccgaaggcctcttccttcatctgcggggtggccatccaggcgtcgatcttctggtagttctcggccacggtggtcaaaagcgccacatcgctgtccgggaaggagggggcgatggcctcggcgatctcccggggcgtagcgttttgcacccactgctgggccttgtagatggcccgggtataggcgccgaaaagctccggctcctttttcatcatttccgtctgggccacatatccggtatagggcacctcgccggatgcctcgccgatggccgctacaatggtgcccacgttctgctgctcggtctggctggccaccggctcaaacagtgccacatagtccccgttcccgccggaaaaggccccggccatcaggtcgaactgtacgttggtcagcacctccacgtcctccccgggcgttaagccctgtttgcgcagcacgtattccagcgtcatctccggcacgccgcccttgcgcccgccgatcagcaccttgccccgcaggtcgtcccagctgaattctccctccggggcctcccgggccaccaggaaggagccgtcccgcttggtcacctgggcaaacatgcgcacatgctcagtcttgccctcgttatacacgtacacggcgccctccggccccatcaggccgatctgcgcctgcccggccagcacggcggtcatcaccttatcggtgcccccgccgttggtcagttctaccttcagcccctcctcttcaaaaaagcccttgttcatggccacgtactggggcgcgtaaaatacgctgtgggtcacctcgcaaacggtgaccgtgcgcagctcatcccccgcaccgcagccggtaaagcccagcagcatgcaggcacaaagcgcaagtgtcagaaccgggcgcagcagattatgtaacgttttgttcataaaaggtatacccccttgcagtttagttttgggttggcctataatgtttatattccaaaggggccaaatgggttccttatggcaaggaggtaagtaatttggataaacgcacgacaaggttgatgatatggctggggttggccctggccctgctgggcgggtacctgctcttccagcagctggccacggccaaatttgtaggcggcacgttccttttgctggtggggctgatcctgatcctgggggatgtgatgatcaaaaacctgggggtactgatccccggcggcgtggccgtgggcctgggcggcgcctgggtggtgggttccctgggcggggtgccctatgtgcccgccccctcggtctttatgttgatgatgacggtgggctttttgctgatctatcttctgggctggcggcgcacgggcgtgtggcccctagtggtggcgctgtgcgtgggcgcagccgggcttttgagcctgctgctctacaacctggatatgtggaagctgacggagtggatcatccgctggtggcccctgacgctggtggccgccggcgtggccctgatcctggtgggcgtgctgccctcccggggacgcaaagcccaggtgcagccggaggcacaggcgcaaaatatccccgcgccgcaggcccagccggtaagtgaaggcgaggcgcagcccgccccgcaatccgatgtggatgcggacgcagcctcggctatgggcgcagcgcaggatgaggagcagaccaaagcccaacccgcggacacgcaggattaagcggtacaccacaacagcccaaaacacggcgcggcccatcaaaaaaaaaacgatgggtcgcgccgttattctatcgtatatatacttgttttttgcagacgcaccccgctcatttccataaaaaaccggccccctgtccggaagccggccttttaagcaactcgcgtttctttagctgttttgcgcctggttcaaccgcttgttgtagcgcatgcgggccagagaatccaaaatcttcttgcgcaggcgcaggctcttgggggtcacctccaaaagctcgtcctcccccagccattccaacgcatcctccagggagaggttgcgcggcggggtcaggcgcagcgcctcgtccgagccggaggcgcgcatgttggtcacgtgctttttcttgcacacgttcacttcaatatcgtccgtgcgggcgttctcccctacgatcatgcccgcgtacaccttctcgcccgggcctacgaacatggtgccccggtcctgcgcgttaaacaggccgtaggtcaccgtttcgcccgcctcgtgggcgatcagcgcgccggccgcgcgggaggcgatctcccccttcaccggctcgtacccttcaaacaccgcgtgcataatgccctcgcccttggtatcggtcataaacttggagcggtatccgaacagcccccgggaagggatcttaaactccaggcgcatcatggccccctggccgccggccatgttcaacatctcgcccttgcgccggcccatctcctcgatcaccgggcccatgttctcctcgggcacctcgatcaccacccgctccacgggctctagcatcttgccgtccacctcgtggtagagcacctcgggcttggatacctggaactcgtacccctggcggcgcatggtctcgatcaggatggaaaggtgcagctcgccccggccggaaaccttaaacgagtcggccgagtcggtctcctccacccgcaggctcacgtcggtctccacctcgcggaacaaccgcgcccgcagatgccgggaggtgacaaacttgccctcggttccggccagcgggctgtcgttgaccgagaaggtcatggccaccgtgggctcggtaatattcacaaagggcaacggctcagggcacgccgcgtcgcagatggtatcgccgatgttgatatcctcaatgccggataccgccacgatatcccccacctgggcgctctctaccggcatgcgcttgagcccgtcgtagatgaacaggttgctcacccgggtgcgccgggccgcgttgttcccgtggaagtcgctgaccaccacgtcctgccctacgcggatctcgccccgctctacccggcccacgccgatgcggcccacatagtcgttatagtcgatggtggagaccagcacctgtgccggcccctcaaaatcccccttgggcgcgggcacgtaatcgatgatcgcgtccagcagcggcagcaagctctccccgggggcgttgagatccgtggtggccgtgccgttgcgggcggaggcgaagataaaggggctgtccagctgctcgtcgttggcgtccagctccataaatagctccaacacctcgtcgatcaccgcttcgggccgggcatccggccggtcggtcttgttgatcaccacgatcacccggtggttcagctccagggccctgcgcagcacaaaccgggtctggggcatggggccctcaaaggcgtctactaaaagcagcacgccgtccaccatcttgagcacccgctccacctcgccgccaaagtcggcatggccgggggtatctacaatattaatacggtagcctttgtagtgcaccgccgtgtttttggacaggatggtgatgccccgctcccgctccaggtcgcccgagtccatcacccgctcctgcacggcctggttgtcccggaatacgccgccctggcgcagcaggccgtccaccagcgtggtcttgccgtggtctacgtgggcgataatcgctacattgcggacatcgttgcgttctttgatcaaaacttccactcccaattttctcaatccaaattgcttcatctaatagaacaacgcttattttaccctttcaaagcccgcaggtcaaatattttcgacaaatagttgattttgcggaatttgaaatataagaaggaatacgttataattcaaagtaacagatagctttttgttttcacaatatttttctaaaatacgactatttaaagagagggttatggttttgaaacgcaaagctcatctatcggttctcgtcgcactcctgatgattttttcccttttccctgtcagtgctctggctgcagaaacggttaccgttccaaacctgacgtttacaaaggacacgacggatgcggatatcgcagccgcctggggcgaaggcgcagccacgatcgcgcagaccggtgacggcgctttcctcgtaacgctgcataaaaacatcattttgaaggatggcgcgacgatgccgatcacctttggcagcttttcgcagggcgcgggccagcctatgatgatcctggatctgaacggttgcactgtgtccggcaaaaccatcgtcatctccaatatgggcaatttgacgataaaggatagtgtcggcacgggcaaggtggtatacgacggcggcgcatacctgacagccgtgaacaatacgggctattcgctgaccatcaatggcggcacctttgtgtgtaacggtgcaaacagcgcctcctataacgcggccatcagttcagccgccactacgactacggtgatcaacggcggcacctttgagggcaatggcgccggcgccttgatcacttacggcgagaccaccatcaatggcggtaattttaacggcgcttatggcgtggtagccaagaagaattcttcgggcagcgcgggcgtcgtggtcttcccggagggctctaaagcgcaggtgaccgcggacaaaatgacctttgtcgtagagggcgacggcacactggacggctcggtggtggtaaagggcggtaattttgacgccccggctattgctggcaaattgggtcaggcggtcccaacagaaaagatcagcatcacaggcggcaattttgcggcggatccttccggctacgtccctgcagatactgctgtagccggcttttctgatggcgatacacctgctgaaacttcgtatgtcgtcggtgcgggaaagatcgccgaaaaggcggccaacgcggccagcggcgatacgatcaatatcttatccggcgatgtcgcgcttgacattgcttctgacgatgtgaccgtggttaataacggaagcggcaatgtttctgtcaacgatgagccgcttgagaaggacggctccaccaccacctgcatccatgtatggggcgctccggtttggaactgggcggcggataacgccagcgccagcgctacctttacttgtgagaaagatcctcagcatgtccaatccgtaaccgcccaggtcaccgaacagatcacgccggccacctgtacttctgctggggaggccatttataccgcaagcgtcaccttcggcggccaggttatgaccgatgaaaagacagtgtccatccccgcggccggccatggcgaaactgtactgcaaaatgccaaattacccacctgcacggtcgaaggctatacgggcgatttggtttgcaaagcctgcgggcaggtcgtaacgccgggccaggccattgcggtgatcgcgcatagctatcaagatggtaaatgcaccatgtgcggccaggcagagccgcagacagccccgtcggggacgacttcatccacagataatggggcaggcagcccgcaaacgggagaaaataacctgacggtcatgtggcttgcgcttgcgctggtctctttgtgcggcgttgccggctgtgtcctttaccgccataaacaagcccattacaacaaataatataaatgccagttagtaaaatagcggggcggtgcaggccgtcccgctatttttgtatcattccgccttttaagggttaaaattgcgtatataggtttatttcttcaattgtatttgcttttagtttaactatccattataatgaattgaatcgcttgattaaaacggtttagtaaatcctttggaggtctgtatgcgttttaggatctttaccgactcatgttgtgatttccccaaaagctatgtggatgaacatgagatcaccgccctgcccctgtcctttatcgtggagggcaaggaatatctggatgattttggccagagcatgacgcctaaggattactatgccatgctacgctcgggtaaaaacggggtgaccagccaagtcaataccgagcggtttatcgacgcctttaccaaaagcctggaggccggggaggatattctgtacatcggcttttcctcggcgcttagcggcacctgctcgtccgcgatgctggccgccaaccttttaaaggataaatttccagaccgtaaaatttatattgtggattcgctctgcgcctcgctgggccaggggctgctgatccaccaggcggtggccctgcgggatgccgcccgccccatcgaagaggtggtggcctggttggagaaaaataagctgcgcctgaaccactggttcactgtggacgacttgaactttttaaagcgcggcggccgcctgtccggcaccatggccttcctgggcacgatactgggcatcaagcccgtgctgcacgtggatatggccggccggctggtgccggtcaccaaagtcaaaggccgcaggcgcgccctgcgttcgctggtggattacatggtcaaaatggccgacccggaagaggagcagaccgtctttatcagccatggggattgcgaggaggacgcccaggccgtggccgccatggtgcgggagaagttcaaggtcaaagagatcctcatccactttgtaggcccggtcatcggctcccactccggcccgggcacggtggccctgttcttcatgggcaagccccgggaggaattctgatcccgcgcgccctgtcagcgtactttaaagcgccgcatcgcatgatgcggcgctttttcatacccgctgaacttgtcattccgagcgcagcgaggaatcttctgcccaccgcacactgcaaagccccattacccaacccggcctgtctgcaccgcgccgccttatcccctccccgtcattccgagcgcagcgaagaatcttctgcccactgcacactgcaaagccccattacccaacccgctcccgcttccgttgccgtcgcgccccctttttctaaacttgtcattccgagcgcagcgaggtatctcttaacaaccgcttggctttgccttatatcccgctgcacgtgacaaatgcgctacccactgctaacgcacgagattcttcgctcggccttgtggcctcctctgaatgacaaatctgtcgcccttataaccgcttatacgccttgttttttgtatacgcctacgcccaccagtcgctttacctccctggcatcccgggcgcagtgcggtatctcctgcccaccgcttccccctgctcccgcctctccggcctccccccatcatcccctgcgccccaacttcccaaacgccaaaacggcgcagccccaatgggccgcgccgcacgtctatccgttattttccttaccggctgccgatcatcagcacccagcgctggtcaaaataaagctgtccctcccgtaaatacggggcaaacccggtcttctccccgcccgtcaactcgcattgcatcagtgctgcgatctgcgcgcgcaccggctggggcgtttgggttagctccatccaattctccaaagcgaccgggatgggtgtgctctcgcatttatccacccgcaggccgttttgcgcgtacagcgcccgcaactcctctacgctgcggttctttacgtgggagggatcccgcagggtctcgatccgatcctccaccgcccgcaggggctgggccgccgcttccatatcgatcagcaccagccgcccgccgggctttagcacccgcgccatctcctggaagggccgctcgatctgcgtaaagtggtggaaggccagacgggataccaccacgtcaaagctggcatctaaaaagggtagctcctcggcatagccgatcaccgggtgcagattccccagcccctcttttgccgctgcctcccgtcccacctccagcatggcgggcgtggcgtccaaacaggtcacgctgcgggcatagggggccagggcccggccgcaggcgcaggtcccggcggccacctccagcacgtcctcccccgcctgcggggcgatgcaggccagggtataatccaggtattcttttttggagaaattcatcttcccactctcaaagtccttcgcctgtactccaaaagaggcgcggatcgcctccagattctccggtttcatctataacgcacttcctttctcggggatatacagtcccatcatatccgtcccttccagctccagcagcgccgccttgcgccctacgcccccggcatagccggtcaggctgccatccgcccccaccacccgatggcagggcaggatgatggagataggattgtgccccaccgctccccccaccgcctgggccgaaaagcgcgtcagccccctttgccggccgatgatctgggcgagctgcccataggtccgggtctgtccgtaggggatctgggccattacctgccacaccgcctggcgaaagggggagcccgccggccgcagcggcggggtaaagtccggctcccgccccgcaaaatagacctccagccaccggcgggtctgctcaaatatcggcagctcgcgcgcctgtgcgcccgcgtccagcgtagcgccaaaatatttttgcccgtcaaaccacagcccggtcagcgcctccccatcgctggacagggtgatctcccccagcggcgaggcggcgcgtgcaatgtattgcatctttacacctcccaataccggttggaatcctccggcgcctgcgcccgctcccgcagcgtgtagcgccgcaccggctgcagtacggtgatccggtaatccgcaaagtccatctcacgtcctgcccgctggctctcccggtgcgcccggtggttgcgccacgccgttacgctctcctcgtcccgccaccaggacaggctggccagcttgcccgtctgtgccaggctggcaaaccgttccgccgcgataaagccttgcgtccgctccagttcctcccgcaatgcagatgcccggcgcagatagtcctgctgtccgcccgctttgatttctacctcaaacaggactgcgatcaccgctctccctcttttccatccccgccaaagcgggtactccgcgccttcctcttgacgcgtctttccatttcgcactataatcttatcacacataatcccataaaaatattagatcatcgccataaattatcgcaatatcgcaaatatcgttgaaagggagagcgtccatgcctgacgagcgccagtgttacatcaattcaatcaacctcaatgcccaaagcgatttcccctatctggtgctggatgtggctgccgggcgcgcctatccccgcaacccgggctttcaggtcatgcactggcatgaggatctgcaatttatctacgttttagcgggcgccgttcaggtcaggacgctggatacggccctggcgttatccgcgggcgaagggtgctttatcaaccgggatgtggtgcatcatgtgggccacagtatggatgggcactacaagagctttatctttcccgcctattttctggcgttttatcccggcagcccggcccgcgagctggtatcccgcatcgtgggccagccccagctgccgctgctcccgcttcgccctggcgggcaggatgcggcgctggccgtcctggcccgtctggccgctctggaagcgaatcggggcccgctgtacccctatcaggtcctctccgcgctgaacgcgctctatctggcccttttgcagggcgcgtcggccaaagccagccagccctcccccgtcagagaacggatgcaggcctttttgcgctacatcgccgcccattttggcgaggagatcaccttggaggaactctcccgcagcgccaacgtcagcaagtccgagtgcctgcgctgtttcaggctgagcatgggcaccacgccctaccgctatctgctggaataccgcctctcccgcgccgaggccctgctgcgccagagcgacctgcccatcggcgagatcgccagccgggtagggttccatcaggtcagccactttggcaagtgttttcgccagcggaccggctgctcgccccgggagtaccgccgcagggggcgcggcgccctttaggcccctttctcccctgcgcatccacgcttgttcccgccccgcgcttgtggtaggatatggaggtcgatcatggggagggagtcctgatgaaaaaatttttgcgtttttgccggcgggaaaagctgctttgcatctccgccgccctggcgctggccagcatgttcgccgtgccgcccagcgccgcctacgccgggtatatcgacctgcgggtgctgggccttttatggtgcctgatggccgtggtggccggctttcgggcctgcggcacctttgcctggatgaccgcgcgcctgctatcggccgcccgcggcaacggacgcgtgctggccgtggtgctggtgctgctgcccttttttaccgccatggccgtcaccaatgacgtggcgctgatcgcctttgtgccctttaccctggtgctgttaaagcgggcggggcaggcccgcgcagccatccccatcgtggtgctgcaaaccctggccgccaacctgggcagcatggccaccccggtgggcaacccgcaaaacctgtatctgtacagcttttacggcctgaatgccggcggatttttcgccctgctgctgccgccggtgctgctcagcctcatctgccttaccgcagccgcgctgcccgtattgcctcgcgcggtgcctactcccgcactggcccccgcgccccggcctgccgcccggcttttggccctgtacggcgggctgttcgggctttgcctgctgtccgtcttcggccttttgccctggtgggtgctgaccgggctgatctttatcgccctgctgggctttgaccgggcgctgctgcgcgcgccggattatgggctgctggccacctttgtgtgctttttcatcttctcgggcaacctggggcagatcgcgtgggtccgcacccttttgcaggatctgctattccgcagcacgctgattaccgccgcgctggccagccaggtcatcagcaacgtccccgccgccgtgctgctctccggctttaccgccaactggcaggggctgctgctgggggtcaacatcggcgggctgggtacgcccgtggcctctttagccagcctgatctccctcaaattctacctgcgcgagcctggcgcacagccgctgcgctaccttgtggcctttaccggcgccaaccttataggcctgctgctgcttttaggctgcgccctctgcctttgaccggccccctctttctcccaaacagcaagcgccccgggctttttgcccggggcgcttattcttacgcctggccgctgatcccgcccgcagcccgttcccgcagggaacgggcctctttgtagtaggcaaaaaacagaaacaccgctgcccccagccaggccatgggctcggcaaagaagatgccaaagtcccccatcagcctcggcaatatcagcgccgtgcccacccggcagataaactccatcaccccggataccatggccgccgtggtattgcccagcccctgcagggccgagcggtaggcgtgcagcaggtagagcacgatcaggttacagcacatgataaacagatattggaaggcgatatctaccacctgccccgcgttcgcctccgtggatgaaacgaacagcgagaggatgggccgccccgccagggagaccagtatccccgtgcccactgccaccacgagggagagcttgaccatgcagcgcatgccctcccggatgcggtcgtgccgcccggcgcccaggttctggcccatgtacgtggtcatggagtagccaaaggcgatggccgcgctctccatcaggccgtatatcttattggtagccgtaaagccggcgatgtataaaaagcccagcccgttgaggaccgattgtactaccatcccgcccacggcgataaaggcgttttgcagcgccaccggcagccccagccgccacagccggcccaaaagcggccaatccagcgcaaaatccgcctttttcagccctagggccggcatgcgccgcatcaccagcaggcagtaaaggaaggagaccccctgcgccagcaccgtagccaccgccgcgcctacgatgccccagtggaacaccatcacaaacagcagatccagcgcaatgttggtgcccgccgccaccgccatggcgtaaagcggcgtcttgccatcccccagcgcccgcaggatgccccccgccaggttgtaggcaaacaccaccgtcatcccccaaaacatggtggtgatgtattccatcgccccggggaagatgtcctccggcgtgcccagcagcgtcaaaagcggccgggccagccccagtcccagggccgtcagcaccaccgatagccccagccccagtatcacgctcatggccacgccccggcgcaggccttgcagatcccccgcgccaaagcgctgggccgccagcaccgagaagccctgggcaaacccctgggccatccacagcagcatccagcaggtccaatccgtggcgcccagggccgccagcgcgtccacgcccaccccctggcccaccacgatgccatccaccaccatgtaaagctgctggcccatgttacccagcatcagcggcagggcaaaggtcacgatcagcttcagcggccgcccgctcgtcatatccttgacccgttgcacgcccatccctccccgtcttatcgtcgatttcgcggggaaacgctccccccgtcggataataataacactaaaaataactattgtcaaaagtcgggattcagctccctcgtaccagcgcaatcccgggcgcattgccgctcctcgcgcggggaacggccgttgcaggccttccaatcgcctcctgctacgtttatttcaatccgcgcttcccataccgccctttctgccctgtcattccaagcgaatgcgaggaatcccacggcctccgctttctcctgcccgcactgccgcagcctggtacccccctgcgctcagccttgttccagagattcttcgctcggcctgcggcctccctctgaatgacggttcaccttttaaccgtgcaagcagtattcgacctgcgcactgcgcccaattcaccccgcctacttcgctctattcacctacgcctatcgctccaccgtcctgtcattccgagcagggctagcgccccttagccgctcatgcgccgcgcatttgctcacgccttgcgcccgccaggggctttacgtactctggcattccaggcagggctagcgcccctttagccgcccatgcgccgcgcatttgctcacgccttgcgcccgctaactgctgcggtaccttgtcattccgaagtcacaggcgcggaatctcacggccaccgctttctcctgcccgcaccgcctccgtccgggtaaagtgcccacaccgcctcaccccagcttccccttctccctcgcctccctctgacgagagaggtggcaggcatagcctgccggagggagagattcccacggcaaccgctcggctatatctatacctcaaaccgaactggtcaagcagcacgcccctgtcaacgcgctagatttttcgctccagcttcgcttccgctctgaatgacggggctaacctcctattaaccgctcctatgttgcacagaacgcctcgcggcatgggcacgccgaggactttacatactctgtcattccgagcagggctagcgccccttagccgctcatgcgccgcgcatttgctcacgccttgcgcccgctaactgctgcggtaccttgtcattccgaagccgcaggcgcggaatctctcggccaccgctttctcccgcccgcgccgccgctgcctggtacaccccccgcgccttgtcactctaccgccttgtcattccgaagccgcaggcgaggaatctctttacactctcttggccccgcccgcgccccctctacccgggtaaagtgcccacaccgtcttactccagctcccccttccccctcgcctccttctgacgagagaggtggcaggcatagcctgccggagggagtttcttgccgtgcaccgcaagtcccgttaccgggtgcctcccgcttgctgtcgcgccccatttttctctatttaacccgtcattccgagcgcagcgaggaatctctttacaacttcttggcctcgaccgcatcccaactacataggtcaggcatcgctcccctgccaacgcatgagattcttcgctccagcttcgcttccgctctgaatgacaagtcaaaccttttgcccctgggccgcccgcaccgccgcggccccggtataacatcgcgccaaccggggcctaccgccggtttccctcaagcatctaccacggctaggacttttgcctgtgggcccgccggtagcccagcggcgccactccgtactttttgcggaaagccttggtaaaggccgcgggcagattataccccacgctgtagcacacctcggtgaccgataggtcggtctgctccagcagcccggcggccgcctccaggcgggtatcggcaatgtaccgggccggggataccccccgccccgccatgaataccttataaagatagctgcggctcaagcccacctgccgggccacgtccgccacggtgatctcgtagggatagttatggcggatataggccatggcccgggccagatacccggggccctccccctgcgcgcccggctcctgggcgatcaacccaaaggcggaataggccagccccagcagcgcatagtgccccttgccggcgccggcggcctgggccagctcccgcagcgcctctccaaaggctgggcagggctgcggcaggatgggctgctcccggctaaagccgcaggcgcgcagcatctcttcggcgtcctccccgtccagccccacccagcaataggtccaggggtcctgtccgtccgcggcgtaataggtggatacccccggccagatcaaaaacgcgtcccccgggccaagggcataggtatgcccctggcaggtaaactgtccccggccctttagcaccgcgtgcaccaaaaagtgcgcccgaatggccggcccaaaggcgtgccccggcgcacaagtctgctgcccgcaatggtatagggccaaaacgctgcccgtgggccggtccagcagaaagtcgatcccatcgatcacgcgcatgccctttcgccccctttttctctaaggatagcacggccccttccccgcgtccagggggatccctccctttatccgctcctatctttctgcgccttcacgtacccccgcccgccagtagcttccccggtatcccttgctcccctgtccaggaggataccccccgttatccgctcccgctttcctgtgtttcacgtatcctcgcccgccaacggctccactctcctgtcattccgagcgcagcgaggaatctctttacaacctcttggtctcgaccgcatcccaactaaacaggtcagttattgctcccctgccaacgcatgagattcttcgctccagcttcgcttccgctctgaatgacaagcctacctttcgccccctgggccgctctcctgctccaagtccacaccgcggcactagggtaaagcacacccttctcgtctccctcgtttgagggaggtggcaggccccgcctgccggagggagttttctgccgtgcaccgcaagccctgttacccaaccttctcccgcttccgtctgccgtcgcactccctttttctaagcctgtcattccgagcgcagcgaggaatctctttcctacctaatcgcccggcctacaccacagccgcccgggtcaaccgcccacccccaggcttacaccctcttatccgctcctactctcgcgcgtttccgcttgcccgcggcccgccagcagcttccccggtgtcccacactctaccgcctcgcccatctgccctttccttgcctccctctttgagggagggggaccgccgcaaggcggtggtgggagttccctccgccagtatttttttactccccgcccgggataccgtcattcagagcgagaccctggccgagcgaaggatctcccgcccccccagcgctccgcatcttcgcgccgcccgccaatgcgcttcttcgcggtagagccgctgctcttttgtccggctattatatgttgctttcccagctccagcacccgtcaaaaacacccccttcgctctaaatgacgccccaccacccctcgcctaatctctccccttttcccccgctttcatacaaaaaacccccgggccttttcgcccgggggccttgcttgtccttaccgcggctctagccccgcgcttccctgcgccgggtcaggtaaaaggccaccgccagcactgcgcccagcagcaccaccgatacgcccagcgtgataaacaggttctccgtcagcccggccaccaggtagccgataaagcaaacgatcgccaccagcgtggcataccccatctgggtggacacatggtcgatatggttgcaccccgcccccgtggaagagaggatggtggtatccgagatgggcgagcagtggtccccatacaccgcgccggccagcgtagccgccagcgaggggatcaggtagggcgaattcgtcccgcagatgatcaccacgatggggatcaggatgccgaacgtgccccaggaggtgcccatggcaaaggccaaaaagcccgccaccacgaacacgatggccggcagcagctgcaggctgatgttactggtctgcaccaggttgcccacaaactcgccggtagagagcaggtcccggcacatgcccgagatggtccaggccaggatcaggatgataaacgccggcaccatggatttgaccccctgggtgatgccctccataaagtcccggaaggagagtaccctgcggggcacgaacagcaaaaacgccaccaccagcgccgcaaagccgcccaacgtcagcccggccgaggcgtccgtgttggcaaaggcctcggcaatatccgccgcgccgccggtgaacagcccgcctacgtacagcatccccaggatagagaagacgatcagcgccacgatggggatcaccaggtcaaacaccctccccttgtcggagatcttggtgccgtcaaactcctcggtggattcgatggccccctcctgggcgtccaggtccccctgctcttgcgccttgcgctcaaagcggcgcatggcgccaaagtccatcttggtaaagaccagcaccaggatcatcaggatcgtcaaaatcgcgtacaggttataggggatggtctgtacaaaggtgcccagcccatcttcaatgcccgcatcggtcataaagcccgctaccgccgccgcccagctggataccggggcgatgatgcagatcggcgccgcggtggagtcgatcaggtaagccagcttggcccgggagatacggtgcttgtccgtcaccggccgcatcaccgtgcccaccgtcaggcagttgaaatagtcgtcaataaagatcagcgcgcccaaagcgctggtggccagctgcgcgcccgtgcggctcttgagcttagtcaccgcccactggccgtacgcccgggagccgcccgccttggtgaccaccaccaccagcgcgcccagcagcgccaaaaacagcaatataaagctgttgcctcccatcttctcggccattacgttaaaggtcacgtccaccgcgccgatcacgttaaagcccgtatagatcagcccacccgccaggatgccgatgatcagcgagctgatcacctccttggtcagcagcgccagcacgatggcgatgatgggcggcaggatggataaccatccgcagtcgattgcctccattgcataatccccctcttttttcatttgcttccaaaaccgcccggcgctcccacccgcccggagggttttggaacagacttgtaaaactacccctagcataccatggggtagggaaggcttcaaggttttctgccccattttctgccacatttcgctataattcttttcctgtccgttggaacgtgtacagcagttacgcgcccgcgccggtttcggtataatttaggggtgcgctgcgttcccggggcgatatatgtaaaccgccttgaatgcggatcaatatgagagaggatgactgaaatgaaaaagcgtcttttgtcactggccctgctggcctgccttgcagcctttgcgttaacgggctgcgccaacttttccacctatgtgtcctatacttatcagttggataacggagacgcagtcgcggtcaagctggacaccaccgatggttataccttctcgcctgatcccccgttttctgtcaaaaaggacggccatgtgctcagccgcggcgccatcatcaccgccgatgaatacgacgcatacctgcaggcggtgcaggccgatccctccgccaccatactggatagcggtaagggcaatgacatccgctataccttttacgcctatggcgatgccgagtttgatcatctgatcctgatctccggctccgaaaccggtattctgctggccaacccaaactcccaggaggaggcgcaggcctgttttgagcggctgaccttccggcccgcccaatagcggccgccattcctggccctgtctttaaagcaagaccgcgatccggcaaatcggatcgcggtctttttgctttgccccatcagccggtgatcagcgtcagaatctccttggcatttcaacccgcgctccccttgcagggagcgacaaatgccgggccgtcctgaaacaactcacaggtagtattacaatccacgctccccgtgtggggagcgacgaaaccgcctatcacacggtctgcaacgactgcaaatttcaatccatgctccctgcgtggggagcgacggaatacagtatacccatatgggatcatcataaagatttcaatccacactccctgtgtggggagcgactgcccgcactgtgggcgggtgcatatcacgcgaggatttcaatccacgctccccgtgtggggagcgacgtcatcattgtttcgcggaatttatcatcgttttatttcaatccacgctccccgtgtggggagcgactttaaagcgaggaggatcaaagatggtcattaagatttcaatccacgctccccgtgtggggagcgacgactctcgatctgcgcccggcgctccggtgtaatcatttcaatccacgctccccgtgtggggagcgactaagtctctgcgggcacaggcgcgggcctatgacaatttcaatccacgctccccgtgtggggagcgactcaaggacaaaaacaattattttggtgctattgatttcaatccacgctccccgtgtggggagcgactcaaggacaaaaacaattattttggtgctattgatttcaatccacgctccccgtgtggggagcgacagtatccggtacacagggtattttgcgagcagaatttcaatccacgctccccgtgtggggagcgacaaatgggcccaaaaacgtacatcctgcagagtaaatttcaatccacgctccccgtgtggggagcgaccgcaccacggctagcctcttctttagtaaaaacagatttcaatccacgctccccgtgtggggagcgacagcaacagcttgtattttgccgctgctcatctacaatatagcccgttttcatggagagtgcaaccataaaaaaggtccgtttctctaaatcatgtggaaaatatggtgcgaaaccgccgggaaaagtctgtgcgcttgcggttcgcaccccaagggcctacagcgggtcgcaaaatactgcacggcgttctcttaaaatacaaaaggcttgcgcctgcggccccgtgcgccgcgggcggccgcctcgctggcgtaatcagcacgtttcacgcgcgcccccatcctcatctttcgtcccatttatggaaatggaagtgctggggcatatcaacctattgatgctatggaaaagccgttgccagacatatcgcttgccgcgcggccatttgccggaacatgctccccgcgcctttggatacggcttctagcttgttcagctcgctttgagcaagcgcctcttgccggtcgatctgtttgagttcttttgtcgcctgcgacatgacggaggacatttggctgattccagctctgtatatccctttgcgatgccaatatcttccatatgcccacctcctgacctaaaaataggcataagaaaagccgctgcataacacagcggcctttgttgcgcctacttctaaattgttttaatactcccaagcttaaaaattaccatcggaattctcgacgttgtgagcaggcatttcgcttctacgccgtttatcgtatagtccttttcgtaaacatctactcccagccccattccgccgtcatcaatcagtgttccatccgtaaaactcatacgcaccgccatgtcggacgcactttcaaaatcctggccctgcaagcaagccataagaaaagcgcttgcgattcgcagctctatatattcgccggtagaatctattttagtggttttcgcctctgctccgactacacgttgcgtggcggcgttaaagtatatcgtaatttccacatcatcaaaattaccaatgtctaaagttatatgctcgttaaatatattatcttcatcataatctttaatccctgcgtaaagtggcggctcaatttgtaccccagttatcgggatctgatgatagtcattatttacctcgttgtatctagcaatgaattgcgaaatggtcaggttgaaactttcatcatcagcgtcccataccatcggctgtgcagccgcgcccgcttgcccagggcaatatagtgatatcgtttcaaaaatgtcggtattttcctcagcgctgtattttcctttgcggtaccgaactccaccttcatctcgtacttgattatattccgtcaaccccgctacaagtttctccgcctcttcgatagcgtttccatccatcatgcttgccagcgtgcaacaataagcttcataggtttcccctggcgtgcctataattttagcgccgtaaatcaacccattatattccctatacgtaatagtaaactctacgccgtcagataatactgctttagactcaataagatacggcgctgccttttcatctttttcgacttcttctacgcacaataagccattttctacatgagcattaaactcacttataaaggaatctaccgtcaaaagaaaagtcttattcgccggataatacgattcggatttcagttgaaccatctgtaaatttccgccccgttcaccctgcaatatgcctactgcgcatcccgaagcataaagacaacacagacatgccatcgcgcaagctatccatcttttcataggtagctccctcctcatgcatatagtataccctaaacatgtatgaggagggtacaccctattcaccaatattcccgtaaatatccgcaaagctggttaccttgtgctcaaagaccggactttctctgtcctccagctttcgccggataaagtgtattcaaattttacaagcgcaaaaaaatcccgcaaccatgcacgattgcgggatttttcctatggagccaatgagcggactcgaaccgctgacctgctgattacgaatcagctgctctaccaactgagccacattggcacgccaatccgcctccatcaaggccgattgcaaaggctattatagcataagcgccgggtgttgtccagagggtttgcgcggatttttgtacatggccgcacatacaaaacccgcccgcatccgggaggacatccatcgccatttccatttgttccccttcgcgctctttctgctgctttaccaactccccgcatcacccattcatcctcccagcgcagcctttgatccctcgctgggaaagccgcttgtcttgcttaccgcctttccgcccgcgccctcatcgctctttttccgccgcccgcttttataccgctttatcccttccccgcatcaccgccctgcgccccggtgtttttccgctgcgccgctctctgccgcttgatcccctcccgccgcaggatgcgccccagcgccagcgtcagcaacagggccgcgcccagccaacccacgccgtcggccaggtacacgccccagcgccccagaaaggcgggcagcgtcagcaccgcccctacccgcagcgccagttccagcaggcccgcacccataggccatagcgcgtcccccatcccctgcagcgccgcgcggtggatgtaaagcaggtagagcgccggcaaaaataacgccatccccagcatcgccccataacctaccgataccacggccgccacctccccggcctctccggccaccagcagggcgagcagtccccgcccagtccccgccatcagcaaagcgatgcccaccgccccgcccagcgccatgcgccggcccatgcggatgccctggcgcacccggtctctccgcccggcgccgtggttctgccccacgtacaccgccaccgcgccgtccagcccggcgcccaccacctccatcagcgcaaaataccgccacgcggccgccacccccgccacggtcaccgcgccatagccgttgatcacccgctggtagatcagcccaccaacggccatcaacccatcccgcagggccataggcccgcccagggcgaagagctgccgcgccaccgccccgtccatccgcagatcctcccgcccccaggtgcacctgcgcaaaaccccgcaggcgccacaggcaaaacagcagcgaaaagcccgggccagcaccgtgcccagcgccacccccgctacgcccatgcccaaaaaggcaactgccgcataatccagggcgatgttgagcaaactggacaggatgcccgcgtacactgggcttttgctatcccccaacgcccgcagtaccgccgcggcaaaattgtaccccatcaaaagcggcgtgcccccaaagagcacatacagataaagctgtgcatccgccagcagctccgggggcgtatccatggccggcagtgccagcgcggccagcgccatgcccagcgccgtcagcgccacgcttacgcccagcgcgcagcccacccctacgcccacgctcttgcgcaagcccgccgcatcccctgcgccaaaccgctgggcgaacaccgtaccaaagccctgggtcagccccaggatcgcgctggtcaccagccagctcaaaaacccggccgcgcccaccgccgcaaacgcgtcaatggagatcagccggcctacgatggcgctgtcggccatgttatagatctgctggaacacatgccccagcatcagcggcagggcaaagccagccagcagccgcgcagggctgccctgggtcatatcccgcgccttggccataaatagcgcctcccttttattccatttaaatgcaacgtactgccaggcgcgccgcccagcctgatgaaaagatgatatgcgtccatatagaagcgttatgtgccaaaagataagcctcgtctagcgatattgagccgtttttttaagtttatcatctgtccgaggccacccacaagcaaaaagcgccgaaggatggcccccccagcgccttttcgcccttttgcacaaaaaccgcagctattccttgtcgctttttacgatctgtttgatcgtctggtcaagccctaccgccgtccatccggcaaagccgcccatcatcaggtaatagggccagccctgcccgcccagggcaaagggcccgtagcacagccccagcgccatcccgcagatcagcagcgccagcgggatgccccagtccgggaaccggggcagctttttcagcgccgcccccagtccgtataaaaatgcggctatcagtgcgaactccggcgccagcatttgcgttagatccatctttctactcctcttcctttctccgcttgctctctttgcgcaggataaattccagcgcccggcggatacgccgcatctcccgcaggtattttgcctgtcgcaccgcgtccgccgcggctaaagtcgccaccagcagcgtcagcgcccccagcatcgcctccagaaccccgttcaagtccccgccacctcctgcctacgcgcccggcgcgcatcgtcaatgggctggcataccatctgcccgcccggcgtgcggcacaggtaaaaccgcggataggccctgagcacctgggccggcgtctttttaaacgtgcctgaaatgccaaaaagctgggtagaggggtaatccaccatcacccaatcgcccacggcgcgcagccgggccgcctccacgcgcccgcccggcttctcctctaacgtcatcttccttccccctttgcgctttgcggaggccttttgtacattttgtgtaccgcaggacagcaacacaccgcttcacccccatgccgtgcacaaaaatgcactctccggccttatttccgcatccacattcttcagcaaccttccccacaggccaccctatatactattttgtggacaatcttatcctagcacttttaggagatatcgtcaatattgtggactaaattctggtaatattttaataatcgttgattttgtgtactccctttggtatactgatcttaatttgaaggagtgatcgccttgacccaaaagaattctgactttcagacccgtttaaaggaggcgctggccgcctccccacttagcgccaccgccctggccgataaggtgggcctgtccaagcaggcaatcagcgcctatacaagcggcgtgcgcgaacccaaacgccccacactgcgcgccctggccgaggctctgggcgtgggggaggactggctggctggatacgacgccccgcgcgcccgccccgtgcccgatcccttcgcccacatcgcggggctggagcccatgccccagctgcgcagcgttccgctgctgggcaccatcgcctgcggcacgcccatcctggcccaggagaatatcgaggatcaggtatccgtccccgagtatatccatgcggacttcgccctgcgctgcaagggcgacagcatgaccggcgcccacattcgggatggggatatcgtctacatccaggcccagccggatgtggaaaacggcgagatcgccgccgtgctcatcggcgaggaggccaccttaaagcgggtgtataagagcaacggccagctcaccctcatcgccgagaacagcctgtatccccccatggtctacgccgccggccaggccgaggaggtacgcatcctgggccgagcggtggcctttaccgcgcgggtgcgctagggcataaaagggccggggcgggcagccgcccgctccggcgtcctccaaacgactttagcgccctttgcgctgggcggcgatgtccttccacgtcaccgccggatggtggtaccgtgggcgcccgtccgcgctgccaaagtgcgggtaatccttatagatcgccttttgcgggcagaagtggaagcaggcaaagcagtaagcgcagcggtctgcaaactgcagcgcgccctcgcgcagggcgatattctccatagggcacagcctggcgcacagtccgcagctcgtgcaagcctctccgtttacgcgccaggggccaaagggctgctgggcatatttttcgcgcacggcctgggtattgttatccggggaatcaaagtcctccacggtgcccacaaagcggtcgttgatatttttggccatcacgtcgatccagatcttggccagctccaggcgctgggcgttctccgcctcgttgctgggcaggcagttgccgggcatatccagcttcctagcgtaggacagggcgtagccctgctttttcaaaaagcagttaaaaaggtccgtacaggtgccgccccgctcgttacaggtgccgatggcgtacaggtacacgcccttgggtatgcgcatcttctccgccgcggccatcatgggccagggcgcctgcccgccgtagaccgggaagataaagcccacggtctgctctgcgtccgcaacgatgcacgcctcgtccacctcgcgggccaccggcctaagctcggtttccccctccagcttttgcgccagcatccgggctaccatcagcgagttgcccgtgccggtaaaatagtagatgatattctccatcgcgatccctccttccaaaagtatagcacccgcgcgcggggtttacaacatgttatctccatctgcccgccgcctgccgccaaccgctgtttgcgcccgcacaccgaaaaatttgctttcgcatcttgacgaacgcgcccaaagctggtatattataaatcgtcctctttatggtgctttggctcagttggtagagcacatcgttcacatcgatggggtcactggttcgagtccagtaagcaccaccacacaagaaaccccgcaatcatgcacggttgcggggtttttgtttaccaaaaatcagttagaataacacactaaataacacacttgggtaaaatagaagagccggagcataaagccccggcctctgcttttcgaaatccatttatagtccgttttccgtagcaccgtgctcggcttgctctcgggtaaactgttcatactctaactgctcgatcaagcctttgcgggagaacgcggaatactcaaggtaatctttccccttttttacggcctgctcaaaccaatccgccccgcagttatccgcaccatacgtggcatcttcagtagaaaatccttcgtattccagctgcccgatcagtcctttatatgaaaacgctgagtagtccaaatattcttttgcttttcggagcgcgtttttttggcttacggtttctttgatagtcggctcggcggtgggtttggcagtgggtttgaccgtaggagaaggcgttaccggggccaccgtcggcgtaggcttactttttgcggtggcactgctggacgcacttgccgtcggcgtaggttccgccgatgaggacggagcgaacacggtgtcggatccacacccagtaaataacagcatagcggatagggagacggcgcagagtaacagggcctttcttttcatggcgattctcctttgtgatgtgtttttaagatgtgtttatcaacaatatactgccgctattcaacaaagtcaaccaaaaatgaggcgcttttgctgtatcactagaacttaaaaagggggtaaaatagggattataacccccggtaagtatttaatttatgcaaatcaaaacgattcacagttgatcagtataacttatagaacggatgaatagaaataaaacgcacgaatcgtgcttttttattgcattaaacgcacggatcgtgttaatataacaagtaatggggtgaagaaatgtctaacatcggtatcaaagaaaacttgattgtcgaatttaaaagcgatctcgcctacttgccagataatgacattattgatgctgttgtggcatttgctaatactgacggtggcgatttatatttaggcgtagaagatagcggagaaattacaggtctccacaaagatcatatggacacaactcggctgtctgcatttatagccaataaaacggtaccccctgtttcagtacgcacggaggttctggacttggatcgcccagtactgaaaatttctgtgcccaagcgaacatctattatagcgtcttcctcaggcaaaattctacgccgccgaatcaaggcagatggtttgccggaaaatgttcccatgtacccttatgaaattgcatcaaggttatcttcacttagcctattggattattctgctcaacctgttccggattcagactattcggatcttgatccgatagaacgcgaacgtctgcgaaacatcatccgctcgtatcgcggggagactccgctattggaattggatgatataggtctagataaagccttgcagttcgtaacaatgcaagacggaaaactggttccaacattttgtgggctgctgataatcggaaaggccgattcattaaaacaccatatgccgacagcagaagcatcgattcaaattttggaaggaaccgatattcgtgtgaatgaatcttttttcctcccgatcttggcagcattcgacaaaatagtggatcgtttttctgcttggaacggcagcgaggaaatagaaatggggcttttccgcataacgataccagactacgatcttcgtgccttcagagaagcactggtaaacgcgttttgccatagagattattctgtgctcgggcgtgtgcgtattcaaatcaatgatgagggcatgacaattaccaatccgggcggattcatcgaaggaatcacagtaaacaatctcttagatgccgagccgcatggaagaaatgttgttttggcaaacgcactgaagcggataggactcgctgaacgcacgggacgtggtattgaccgtatttatgagggttctctgctgaatggccgacttttaccggactactcaaaatcaacggcaaccagagtggaactattcattccaaaaggtcctactgataaggcgtttatacaaatggtttcgacagagcaaaagagattagggcgttcgttgccaatttattctctgctggttttaaatgcactaaaaaatctgtccagagcatcaatccgcgatgtggcagaatatctaaacattgatgaaagcagagcccgtgtaagtctggaaactctcgcagattccggtattatcgaggctggtggcaatgggcgtgggcggtattatatgcttggtgtggattactatcgcaacatagataatcccaatgaatatatacgccgaaaagacattgattccattcgccacaatgagctagtgttagagttagcaaaacagcaaaagaccgtcagccgcaaagatgttgttgacttgctgcatattacaccacctcaagcttatcgtttattgcaaaaactagtcttggacgataagttgtctctggttggccgtggcgcaggtgcaaaatatgttctaaaataaatacacgaaaagcaacaaaaacgcacggcgtgcgttttttgttgtgttaacctttgccgctattccgatgttacttatctgtgtaccggcaggcgcgccggcaaatagtttgcaagggtttaacagtgctaaacattcttaatgggcgcggaaaatcaaagcgttgatatgtatcgttccacatgaagctgatcaggaggagggattcatatttttgaatttgtattaacctttatcactattccgttgttacttatttgcgtaccggcagccatctatggcttcaagctccgcaaagcaaaaaagcgggttaacaaatagtttgcaaagtcttaacaattcattttatcccagttgtagtatgatgttaaaagcaacgacatgggaggcgtatgttccgtatgaaaacgcataagaccatcacccttttgaccgcttgggtctgcgccctggcctgcatgtccctgcttggcggttgcgcggccccggcgcagccctcgcccagcgcgacccccgcggcatccacggcgctggcctcgcccgcgcctacccaggcgccgcagcccaccgccaccgtgcagcccaccatccagcctacagctaccgcacaggcgcaaggtgcgcttttgcccgatgcgctccccctggagttcaccttttccagcggcgccggcggctggggtaccgttttgaccctgcagccggacggcacttttaccggctcatatcacgattctgagatgggcgaccgggatgaggcccgctaccccaacggcaccgtctacgtgtgcaccttcagcggccgttttgaggacatccggcaggtggatgaacacacctatgccctgacgctggggaaggtcgccaccgaaaaacccaaggatgagacctggatccaggacggcatccgctatatcgccgccgacccgtacgggctggaaagcggcaagtccttcctgctctatacgccggaaacgccgctttcgcaccttccggatgattttttgagctggtggcccttgcgcttttcccaggatggcagcacgtcggtcagcggctgatgctacgggctatacaaccgggaggcgaactacggctttttcacctacgaatcgtaaacaccgggacgctgcaccgccgcgcaggccgttatggcctgcgctcttttttaacccgcagatacgtcttgacaatgatccgaaatcagactataatacaaaaaagtccgatttcggatatttttatttgaggaggatccgttcatgcgccatgcaagggcccgcaaacggctaaacgagtataacgacctgtttaaggaaaacgacgagatctaccgcgcggcggccaaacgcctgggcctgccggactgcgccttttggatcctttacaccctgcgggagagcagcgcccctttgacccagagcgagatctgcgccgccctctaccagcccaagcaaacggtcaactccgccctgaagcatttggaggcggaagggtatttgcagctaagcagcggcagcgaccggcgcagcaagcaggtgcgcctgaccgagcgcggcctggccctggccgagaataccatagaccgggtgctggccgcggaatgcagcgccctgctggatatgagcgaggaagagcaggccgcctttatcagcctgctgcggaaatataccgagtcgttaaaggcacggatggacgcgctttagcctcggtcaaccggccgcgcgcggcctttaggagaggataaaaatgaacattcgtctgagcgaccatttcacctataaaaagctggcgcacttcgtgctgccctccatcatcatgatgatctttacctccatctacggggtggtggacgggctgttcgtctccaactttgtggggaagaccgcctttgcctctttaaacttcgtcacgccctttatcatggtcctgggcggcatggggtttatggtgggcaccggcggcagcgccctggtggcccgggagctgggccgcggcaaccgggaaaaggccgaccgctactttaccatgatgctgatctttaccgtgctgctgggcctgctcctcacaatgggcgggctgctgttcgtgcgccccatctcgcttatgctgggcgccaccgaggccatgctggaggattgcgtgctgtacggcagcatcgtcatctcctttaccaccgcctttatgctgcaaaacgtgttccagagctttttggtcgtggccgagcggccccggctggggctggtctttaccgtggccgccggggtgaccaacgccattttggacgcggtctttatcatcggctttggttgggggctggccggcgcggcgctggctacgggcatcggtcaatgcgtgggcggcctggcgccgctggtctactttctgcgaccgggcgccaacctgcgcctgcataagaccgggcttgaggcgcggcccctgctcaaggcctgcgccaacggctcatctgagctgatgagcaatatctcctcctccatcgtgagcatgctctacaacttccagctgctgcgcctgatcggagaggacggcgtttcggcctatggggtgctgatgtacgtgcagtttatcttcatcgccatcgccatcggttacgccatcggcagcgcccccatcgtcagctaccattacggcgcgcagaatcacggggagctgaaaaacatgctgcgcaaaagcgtgaccctggccgcgggctcgggggtggtgctcaccgccctggccctggcgctggccggcccgctggccaagctctttgtggggtatgacccggggctgtacgccctgacggtgcacgccttacgcctgttcgccttctcgttcttgctggcgggcttcaacatcttcgcctcgggcttttttaccgccttaaacgacggcggcgtttcggccaccatctcctttttgcgcacgctggtctttcaggccctgtcggtgctgctcctacccctgatcctggggatcgacggcatctggtgggccatcacggtggccgaggtctttgcctgcctgatctctgtgatctttcttgcagccaagcgcaaaaaataccattatatctgatcctccgcgccccggcagctgccggggcgttttccaatttctggcggcggcgcggggcgctttcttgccccccaacgcccccgcgccgtggtataataaattttaagcagcccttgcccgggagctgcgtccgcctgcccgcctgggcaggatgatatcgtttagtaatgcgcgcggccccaggccgcgccctatcttggaaaggagtgccccgcccatgaccgatcacacccagctttccatggcccatgaggaccgccgcatcaccgatccggccctgatccgcgcgatcctggattccacctatatctgcaccctttgcctgcacgatgggccctatccctaccccgtgcccatgaactttggctatacctgggatgagcagctgaccttgtacctgcacatggccgccaagggccaccggctggagctgatccgccaggacccgcgagtggcctgcaacatctacagctttttggaccggcgcggccataaaagctaccggggcgagacccacgattaccgcagcgttacggtgtttggccgcgcgcaggtgatcccccgggcggacgaggccgcctccctggctgggatgaacgtgatggtccgccactccggccgcccggcgctgaaaaagatgcccgcaaccgataatctgctgattctgaaggtcacctctgagatcatcaccgccaaggcccagtaccccctgaccccgcaggaggcgcagatgcctgcgctggactaacgccccgcacgaggtaataaaatgacgctcacctttcacacccggtttacgccactgacggccacccccttttcccgggcggaccgctgtattgaagcggccccctgcccggcgctgaggccgctggtgcgctgtttttggggccatagcgccgcccagggggcgggcgggcgccagctggtcatccccgatgcctgcgtggacatcatctttaccttaaaagatggccgcgtgcgcacccgcttttgcgcgctggatcagcagcccttctggtcggacctgtccgcgcaggcgcccgacctgtttgcggtgcgcttttatttttgggcgctgccctttttatgccctggcggcctccccgccctggaggagaccctgatccccgccctttcccgtctggcgcaggagggcgagtttgccacgctggactttgccggccgcaaggctctgctggaaaggtggctgctggggcggctctcccgcgccagcgcgccggacgcgctgctggacagcatcgattatctcctttcccatggcggcgacgcccgggtctgcgccctgtccgtgcacaccggctacagcgcccgcacgctggagcggctgttcgcccagcacctgggggcctcgcccaagcagaccgccgcgctgatccgctaccagaccctgtggaaccgcgccctgacccagcctcggttcgacgtgcaggatcaggtgctcgccctgggcttttgcgaccaggcccacctgctccactttttccgccagcaccacggcatgtctttaggccaggcggtacgtcttgcccgggggctgtcgcctttttacaataccggcggcggccttctgtgataaggttaggagacaatcatcatccaagggggttataaaatggatcatcaactgttttacgaagtgcgtacctggatgtaccgcaacgcccggccgctggagctggcgctgtggcgctgccgttttgagggcggcgatgctggcgcagtggtggccgcactggcctactaccaaaacgaggacgggggctttggccacgcgctggaaccggactgctggaacccgcaatcctcgccctatcagacgctgtgcgccctcaacatcctgcgcgagatcggctttgccgataaggaacatccgctgtttcagggcatcctgcgctacctggaaagcggcgcggataccgccgattacggctggcgcttttccatccccagcaacgacgcttacccccgcgcgccctggtggagctatgacgagcaggccaaccgcgtcgagagcatcggccttaccgcggcgctttgcgcctttgtgctgaccgagatggacccgcgctcccccatctaccccagggccaaggcctgggcgctggcgcttattcccctgttggagcaggatggggcgctgggtgagatgggcctgggcggcctggccgccctgctgcccgcgctggagcagaccggccagccgctgccttacgctgcgctttaccaaaggctgggccagcgcgccaacgccgccatcgcccgggatccggcgcaatggtcgcaatatctgccccggccctcccgctttatccaaagcccggccagccccctctatcccaaaaatgccgaggtcatggcgctagagctgcaataccttctcgatacccgcgcccagggcggggtatggcccatctcctggagctggtttgatctggcggaccgctacgctgcggaatttgccgttagcgaaaactggtggaaggcccgccaggccatcgataccgtggcgctgctaagcgcctttggcaagatcgacctgcccccggccctttagattccgccaccggcatgattgtgctcgccccgcgcctgattttaagcgcggggcgcagtttttggcgcgaaaaaagccaacggcaccccggcagggcggcgctcacttaacaagaccatccctggggccgcctctgttcgctgaggtttcggccttcgtgccaaaaggcactcgccctcaacttacgctcacagaaatcattgtgcccttcatcgcccaccgggcgcgggcactatagatttccaccggcggcgggcgctatagatttccccaaaaggccactgatgtggtgggggcggagcttattcacattctccgatgcttatacgccaatcttgcctccctctgacgagggaggtggcgcacctttgggtgcgccggagggagagatgccgccaaacaaaaacccacactttcccttactggtaatttgtcaatccgagcgtaagcgagaaatctctagacgccttctttgtcccgcacgccctccagccctacaggtcaagcgccgctaccctgccaacgcgccagattcttcgctcggccttgcggcctctctctgaatgacagggctatcgcccttttagccgctcctagctccctatattaccatacactctcgcccgccatcagcgttgttcctgccccaagccatctttcgttctgaatgacacgttcgcgcacaaacctatccctttccactcatcaacagtatgctgcacatgtcattccgagccactggcgaggaatctcatggtactctcattgttacgactgcactgcgcagcgcagattaagcgccacttttctgctaacgcaatagattcttcactccggctgcgccttcgttctgaatgacaacatagcgcgtgttaaagcatacttttccgcgcgcctcttgcaaaattcgcgccggctgttaaaatagagggacgggccgtatgcggcgccgcgtttgactttaccgggcccggtattgggcaaaggagcgacatatgatacccgaatcgatccaaaacgacaattcgttgatcttggagcgtcttagcctgtttttaaacggcgaccccgccgccatccgcggggagatggtagccgagctggcttccgcctgcggggtggagctggaggagggctaccggctgctgctggcctccatgctggggctggatatggggcacaacccggcccaccgggcgctgtaccaccgctacttcccccacatggtccaccttttggacccgacggattttaagggcgacgcgtacctgcaaaacatccgcttcccccaggccgcccggggcgattgggcctttaccacccaaaactatcagccctatgaggcctttgtctgtgacgactttgcccccctgcccgatgggcgggtgattccgcagatcggctactttgcccaaggctttagctaccccgcggtgcttcaggccgggcgggaatggatgaccgtcacccccaacgagatcgccaccatgcgcgcccccctggcggcggccgccggacgggtgctgacctatgggctgggcctggggtactttgcctaccacgcagcgcagcgcccgcaggtcgcctccctcaccgtggtggagcgggatgcggacgcgatcgccctttttgaggaatatctgctgccccagttcccctgccgggataaggtcgagatcgtccaggcggatgcctttgactttgccgccagccgcatggctgccggccggtacgacctggtgttttgcgacctgtggcacgacccctccgacggcgtggcgctctataagcggatgaagggctttgagcggctctccccccgcagtcagttcttttactggatcgagcagaccctgcgctactatatctaaacgggacctgccccttccacagggcggcaagagacgtgtccgccttttgcgtgaccccgctataaagaaacgcccccggcatccttggccgggggcgttcgctatttcgttttacctcttattcaaagttctccacagccgtgcgcagcgcctcgatgatctcgatgtgctgcgggcagaccgattcgcactggccgcaggcgatgcaggcgctggccttgttgccctcccgggtctcaaagccgtagttgcccttggcgctggccaggttgccgtacacgctcaaggagttagccgccttaaagatgccggggatgttgatctccatggggcagcccttgacgcagtagcggcagttggtgcaggggatggcggggatggcctccagggtctttctcgcctgctccaccaccttagcgtccgccccgtctaagggcttaaagcccgcaaaggtgcgcaggttgtcgtccatctggctcaaatcgctcatgccgctgagcaccgtgatcagcccgggcagcgaggcggcaaagcgcagcgcccaggaggcgcagctggcctcggggtccgcggcctttaacaccttttgcaccggctcgggcggctgggccaaaagcccgcctttgaccggctccataatgatcacgggcttatcgtatttgcgcgccacctcatagcaggcgcgggactggatggcgtcgctctcccagtcggcatagttgatctgcagctgcacaaattccatctccgggtgggcctgcagcacctcttcaagcacctccgccttatcgtggaaggagaagcccacgtgctttaaaacccccttggccttttgctcctgcacataatcccagatgccgtaatcgtcaaaataatggctgcggcccgcgcccaggttgtgcagcaggtaaaaatcaaagtatccggccccggtgcgcttaagcgaggtggtcagcatatccttggcctcctgcgcattcttcgccccggcccaggcgggcagcttggtggccagctggtagctctcgcggggataacgcttgaccagcgcctcgccgatggccagctcgctcttgccgcccagatacccaaaggccgtatcaaaataggtgaagccggcgtttaaaaaccggtccaccatttccttggtctgctcgatatccacatcctcccccagcatcggcagccgcatcaggccaaagcccagcttggggatctgctctcctaagtaacccatcttccatacctcccatactttacaggggccgtgcccccgtgctagacttattgtacaaccttcgagttactcgaagtcaaggctttttataccgggaggcaaaaatatgtataccatcaaacaggccgccgcccttgtggggatgagcgagcacaccctgcgcttttataccgataaggggctggttcccgccgtcacgcgggatgcgcataacaaccgcgtctttagcgacgaggcgcttaactttcttaccgtcatcaagtgtttaaagggctgcggcatgtccatcgaggccattaaaaagtacgtggacctgtgtttgcagggtgatgataccgtgcaggagcgctacaagatcatcctggcccagaaaaaggtggcggaggagcagctgcaagaggcacaaaagcgcattgaatacctccagcgcaaggcggataattatgccgccattctggcccaccacaccccggataccatgaaccctgcctcctggcctgcccgatcggtgggataaaaattccgtaccggaggggttgacttggagcgcactccagggtctacaatgtccgtaaaaggagtgatgataaccatgaccatcgccgaagtcagccgcgagctggatctgtctgccgataccctgcgctattatgagcgtatcggcctgatccccccggtcaaccgccgggaaagcggcgtgcgcgattataccgaggaggatttccgctgggcggaatttgccaagtgcatgcggggcgccgggctctctatcgaatcgctgatcgaatacgtggccctggtgcagcagggggcgggcaccgagcaggcccgcaaggatatcctcatcgaggagcgggacgccctcatcgtccgcatggccgagatgcaaaagacgctggagcggctcaattacaaaatcgcccgatacgaaagcatcatgctggaggcggaaaaaggcctccagggcgaataattccgcgcgggcctttcatattggcccgtggtgttgcgcccgccagcggcgctctcactttgccttgctcccctttataccgctctttgtttttgcgcgaaaaccggcctctgctcccgccagcggcctttccccattatcattgcagctcggggctaacgcccctcataccgttttgtgccctttcattcaactataataggcccgcgtgttccgggcgtcctactctaaaaggaggtcttttccatgatctatcgcgaaatgtgcggcgagaaggtctcgctgttgggcatgggcaacatgcgcctgcccaccaccggcgaaggcgaacatatcgactttgaaaaagcccaggccatgatcgaccgggcctacgccgccggcgtcaactactttgataccgccttccgctatcacgggggcgagtccgaaacctttatcggccaggcgttggccaagtatccccgggatagctggtttctggccagcaaactgcccgggcacatgatggagcgaggcgccgacgggctgctgcatttcaacgccggcctggctggtcagccgccggtccgctctgtggccgaggtctttgaacgccagctggaaaagtgcggggtggatcacttcgacttttacctgctgcataacctgtgcgaaagctcctatgatttttatatggacgagcagatcggcgtggtgccctacctgctggagcagcaaaaaaagggccgcatccgccacctgggcttctcctcccacggccaggccgaggtgatcgatcagttcctctcccattgggagggcgtgttcgagttcgtgcagatccagctcaactacctggattggcgcttgcagggtgcggataaaaaggtggccgccatcgcccgacacggggccaaggtggtggtgatggaaccctgccgcggcggccggctggcggatatcaacccccggtgcaatgcgctactcaagcaggcccgcccgcaggattccatcgcctcctgggccttccgctttgtcatgtctatcccggaggtctcggtggtgctcagcggcatgtccaccttggagcagctggaggataacctggccacctttgcggacgatacgcccctgacaccggcggaaaaacggctgctgctggaggacgtggtgggggacctgatcgacctgatcccctgtaccggctgccgctactgtaccgagggctgcccgcaggggctggatatcccaaggctgatcgccctgcaaaacgagatgtcctatgagagtcacgatgcagcctactttatcctgcgcggcttcaagcccgaggcgttgcccggcgcctgcatcggctgcggcgcctgcgccagcatctgcccccaaggtatcgacgtgcccggcgtactgcgcacttttgcccagcgcctagcggccgatgagcgagcctgatttcttctttaaataatagtcaaagggacggaagatcactcttccgtccctttttcttgcttttcggacgtctgcccctagtccctcttattccccaaagctctttaagccttcggatacctcataggtgtacttatcccggttggccgagatgatcgccttatacatttccgcgccatccacatagccgtcggtccagtacgagctgtccccgatcttggaatggccggcaatgccttcggtttccgtaaccataaactggtcgccgggcaggctgactacgccttcgtactccacggggaagtacaccgtcgtggccccaaacttgccctccgcgttggataccgtgccggaatagacgatgatgtacttgttgtttttctcaaagtccgtgccctggttcttggccaccagcaggtattcccccgccaccgccaggtcgctgaccgtggtcttgtcattataatccgaggcgatgtagctgttgatccgctccagcgcgtccgcctgcagggtctgcctataggcgtcggtaatgtccgaaagtttggtgatggccttattctgggcgtagagctcaaacccatcgccacattcggcggtgtaatcctccttgttctcctctacgatatccaggtagcagacaaagggattgatataacccttggtgctgtaagagctgccgtccaggcgcgagctgcccaggatgcccttgttctcctcatagttcagtgcgccgccgtgctttaaaatgttgttaaagcgcaccgggaagtacaccgtagaggtgctgaacttaccctccgaattggataccgtgccgctgtagatcaggtacaggttgttgtagctgctcacatatccgctgccgtctttgaccgcgtttaggatatagcccgaataggtcagatccgacagggcggagccgctgttatacgtgcttgccgtataggcgtaaatagtgtcctccgcctccgctttcaccttggtcagaaagtcctccgtcaaatcggcatacgccgccacatactcgtccagatcgctgacggtgaactgcgcctctttttgggtaaaggcgtagcccgcctttaacgtattttcgtcatcggcgttaatggagatggtcaccacatccccgttgcgcaacccgtcctttttatcggcggtaaagcggtaattttttacctcggcgttgccgccctcataggcgtactccaccttgccgttgggcgccacgcccgtaaaggtgaccttcagcccatcaaagggatcgatctcggtcaccggctgcaagccctccacggccagggtgatcgtctcgcccgtgaactggatcttggactggccggcgatctcgttatcataagtgatggacgcggtaatggtatccccgttggacaggtgctcccgctccgaggtgatctccacatcgatgctgtccaccgcctcttccaaaagcatgtattccttggccgcgctgctcagcccgctaagagaccagagggattccagatcctccgccttcttgcccttggccgccagaatatcctcgtacagcttgctctcgtcgatggaaacataggccgtggcgtatccatcgtaaccgtcgtaattcagctcgacgtactcctccaggttgaactttttgggctgcatcatcagcacgaccacaacgatgatcgcgatgatcaccaccagcgccgcaatcgccccgcctaccagcagcttgttgcccataaatttctggaaagccgtcttgccgcccgccgccggctttaccggggccgcgccctggggcgcatcctggccctttgcctgggacgctgccgccggctgatccggctgcttttcagcggcctgctggggcgcagcagcctgctttgcctgtgccgccttattttccttgccgcaatgggggcatttggctgcgtcgtcctccatctttttcccgcaatgtgcgcaaaacatacctcatactcctctctttgcctggtgccggggcaaacgcccctgtccatattcaagtacctaataggacatcttccattattatctaaaatgcgtcaaaaatcaaccctgtattcatatttattcatttttgtacttttccgcgcgcccgcaaagccttgataactgggcctattttaaaaccgccttccgcttatttagcaacaaacgtattttaatacaaaaaaagcgcatccccgttgcaggtcctgcaacgggggcgcgttttcacctttgcacagcgcatccgcatatattattttcatggcagaaatcgacccggttacaaggaggtgcctaaaacatggaccgccacgccctcacccggcagctggagaccgcggccctggcctacggcaatgtccagcccgaccttccgcccagccgcacctacgccatctttgcccccaacgatgtgcagtgtttcctgcgccgggagggggaggtgttgcagatcgcctttcgcggcagcgattccctgcaggacgccctgaccgacctacagttttggaaaaagtgcattccctatggcaacgccgcctccaagatacgcgtacataccggctttatcaacgcctataaagatgaagccgtgcgcccccgcatccaggcgctggtcgccccgggcgtgcaccgggtgcgcatcaccgggcactccctgggcgcggcgctggccgtgctgtgcgcggtggatctgcaatacaatttcccggacagggatttcgaggtggcgcttttcggctgcccccgggtgggcaacgccgcctttcgggatagttacaaccgccgggtgttcaagaccctgcgggtgcaaaacggcaacgacgcggtcaccaaaattccctttgccctgatgggctaccgccacgtgggcgttgggctgcatgtggggccgccccgcatccccggccggctgaacgtgcgccagcacgccctgcagggctattatcacgggctgctccagcccgcgttgcgcacgcctacccgctagcccgccccgtgctgtgctttgccttacccttcctctgcctctatgagcggtacctgcagctggtagttccactgtaagatgcccgaaaccaccaccagcgccaataacggcgatataacgatcgactttgactaacgccctagcaaataacaaaaaacaaaagcggcgtggcaactctgccacgccgtttttcgccgctctttgcgctccattaaaggtccaggatcatctgctcgtaggccagcggctcaaagcccaatcgcgcgtacagccgcgcggcgccctcattgctggcgcatacctccaggcggtagcgcttggccgtgctatcgtaggtcttccgcagccaggcgaaaaacgcccgccccagcccacaggagcggtactcttccttgacgaacacctcgtccacccatacgcaaagcccccctacttcattcgaataagtcagggccaaaagcgcatagcccgcggtctttccctcgtgctccagcatcagcagccggcagtaagggtcccccgccaggcagcgccggaaggtctccttaaaattcccctcggggacggggtgcagcgccgcgccgccggaataaaaatcccggctcatggccagatactcttggtagtcctcctgtcgaacgtcgcggatcaaactaaaacctcccttttatcaaggccgcttgcccgccccggggcggccttttccccattatagcggccaaccattcaaatggcaagccgcgccccttttaagggctggacggcctgcttaaattttttccttttcgggggttgacaccgtcctcccgtcatggtatattcaatttgcaagagttagttatagctaactaaaaatcttgaaaggtggatcgtgatgttcgagtggataatgcccctgttagcgctgattctgttcgcctgttctctggcggcccggcgtcatatccgcaagcacaaggccgcctgttgcggcaaataacattgccagatagcgtagtaggatctcctaacatacaccccacaacccccaggaatgggaacctccaagcggaagcggcgggcctgaatggcccgccttttcccgttttggccctttccctgcagccccgcggcaaaatgcgcgcgccttttcgctaaagcgcggcccttttgtggtataatagataaaaatatcgcgtgggcctgcccgcgctttgagtgaaggggttttttatgagcaaacatctcatcgtcatgagtgtggatgccatggtctttgaggacctggccacgctgcgcacgctgcccaactttaagcggctgatcgagaacggctcccgggtggacaaggtgcgcaccatctatcccaccctcacccatcccatccacgtggctatcatgaccggatgctacgccggcaagaccggcatccccaataacgaccgttttatccccggagatctgaacagcccctggtacaaccgcttagacgaggtgcaggtgcccaccctgttccacgccgccaaggccgcggggctgaccaccgccgcctgtcgctggccggtgaccgcctgcggggaggacgtgatcgactacatcgtcccagaggtgatggacctggacctggacgaaaatgacttggagggcacctaccgcaaattgggcagcgggcccattatggagcagatcgtaaagcccaacctgtggcgcttaaagggcaacgcccacccccagtccgagaatttttccatcgcctgcgcggcggacatcatccgccgctataagcccaacctgctgatgacccacccctgcatggtggattctacccgccacggcaccggcctgtttaacgagcacgtcacccacgccctggccctgaccgatggctggctgggccagctgatggacgctgtgcgggccgccggcatcgaggagaccaccgattttgtggtgctcagcgaccatggacatctggagatcacccgtgccgtttgccccaacgtctttttggcggacgaggggctgatccgcaccgacgcggcgggcaacctaacggattgggacgcctacgtcaaatcctgcgcgctttcggcccaggtctatttgaaagacccggcagacgccgccctgtacgaacgagtgtacgccctgctggagcgcatggccgatgagggcatctacggctttagccaggtgttgaccgcccagcaggccgatgcgcgctaccacctgtctggggacttctcctttgtgctggagaccgatggctttacctcctttagcgacgattggcgccgcccggccgtgcgccccttggacacctcggattaccgctatggccactccacccacggccatatgccagagaaaggcccccagccgccgctgctgtgcatgggcccctccttccgccagggcgtggtgctggagaccgtgcccatcgtggacgagggcgccacctttgccaaggtgctgggactaacgctgccccaggcggacggcaagcccatcgacgcgctgctgaaataacacttttctgcgttcaaccacgcatacagtccggcccttgccccctatattctgggggataagggcctttttcttttttaaatagcacttttctgcgctttatgatctctccgcccgcacccgaccgccctgcagaatctccatcccaacacgcggttcttttttgttctgccctgccgccgcagcgtttgctatagggctgccggttcaccccctttatattttccttaaaagttgacagaatttttacactttgctatgataaagcacggatgctttttatggcttgtttataaacatggatgttttagacgccgcgccgcgactttccggtcccgggcgacaggacgattgcgcggcgggcttggcctgcccgcggacaggtgggggaaatttgtaccatggatgacaccaagcgtagactgacccggcaattcatcatctttcaactgatcgccttcggctccttcgcgccgatgaactactacaacgtatttttaaaggagatcggcttttccagccagcagatcggcctgtgggcctccatcggcggagtgatcgccatggtcaccctgcccatctggggcattatttccgataagatccgttcgcctaaaaagacctacctgatcagcatggtggtttatgcggccatctatgcgctgatgcctacggccgggcggatgctggccctttccagcctgccgctgtatgtgctgatcgtgctttactatctggtcaagcagcccacccactccctgcaggacgcctggttcgtctccacgctgacctctcgcggggtcaattactcggtcacccggctgtggggctcggcgggctttgcggtggtctctatcggcatcggcatggtggtggattttaccgggatcgacgcggtgttctacctggcgccgctgctgatccttccgctggcgatcctgtgcctgcgcttccgggaggaggattacaacaccccggagtaccgcgccttagagcaggccgaacgggaaaagcaaaaggcaaaggccatcaaactacagccctggaagctgtttaaaaactactatttcgtcaccgcctttatcatgaccatcgtgttgtccatctacacggctattaccggcagcttttacgcctatatactggagcacgccggggtctcggccgaaaaatatgggttgatcagcggctacggcgcctttgtgcaggtagcctgcatgctgtttgtcaaccgctactgccgccgcgccagcctgcccaagctgctgatcgccgccggcatcttcgccgtggccgaaaacgtgttgtacgcggtagcctccaatctctttatgatgtttatcgccggcacggtatggggcatctccatcggcatcaacgtcacggccctacccacctatatctacagcctggtgccccgggaatacgccgccaccgcccagacctttaacggcacggtgattatggtgctggccatcgtgggcaacctggccggaggatacctgatcgccagcatcggcatcgtacaatacagcttcggcgtggccgcggtacaggccgtgctcaccgctttgttcgccctgagcatcccctttgggagcaaagtgctcaagatccccgcgccggacagcgtggtcaacgcccagtagcttaccgttcgttaaaaagccccggctttccgtctggggcttttgcatgcccggatagcggccatttcagggacttatcccccacttcggctatatttctggcaaaaaatggcgctgcgcgtcccatatttttacgaaaagcgcgcaaagttttaccgtctggtaataaaatgtaacaactttgttacgtatacgttttataatcaggttaatcccacgatgggatagtatcgtaaaagtccgcccaagcgcggcggcagaggaaatgaaatgaagaaatatagcagcaaaattttttgcctattcctattgtgtgcgctggccgccgtagcctgcacatcggtggatggcgggatccgttcctctcccttgcctaccggcggtgtaccggccacggctacgccggcagaacctgaggcggccccgtcgccctgcgccagtccctctccccaaaacaccccggcgatcaccccgccggccacggccacgcccgccgcaagcccgcaggccgcccaggccgacagcaaccaggccgcaacgccagcctacagtgtggctacccgctccgtcaagcgggacggcatctcggtagattaccctcaggtagagggcttggccaacgccgcggcgcagcaggccattaatgatacgattgataaaacggtacagcaggccatcgccgatatgggcaaggaggatacctattccctgacctttgaggtgatgacccaggatgagcataccttgagccttgtgatgaagggcgggttttactaccagggttcggcccatcccgccgcctttgcctacacctataattttgacctggccaccggccagaaccatagcctgatggcagggcgcgatcccgccatgatcgcccaggccgtgcaggatggcaaaatcactatcctcaatggagatgaggagatgaaaggctacatattggaatatctgacccaggtactcgcccccgagaccctgaacgccgcgatggtacaggccgataatggcgcggcagatggcgtgatgacttttatgaaggacgggcagctctgcctggtgctgccggtcacccacgcgctgggggattactgtttggttcgtatcgacggggtgcaatagcgtatgggcaaatatagttttaaaaaccccaaagcgcgccgcagctttatcctgggcatactggcgctggtcctgatcgcggtcttagccatgggcgccgtgctgctgccccgggcctgcggctcctccaaggctacttccccctccgggcagggcaccggggatgtgggcgagcaggcgtacggcgtggccatccataccgcgttggtgaaaaaggggctgcccggccggccgggcaaggcgcgccaggtcaagtacatcgtcatccacgaaacggccaataccgccgccggggcggatgctaaaagccatgcggactttttatgctccggcggggaggggacaacctcctggcattataccgtggatcaggatgagatctaccaccacatcccggatgacgaggtcgcctaccacgccagcacggccgagggcaaccaatacggcatcggcgtggaactgtgcgtcaatagcgacggcaattttgaaaagacctttgataacgccgccaaactgaccgccaaactgctgcgcacccatgggctggagatttccgccgtgcgccagcatgcagattttaccgataaaaactgccccatgaccatccgggacgccggccgctggcaggagtttttaaaccgggtccagtcctatctggatcagccggagtaaggcccgcggggcttttatcttatcccatggcgtttacagcgcccggcccagccgggcgcttttttccgccgctctgcagccgcggcaagccatcgcacgcaaccgtcctttttcattgcggcgcagccagcgcgatgttgacgggaacaaaaaatccctggcccgttcgtccgcggacgccttctgtaccgtaaatttctaaccctcatgctttcatcacttgtgccgcagcgcggggaaacggtataatatttctatacttttgcgcgagtggagcgattttaaatcccgtcattccgggctacaggcgcggaatctcagggcgctcccctggtttcgcctgcaccgcgtagcgcaggtcaagcgccgctttcctgcccatacacgatattcttcgccctgctttgcggccttcctctgaatgacagggctatcgccctttgatccgctcctgacttttgagcggttcaaaatgtctgccgcccgccatgagtgttattcctgccccaagccgacctccctctgaacaaacaacgtagtaagtattaaagtatacttttctcatcggctttacttgcaccatttaaaaatgataccggcgtcatccgcctccccgtaccggagaaagaaggtatatcccatgaaaaaaggcacccgctcctttgccgcgctgcccatggcgcttgtgctgctctgcccgccggtctgcattgcccaggcgcagggaacgtttgccgccccgggcccgcagcccgagcaggggctgctgctctgcgccctggcgctggggctggctggccttgctaccgccatcgcccttttagtccttttattgcgccgccaccgccgaaggttagagggaaacttggcaaagccccgccgggcccttcctatctgtatggccgtattcggcgtgctctccctggccgcgggcgggataatggctgtaaacatcctgccccgcgcacaggcctatgcgggggcggtaaacgccttggcacacagggagctggatttatgcgaacagcagttagcccagctgccggaagattatgcggatacgacgcaaatgcgctgctatgtcaccgccctgcgcctgcagcagggggaggatttccagcaggctgccaccctgtttgattcgctgggcccctatcgagatgcaaaagaccagtctatccaatgccgcgtagatcgggcctggcagctgctcaacggcgaaaaattcgacgaggccaaaagcgtctttatcgcactgcaagaagagggtgcgcccggcgtggaggattgcgataaggaggccgacctgcgcaaagcgcaatccctgcaaaaagcgtttaaagaatccggcaacgtggaaacgggcgttcaagcattggaactgtttaaagccctgaagcaggcggggtatgcgcccgcggacaatgcgctctacgaatttcgcgaccaggcctattatatggggttagacgttttagacggggaatatcctaagtgggattgggaggatgcctatgcgtttttccagctttccgacaacctatacgacagccaccaatatctgcatatgatggatcttttggccgatccgaacctgaccgatcgggaagtgcgacattctggtatcggattattggtccaaccaccgcatgcaggaattgctttttgagagcgactggttctactactatcttgatggcgaatggaaaaacgaggatggcgcttacttttattttgagaatttggatggcgatgattgcatcctggagcaaaatatagtggatacgcaaaggttcgatgagctgatactcaccggctatcgctgctatgtcgataaaaagctgctttttatggtaatccgcagcatgattaatcccaatgagatgacgatactcgattataccaccggtgagcaaaccgccctcacccgccagcgttagcgcgccctttttagaaaggcaaaagccttccagatcaagttctggaaggcttttatattgggctgttccctttttgcttttacagcagatcgatcttgctaaagtcgatatccccgttttcgtccagcagcccgtcgtctacatggatgcactcgatcttgccgatgaacatctcgtgcgagccggtcatgatggagtccaccaccgtacactccgcgttcactgggcagtccgtcaggatgggcgcgttcaccttttcgccctgtgcggtcttgatgttcatcttggccagcttatccccgtccctgcggctctcgctgcccagatagtcaaattccttctggtaatccttgcccaccaggttgagcacaaagcatccggtctccttgatcatgtgatacgaataccggctgggtacgatacccaccatcaccataggcgggtcaaagctgcagttaccgcaataggccacggccagggcgttatcctccccgtttttgccgcggcaggaaatcagcaccttaggcatgggctgcaggcagcttttgatattggcttttttcttcatttctaatgcgcttcctttcctcttgttctatcctgtcggcgtcgcccgcttaatagctcttggcaaagtagatctcgtacttggcgggcttgccgcagtgtacgcatacatccgagaagggcttctggtcaaagggcatattgcgggtagtggccccggtctcggccttgatctcctcctcgcaggcctcgtccccgcaccacatggcgtgcacaaagcccttctccacgccggccttaaactcctcatagttagtagcgtccacggtcttactctcccgcagcttcagcgccttttggtagaggccgtcgtgtaccagctgcaagcgctcctcaatggccgcctccaatccctccatgggtaggaactccttttctaacgtatcccggcgcaccacgaccacctggccgttctccatatcccgggggccgacttccatgcgcatgggcaccccgcgcatctcccactcgttaaacttccatccggcgctctgatcccggtcgtccaccttcacgcggatgccggcggcctccagcctggccttcagctcgtatgccttatccagcacgccctctttgtgcgcggcgatgggcaatatcaccacctgaatgggggcaacctttggcggcaacaccagcccgcgctcgtcgccgtgtaccatcacgatggcgccgatcatgcgggtagaggtaccccagctggtctgccaggcatacttatggctgccgtccttatccaggaatttaatatcaaacaccttggcaaagtgctgccccaggttgtgggaggtgcccgcctgcagcgcgcgcccgtcctgcatcatggcctcgatggaataggtagccgccgccccggcaaacttctcccgctcgctcttgcgcccgcagaacaccgggatggccagcacgttctcggcaaactcccggtagacctccagcatcttgagcgtctcctcctgggcctcctcggcggtggcgtgcagggtatgcccctcctgccacaaaaactcggaggtgcgcaggaagggccgggtggccttttcccagcgcactacgttgcaccactggttcatcatcatgggcagatcccgccaggattgcagccatttggcgtacatctcgcagatgatggtctcgctggtgggccgcaccaccagcggctcggccagctcctcggtgccgccgcgggtcacccaggcgacctccggggcaaagccctccacgtgctcggcctcccgctccaaaaagctcttggggatgagcagcgggaagtaggcgttctggtgcccggtggccttaaagcgcgcgtccatctccttttggatcagctcccacaccccatacccataggggcggatgaccatggtgcctttgaccgggccgtagtccaccatctcggtcttaagcaccacgtcggtgtaccattgggagaagttctcctcccggggcgtgatctgagtcacgaattcctgctgctttttcgccataaaagtacctccaactcatcgttctttcatcgtttggctgccgccgttctaccatcgcgtcgcaaaaatcccactctgccggcgtttggttgcgcgtggagccttctgccccaacgccttcgccggccttttcttttgccgtgtaaaacaaaacgccccgccccctgttaggggacggagcgattgatctttctccgcggtaccacccgcattggcccgccgcaaaggtacggcaaacccgctttcccggctgtaacgtaccggggccacgccggcggatactgtggaagccctgcttcccttccccgccggggctgtgcgggccggaccttcccgcgatcctccgggtgcggcgctctcaacctgtggctaccgctctcttctccccggcgtgcggatcggaaaggttcccgcatcttaacgcctcgtgattgctattctatcctcgcgcccgccctttgtcaaggggggcaaagccccttttgatcgcatcaccttttcagccgatgcaaatctctcggttctcggagcaaaactttacctgctacccacctatcccaagggggcaaagccccttttgatcgcatcaccttttcagccgatgcaaatctctcggttcccggagcaaaactttacctgctacccacctatcccaaggggggcaaagccccttttgatcgcatcaccttttcagccaatgcaaacttctggttcccggggctaggctttatccgccgccgtccgaataattttctgtcatccagagcgcaggcgcagccgtagcgaaggatctcttgcttatctccagctataggttttccgtcaacgtaatctctccctcctgtgcgccctttgggtgcaccacctccttcgtcagagggggcaggttgggttgacacgaaagatagtgtataagcgaacactccggaaaatatatctctttgcctgcataggagagcttgaataacctccgtccccaccacggagtggccgtttggggaaatctatagcgagcgcgtccggtggacgagcaagcgaacgatgatttctgtgaacgtgaggtgcgcccgagcggccgacgcgccgcgacgggcaaacccacagtgaacagaggaccttcaggtttagggattgttaagggagtaaagggggaaatcggaatctcccttcccccttaacgaacaaaattcgttcccaaacttccctccctgcctcacgttaagccttaattctccactgactgaaaacctataccttttcctctcccctggcgatcttcgccccgcgctccagcgcctcgcgatttaaggggatcaggtgcgccttgcgctcgcccagcacctttttcagcgcctcgatcacgctgtcgatgctcacgatgcccgtagcctcgatgaacgcgcccagcatgatcatgttagccacccgaccgttgcccatctcattggcgaggtcgtcgcaggggatgtagatcacttcaatatcctcccgctcggccttgcggtcgatcaggctggtgttgatgtacagccgcccgcccggctccaccgccggctcaaacttgtcgagcgacggacggttcagcaccatgacgcagttgccctcggtcagcaccggcgcgccgatgggctcatccgatacgatgaccgagcagttggtggtgcctccgcgcatctccggcccgtaggagggcagccaggatacgtttttaccctcgtgaataccggcatagcagatcagctggcccatggactgtacgccctggccgccgaagccggcgatgatgatacgatgttccatgcctacttcgcctccttaaacacgcccagcggataggcggggatcatattttccttcagccactcgatggcctcaagcggcgtcttgccccagttggtggggcaggtggaaagcacctctaccagcgcaaagcccttgccctccagctgcatctggaacgcggtcttaatggcctttttggcctggatcacgtgcttgacgtcgtgcacgctcacccgcgccaggtaagccggccccttcagggtggcgagcatctcgcacacctggatgggatagccgcagtgatccacatcccgcccgtagggggaggtggtggtcacctgcccgggcagggaggtgggggccatctggccgccggtcatgccgtaaatggcgttgttgacaaagatggtggtgatgttctcgccccgggccgccgcgtgcacgatctccgccgcgccgatggaggccaggtcgccatccccctggtaggtgaataccaggttctccgggtgcacccgcttggcgcccgtggctacggccggcgcgcgcccgtgggacgcctcgtacatatcgcagttaaagtaatcataagcaaataccgcacagcccaccggggccacacccacggctttgtccatcatgcccagctcttcaatgcactcggccaccaaacggtggatgatcccatgcgtacagccggggcagtaatggaagggcttgtcggtcagcatagcggttttctggaatacggttgccatgcttacatccctcccttgctcaatttacggatctcttcaagcacctggttcacggtggggaacatgccgcccgagcgaccgaagaagctgaccggcttgcgcccggccacggcgatcttcacgtcatccaccatctgccccaggctcatctccacgcacagcacgttcttcacgctgtcctgtgccgccgcctcgtaaacggccttttccgggaagggccaaagcgtaatgggccgcaccatcccgaccttgatgccctctgcccgggcgcgggccatggcgctgcgcacgatgcgggccatggtgccgtacgcggtgacgatcacctcggcgccctctaccccatcgcactcccaacgggtctcgttggcgacgatctggtcataacgcgcctgcatcttgaggttttgcacctccaggtccgccgcgttgatgtacagcgagttgatcaccgcgcgcttgcggctcttgccatcccagccggtggcggcccagtccttttgcggcaggtcggccggggccttgtactcgggcatatccaccgcttccatcatctggcccagcattccgtcgcccagcaccatcacgggcgttagatacttgtccgccaggtcaaaggcgtccatcaccagctccaccgcctcctgcagcgaggccggggctagcaccggggtgcggtagtcgccatggccgccgccgcgggtggcctggaaatagtcgctctgcgcgggctggatcgagcctaagccgctgcccccgcgcaccatgttgatgatcacgcagggcaggtccgccccggcgatatagctaatgccctcttgctttaagctgattcccgggctggaagaagaggtcatgacccttgcgccggcgcccgccgcgccgtataccatgttgatggccgctacttcgctctcggcctgtaaaaagcagccccctaccttgggcagccgggccgacatatattcggggatctcgttttgcggtgtgatcgggtaaccgaagaaataccggcagccggcctggatggccgcctcggcaatggcttcgttccctttcatcaatttctttgccataggaattttccgtcctccttgtcgcttcgctttcgagaaagtggctcgcgcactttctcgagttggcacgctttgcctgaaaatgccttgcattttcggccggcaaagcgcgtaaagtacaaaatccttcggatttcatccgttttggcgtacacgccgccaaagccggtttcaagtcaagggggaaccccttgacaatccctcaaggtttcgccgtttactatctctcgactgtgatgactacgtccgggcacatccgcgcgcaggacgcgcagcccgtgcacttctccggcgcgacgcacgcgaccggatgatagcccttggcgttaattcgttccttgtccagcgccagaatcttgaccgggcaggcgttaacacataggccgcagctcttgcacagttcttctttaaacgttactttacccatacctccatgtcaccctttcttgccatagaaccccaaagggccctgctataaaaaaatggccgcccggcccttcatgccaggccggcagcacaattttttgatttatacccgttataaggggcggcttaccgcctatcccccgggcgaaaaccataccttattataattttctttaccccacctgtcaacttcccaatggacgttttgcaggttttttgtcgttttccctcaaatttcctgcgcggttttgccctcttccccgcgctcatgcaggatgcgctgcaaagtttgccaggcatagcgggcctccctgcactttagcgcatagcgctcctcccgggtctgtaaaaagaaataccggctggcgcaatccagcttctctattgcttccagcttcacatcaaacccaccccgggaggcggcaaataccgcgcgctggtcggtgatcaccagcatcccccgcaaaaacacctgcggggcgccctgggtttccgcctgtgcgctctccacccggcgcttggcccgggccgaaaaatggcacttctccccttcggccagcagtaccggccccgggtcgtacaccggcagcggcaaagccgggtcccccactgcgcgcagcgtgcgcttgacccgtttggggatgggcggctgcaggccctttgccacctggaaataatcataacaatcccgcagccagcccgtgagcagcagcccaaccgtcagcagatagcatacgccccacacggtctccccctcgcggaacttatgcaacccaaaccagccgcccaccgcgcacaggataaagtccttccatttttcatccatcgctcttccccccggggctatcgcccttttatccgcttattccattaacctctgtccgcgctcttgcgcccgccaaaggctttccttccgcaccacaccgcgctgagctttcgcccatttatccgctccggcatcggtctttggctatgctttttacgcccgccaagtatcatccgccgcgctcaccatcgctgtcattccgagcgcagcgaggaatccccttctcaccgcttgacttgcctatgccacaccgcttgatcccatctctcccgacaacgcagagattcttcgctccgcccttcggcttcgctctgaatgacacgttgttctcttccccccagggctttcacccgtttatccgctccgacatcggcccttggccgtgcccctgcgcccgccaaaggctttccttccgcaccacaccgcgctgagctttcgcccatttatccgctccggcatcggcctttggttatgcttttacgcccgccaaaggctttacccctatgtcaaaccaagctgggcttccgcccttttttccgcgcattctatttaccttcggccacgctcctgcgcccgccaaacatcatccgccgcgctcgccttcgctgtcattccgagcgcagcgaggaatctccttctcaccgcttgacttgcctatgccacaccgcttgatcttatctctcccgataacgcagagattcttcgctccgcccttcggcttcgctctgaatgacacgttgttctcttccccagggctttcgcccgtttacccgcttattccattaacctctgtccgcgctcttgcgcccgccaaaggctttccttccgcactacaccgcgctgggctttcgcccatttatccgctccggcatcggtctttggctatgcttttacgcccgccaaaggctttacctctatgtcaaaccaagctgggcttccgcccttttttccgcgcattctatttaccttcggccacgcccctgcgcccgccaagtatcatccgccgcgctcaccatcgctgtcattccgagcgcagcgaggaatctctttctcaccgcttggcttgcttatgccgcaccgcttgatcccatctctcccgacaacgcagagattcttcgctccgcccttcggatgacacgttgttttttccccgcgccggtttgcagcccaacccgtcgcacgccctctcggctgccgactgcgctactcgtccagccaatccggccgcatcaccggcgaaaaggcgaaaagccgcccctggtaagcctggcgcaccgcctggggcagcgcctccagcacctgtggcatacccgccaggcagcggatgggcagccctagtttctgcgccaccgcctctaccacctgttggcccgccatcagcgtatccgcatccgtttccagcgccagattggtgttgttgatcagcgcgctcaccttcagctggcttttcgcctcgatctgcgccagcagcccggcgatctcctcgggcgtgccgctcagcggccggcaggcgttgaccacgtacagcaattcgtacccttcccgctcaaaatagcggtggtaccgccccagcgccgctgcgccggtggcgtccccgcccacgtcaaacaccacctgcacatccgggtcctcaaatacggcaatgatctcgcccggcaaagagggcaggtccaaattggtacctgcaaagttgggggcgtacaccttcacccccagcgcctccagggcctgccgctgcgtggaggagcggaaataagggttcacgatatccagatccaccagcgccgtccgcccctttgccgccaggcggcgggccatctccagggcgatctcggtcttgccggagccataattgcccgtcaggatgctgatcctgttcaatgttcttcctcctcatcctcaggtgtctgcgcttcctccggatattccggccacacttcgccctgcatccccgtctcctgcgccgcttgtggatattccccagcccaggcttccccggcctctgcattctccggccaactggcctgctcggggtattcttcccactgcgcgccggcatcctctgtctcatcctcttgcggagtggcatcctctgtcctctcatccgcctgcggagcggcgccttccgccattatctccgccgcctgcccgcgggcaaacccttcctgtatcggggccatcagcgggtcgtcctcccgctcgcccaagggggtgtgcgcctcttcctcctttttacggggatggaagaagcggtctttcaaattgcgcaggccgtcatcccactgatccagcctctggctgacacgctggcgtaccggcagcttttcctcctgcggcacatgggccaccttggctctggaaatgcgccggtccagcacccccagcacgatcagcaccagccccatacacacggccagtatcgtcatggccagatccatcccgccgctaaacaggttggcgatccattccatattcatatcccttcgggccttgcggcccgctcacctcttttccctgggcggcgaatttccggccgcccgtctgatattatcttaccccaccaaagggtttttgacaattttaattgcacatccggcggatattctccgttccgtccacgccttattccgcccggccttttctacatctcctgcgcggccagcatcttcagcgccgcagccgccccgtccaccgcgctggagacgatgcccccggcgtaccccgcgccctctccagccggatacaaccccgccagccccagcgcgcagccatcctcgcccctgcgcacccgcaccggcgaggaggagcgggtctctacccccgtcatcaccgcgtcgggcagggcaaagccccgcagccgccggtcaaaggccgcaagccccgcggctattccctgtgcggcatagcccggcaggcactcccgcaggtctgccccccgcacgccgggctgaaaggagggggccaccgccccaaagcgcgcggttttgcgcccggcggtaaaatccgccgcccgctgggccggggcgataaagccgccgccccctgccgcaaaggccagctgctcaaaatgccgctggtatgcaaggccgcttagcgggtcccccgcctgcataaagtcctccggccacacctgggtcaagatcgcgctgttggcgttttttccgtcccgggcgtggtagctcatgccgtttaccgccagcgccccctgctccgaggcgctgagcaccacctcgccccccgggcacatgcaaaaggtgtacacgccgcggccgtccggcgccttggccgtcagcgcgtaactggccgcgcccagcgccgggtgcccggcaaaaggcccgtactgcgcccggtcgatcatctcctgcgggtgctcgatgcgcacccccagcgcaaagggcttgggctccagcgccacgccccggctgcgcagcatggcataggtgtcccgcgcgctgtggccggtgcaaagggccaccgccccgcaggggatgcgcgccccgtcctgcatcaccacgccctgcacccgtccgtccttcacttccaggtctgccacctttgccccaaagcggaattcgccgcccagcgcctcgatctggtggcgcaggttggtcacggtttcccgcagccggtcggtacccacatgggcgcgcgcgtcgtacacggcctcctccccggcgccggcggcggccaaagcctccagcacataccgccccagggtgtgttgcttgccccgccaggtcagcttcccatccgagaaggtacccgcgcccccctcgccaaagagcaggttgctctcctcgtccagcacgccctggcccatcaaatgccggacgtccttggcgcgctgggccaccttttgcccccgctccagcaccaggggccgtgcccctgcccgggccagcgtcagcgcgcaaaaaagccccgctgggcccgcgcccaccaccaccgggcgaagggcaaacgccgcctgggggatggacagcgcctctttttccggggcgatcctgtcgctgccccgcaggcgcacccgcccttcgggcccggccaggcgcacctggaccgataccttaaagtgcacgtcctttttatcccgcgcgtctaccgagcggcgcaggatctgcacttcctcgatctcccggcgcgccagcttcagccgctgggctgcccggtcgtgtagcgccccgttctcctcttctagccccaggcgcagctcatgtaactctatcaaagcctattctcctttttccgtcctcatcccacaaaaagcgcgcaaccccgccgcatatgagaagtaccggccataacgtttatgcccggtacctgtcagcccgcgcgtgctcaaaagcacatgggcatttttattgtacgatcacccgcaccttatccgggaggatcgcctctacccgcagcgtttcatcgtccagcctgctggctacagccagggtgtattccccggggcttaaatcggtcacgtccacctccaggtgcacgcccgcctcggtcaaacggtcgatagcgctgctcatcccggtaatggtggcctttacggtgctttcggccgtgcccacctgctcgccgtccttcatctggtagaccggcagctccagcgtcttgctcttttcggcctcgccaatgcgcaccaccacttcgacctcttcatagtccacatacttcagcccgctgggcaggcgcagcttcaccttttgcgccacgtcgctggaggcgccctccaccgagagggattccagcgtcacgctgtccagcgcgtccagcacatcctgcggcccggcgcaaagcacgctctccgggctgcactcgatatccttcacctcgtacccgggggctaccgcgtcccggcctaccaggttcaccatttcgctaatgtcgatccgctgggccgggtaaatgggcacatccaccgtgaccgagtgggtggaaagcgtcagcgccgccggatccaccttggcgccaatctcgtcaaacagcacgatctcccgcgtgcccgagtaggtctccgtcgccccggccaggttcagctccacccgcgccttttccacctgctctaccacgctcttggccccggagatatccaccgtattctgccccagggtgcactcgccctgccagtacccctccggcaccgtgcctacctggtcgcaggagatctgcaccgtctttttcatcagcggttcgatctgcaccgtcacctcgctgggccgcacgctcaccacctcgccagtggtcgtataggccgatacccgcagggtctgctcgccttcggctgaaacgcctgaaaagtcgatacgcacgctgatccggtccgccgagaccgagcgcagcctggattgctgcacggacagggaaacatccgccttgagcttcaaaatatccgccaggttagcgcaggccagcccgctttgctccatggtctccacacccgatacggtgatggatagcccccggtacacatgggtgcgggccgggtcggtcacgcccatcacatagctccataggataacggcaaaaaacaccgccatgatcttaagcagcaggttgtgccgcagccgcgcgcccacccgcttgcaaatgttaatgagtttttctttcacgtcgtgccctcctgatgcgcgtggccagcgaacccttggaaatatgcggggcaaacaggccaattaacacttcgcgcagggtcttggaattgagataccgggtcatctgcccctcccgggtcatggagatcaccccggtctcctcggagaccaggaaggtcacgcagtccgcattctcgctgatgcccatggccgcccggtgccgggtgcccagttccttggccagcgtgtccgaatcgctcagcggcaaaaagcagcccgccgcggcgatcctgccgccccgcaccaccaccgccccatcgtgcaggggggtgttgaccacgaagatgttctccagtagctggctggtcagccgcgcgtcgatgcgggtgccggtctcgataatgtcgttcagcggcacctggcgctccaccacgatcaggcagccggtcttagtcttggccatgttttgcagcgcccgggccatctcctcagctacgccggtcaagtccagcgtggcctcggtatcggccaccagcagatcccgcgcaccctgcaggatcttattgcgccccaactgctcgagcagacgccgcagctccggctgaaacagcactacgatgatgatgataccggaatttaaaatgtagctcagcaaccagctcagggtttgaaattgcagtatatcgctcagctgcagcgccacgatcaggatgcccagcccctttaatacctgtttggcccgggtctgtatggtcagcttgagcaggtaataaatcagcaccgacatgatgccgatatccaaaatatcccatatgccaatgctcataaagctattggtcagcatgttcacggtttgttccaaagtttcatttccccctaaaggattatctttttatcattgtatcatatttgccctgtgctttgtgctttcccccgggatttttttgcgtccgccccaaaatcccgcagcccttgcgcgccagcggctggccgcagttatccaccgtccgtttacaggatttttaaaacccgcacccaactgccattttttgccatctgtatgcctttttccccttttcaccagggggggcgggtatctttgcgccttttcccacttcccgccaggggataaaaaaggctgcggaagaattccttccgcagcctttgtctaccgtcgtccgtcttttacccctgccggcagcggcaaacatgcccttcgccatggtgatggtggtgcccgccgcagccgccctgcccgccgtggctgtggccggcgcagctcttgcccgcgtccgccagctcgccccgggccagcgccagcgcagcgtcttccgccgggcccgcagccccggtgatcacctgcaatcccctgccctcaaagttctcccgcgcgcctgcgcccatgccgcctgcgatgatcgcctgggcgcccaagcctgccaccagcgccggcagcggccctttggcattgtcatggccggggtttttcaccacctcatgctgggtcacctgccccttatcgtccaccgtaaaaaactcaaactgttcacacccgccaaaatggccggcgacctggccgccctgggcggccactgcgatcttcatcatcctttgtcttcctcccattccccggccggggcgcaggggcgtccatggcagcacccgccgcggcggcggcaccgtctgtgggcgcagggcgcgctctccccatcgcacaggcggtaatcccccccggtgatggtcagcgccacgccttccaccaggcagcgcgccagcttggcccgcgcgtcgttatacagccgctgggcggtggtgcgcgctacgcccatgctttccgcgcacgcctcctggctcagcccttccagatccatcaggcggatggtctcatattcctccaccgtcatctccacaaggccggtcggctcccggtccagcgggccgaaccggctgcacagcggcatgccgcacacgcgcttacacttcctgggtcttggcatcgttcaagcgtcccttcctcttataaccggtcgtttggggcatcgtgcaaacccgccgcgcccggcaggtttttggcatatgccctttatcttgattatactctttttcgggcatatgtcaaatactatttctccatccgccgcagcgccgccggggtcaccccatagcgccgcttaaataccttgataaaatagctggggttgtcaaagcccacctgggcggctacctgggccacgggcgtgcctccctcctccagcagcaggcgcgccctttccagccgcatggccagcacgtactgacggatgggggtatggatcatccgcccaaacacgtgcatcaggtgcgaggggctgtagcccgaaatacgggccagctgctcgacccccagcggctcgtccaggtgctgggcgatatagtccagcacctggcgcacgcccccggcggccgggtcctgggcgggcggctgcagcccctcgcccaggcggtacaagtggtagagcaaaaagtaaagctcgccgctcaccgccaactcccaccctgcggcccgggcggccagcgcctcgcatatcgcctgcatgctacgggccacctgcgccccggcaaagctgtcccgggcaatcagccccggcgcgcacagcctgcccgccaggatgggttcgatatacttgcgggtaacctcgcccgtgctttgcagcgccgcggggtcaaaggtcaggctttgcaattccagcatcccccctgccgggtgcgcccggtggggcaagttgggcggcagcaccagaatatccccctcccccagggtataaagcgcctccccggcctccagcgccagcgcgccggagagcaccaggtccacctccatctccttatggctgtccgtcccgggcgcggccagcgcccccgcgtccagcgtacggcaaaccaccggcatgggcgccaactgtatctccaaagcaagcctccttcgtactccccctgatgatcgtagcgggtatgaagcgttgtgttcgcccggcgcctgcgccgttgccgggaacatgggttgcgccgctaccccatacttttatgcctcattttgtgaatcagctccattatacacgtttcacgtcctgcgcgccaattcaattgccgccaccctttccaacgcttgcgctaaaacgatttacaaaccgcctaaaacatggtattctatcttcatcggtaacaccgtgtaaagctgccctgccgcgtttaagagaggcagcctgcacaaaacgcagttttaaagggggaaaagaaaaatggcacttgtcaccatgaattttgaaagccagtacctgatggtcaatcacgaggtcagcgtgatcctgccggataaaccgcgggagcaatcccctgccgatttttacggcagcggcaaaaagtacccggtgctctggctgctgcacggcacctttggggaccacagcgactggctgcgcaagagcatgatcgagctgtacgcctgcgagaacgacctgatcgtggtcatgcccagtgcgatgaacagcgattatatcaactggcccaccttcggcaccggtttttttatggaggattacctcatcaaagaactgatgccgctgatctacaactggttcccggcctcggacaagcgggaggacaactttatcgccggcctttccatgggcgggggcggtacgggccagttcgccaccttccatccggagaaattcgccgcggcagccatcctctccaactcgccgcgcaacctgcataaggagatcgaacgggtgcgcgcgggccaggcgcccgagggttttggcgccatggatctaaagcgcatccaaaaccgcatcacctccctgggcggggagcaggcctatctggacagcgcgcgcaacgcctgggataagctgcccgagcagatcgcaaagggcgtgctgccccggctgtacttcgccatcggcacggacgatatgctctatgagaactttaaggagttccgcgcctatgccgaagaaatcggccttgacgccaccttcgaggagatccccggttaccagcacgagtggcgcttttgggatctgaccatccagcgggcgctcaagttcttcggctttgattcaagggacgcgggcaatcccttttaaggttcctttaaatgccggaaggggcgggctatcccgcccctttttgcgtgccgcccgcaacgggcgcgcgcccgctaaaatattgtgcccaaacccataaaaactgttgtcactttaaggcagaatgtggtattgtttacttggactgtttataaacggagaagtcggctataaacaggggaacacgcaaggacaatcccggcgttttttgtccggggcaagatttaagggaggaaagattatggctattaaaccggtaaaagtcgccctgatcggctcgggcgcaatcagctacacttacctgaacaccatggtcaacacctttggcatcctggacgttgtgggctgctcggatatcattcccgagcgcagcaaggcccgtgccgagcagttcggcatccgccagatgaccaatgaggagatcttgaacgatcccgagatccagatcgtggtcaacaccacctatcccttgagccactatgaggtgaccgaggcggcgctcaaggccggcaagcacgtgcagagcgagaagatgatggcgggcgaatatctggaggccaaaaagctttacgatctgtctaaggaaaagggcctctacctgggcatggccccggataccttcctgggcggcggcctgcagacctgccgcaagctgctggatgccgggatgatcggccagccggtcaacgcccaggcggtgctcacccgtaactatcagcccgccggcgagggggattcgctcccgttcgtcatgcagtacggcggcagtgtcatgttcgatatgggcagctattacatgcacgccctgctctcgctgctgggcccggtcaagcgcgtcaacggctttgccaaaaagtccagcgagcagaaggctttctgcaatccgcgttcgccccggtataaagagaagttcgatctgccccagcccaacatcctccagggcgccctggagtttgaaaacggcgtgctgggcaacctgacggtgctctccgagagcattggcgagaccacgcgcctggagatctggggtaccgaaggctgcatcatctgcccggatccgaacacctacggcggcccggtgtacctgatgcgcaacaacgtgatggagcgctacgaggtgcccctcacccacggctatgtgaacaagaacaaggtgttctacgcgcccggcacggcccccgaggtcatgtggcaggattctgtgcgcggtatcggcgtagcggatatggcctatgccctgcgcaacaaccgcgccccgcgctgcagcgccgagatgggtctgcacgccatggagatcgtccacggcatcatggagagctgcaaggaagatggcaaggtctacaccatgcagacccccttcacccagccggctccgctgcccagcggctatgtcaacggcaccgctgccgaggcctgcctggacaactaattttccccgggcaaaaactggctgtaataaaaaaggatggcgctttgccatcctttttttgtgtcccttatttctctttttgccaacgcatcgtatattcgcgctggccggtctgctcatcacactgctctgaggccacaacaaagccctcccgccggtaaaaacgcactgcacccgcgttttgccggtatacctgtagggtcagcgcgctgttttccgccttggcgcacgccaaaagccgccggcccacgccgctgccgcggctgtgctcatccacaaaaaggcccgcaacgtacccatccaccagcccgataaagcctatagccgcgccgcctgcataagcgacatatacccggctttggctgacggccttacgcacttcctcaaaatgcccatgccagtacgcctcgggaataaagccatgcgcctgcacattgcctgccagccacaggcgcatcaccgcgtcaagctcctgctcgccggctctattgatcctcacccgctctgcggccacctattccaccacccgtatccactttttggatttcaggcggaaaaggcaccagatggacttgatggcccagtcgatcttcagcgcggtatagatccaaaacggcggccagctccacaccagccccgccaggtaccccagcggcaccgaggccagccacaaaaacgccacgtctgcgatcatcaggaatttggtatccccgccgccccgcagcacgcccttggtcagcacgccctgcatggtctggaaaatcaccatcaccgataccgccatcatcagctggaaggcgatatcgcgggtctcttgggtgatgttgaaaccgtttatgatggccggggtaatggccagcaggatgcccgcggctgccaggccaatcagcacgcttaaggccgtaaagctcacgccctggcggtaggcggtctcccgttcccccttgcccagcgtgttgcccgtaacgatggaggccgcattgcttagcccctggttgaacacggtcgataacttgaccgtctgggcgatgatggcgttggccgccacaaaactggccccaatgtgccccacgatgatggccaccatgttgttccccagggccagcagggtatctgacacgatcaccggcaggctgtaggtaaaaaacacgcgcacatggtccccgcacttggccaccagatcccgcaggcggtaacccacccgctggtctgcgaacagaaaatagcctacaataatgccaaactccgcgatgcgggcgagcagcgtacccagcgccgccccttcgatctgcatctccggcgcccccaggttgccgaagatgaatacccagttgaaaaagatgtttaccacaaagctgacgatggcggcgatgagcggcaggcgcaccaggtggaccgagcgcagcacgatggtcagcgtcagcgatacggccatcagcagatagcagggcgcgctgatgcggaagtacaatacccctttttcgatgatggccgcatccggcgtgtacaggcgcatcagcgcatccggccatatccaggtgaccagcgcaaaggccgcggccacggctacccccacccgcagcatgatggtcaccacttttttaagcgaccctacgtccccccgcccccagtactgggccgtgagtaccgccgcgcccccgcccatgcccatgcacaggatctggaagatgttgataaactcgttggccagcgacgagccggagatctgcacctccccatagctgcccagcatcatggtatccatgatgtttacgccgatggtgatcatgttctgcagcaccaccggtatagccagcgtcaagatcaatttgtaaaagctcttatcccgcacgaaaatcttgtgcactcgtccctctccccccgaattgtgaaatgatggtgtccccgcccgggcggccaaaagccgcacggcctgcccccgacagccgcgcggcaaatgcgctgaaacgcctttgtttacgctgtatttatcatagcacggatggcggcaaaaaacaatttagcatgctaaatgatctttacaattcgcagtggatttaccaggatttcacattccattcaggcttgtaaaaaaatggtgtcgtaacagtttattaaaaacttactcacgaattggtcataaccccctggtatattcaatataacgaaacggggaacccccaaagttataatggataaaggggcggcccggagaaaggaagtgaacgaggttatggaagatagcgaggtacaagtaccggcgggcccgccgccaggcgccatcgttttggctgccccggtttttttgcggcggtaaacccgaatcaaccccttctctctcacatagataaagacggctttgccgcaatatacatgccacaagaggcggggcccaagcgccccaaaacgaacggaaaggagaagatgttttttcctccgatagaatatagattgattgatcataccttccccccaatcgcggaaaaagggcgccgccttttgggggactccatcgccggcgatgcatgcgcccgccgccacaggctcccaaaggcggggtaaagggcgggcgccacaaggcccatcaaaagataaattggatagatgcaagcgcaagggcagggaaaattccctgccccttgtatttatttagaattatgagagagcctgcttgcgtcgcccttattctataattatggtgcaaccacgtcagcacggctcacttctaaatactggccgtctttcacggtaatatatttttctccatcgaaattatcatttgtcacaatcgctcttattccaccggaaacattggagagcactgcaatataagcagaataccgctcatcattacagacgactttatactccccggcgggtatgtccacaccgatgcggtacatcccctctccccactttccgccttggggttggataggctcaatttcatcggccggggcgaaagtgccccgttccacagtcagatactgcccatcttttacctctacaaaggcaaaggtatccgtgttcccgttttgtataatgctatccagttcccccgaactatccttgctcacttcataatagcaggaggagttggctgcaatacagtaaattcccgccggtatatcctggccgattttatacatccctcccgcgcgccagtgcaccgtcggcgtaggttcgggcgtgggctgcggagtcggcggaggcgtaggcaccggcgtgggttttggggtcgggctgggtgagggcgtagcggtagccatttcataaagcagggtgttgctgatataatccggcacttcattcttccctgctgggataaagccgatgtagataccagcgggagtcttggtcttttcagaaaagcccaggtataaaaagtacatccgccccgtctgtccttgtgctaacgtatcccaaccctcttcattaatcgcgcgcagcaaggttacctctccctgctgcgtcgtaacggccaaggcaggcgtatcttcaagcgtggttttattcccaagtttgccatctacatacatcagtacatcttcaagccggttttcgctcgcttttgtggtatagatatcttccggcgctgctatataaccttccacatccgggaaagtcgcctggctgccggggccgcaaccccataaggccgtcagcaacgctaatcccagtatccatgctgctatacgtctgtacccatgcccctttttcatttgtactctcccctatcattttgattttgcataaagtggactgcttttttaaataataggaacatacgctttctcaaagaaatgtatataaccgtggtaaaattaattataccctgtttatcacagcatcttatagatgtctacattatgttttttggatactatcgctatattttccttcttgcgggcgggggtttacacctagacaaccctctctattcgcgctacaataggggtagcgattaagccctattttccggacattgaaaggagtgcgtcaagcatgacggtaaaagagatcttatcccaactcaccctggaggaaaaggcgggcctgtgctccggggaggatttctggcatctaaagtccatccagcggctgggcctgcccggcgtgatggtgtgcgacgggccccacgggctgcgcaagcaggcctctgaggcggatcatctgggcctgaagctcagcgtgccggcggtctgcttcccggcggcctcggccacagcctgttcgttcgatccggagctgctgcgcgaaatgggcgcagccctggggcagatgtgccaggccgaggacgtcagtatcctgctgggcccggcggtcaacatcaagcgcagcccgctgtgcggccgcaattttgaatatttctctgaggatccctgtctggccggcgagatggccgccgcccacatccagggcgtgcagagccaaaatgtgggtaccagcctcaagcactttgccgccaataaccaggagtaccggcggatgacctcctcttcccaagtggatgagcgcaccctgcgggagatctacttccccgcctttgagcgggcggtaaaaaaggcccagccctggacggtgatgtgctcgtataaccgcatcaacggcgaatttgcctccgagaataagtggctgctcaccgacgtgctgcgggacgagtggggctttgaggggtatgtgatgaccgactggggcgcctgcaacgaccgggtgaagggtctgaaagccggcctggagctggagatgcccgccagttgcggcgtgaacgaccgggagatcgtgcgcgccgtgcgcgaaggcgctttggatgaagccgtgctggaccgggcggtggagcgcattttaaacatcaccctgcgctacctgcaaaaccacaagcccaccgtttgcgatctggatgcgcaaaaccagctggcccgcaaggtggcccgggagagcatggtgctgctcaaaaaccaaggtgccctgcccatcgccaaggagcaaaaggtggcctttatcggcgcctttgccaaaacgccccgctaccagggcggcggcagctcccatatcaacgccacaaaggtgaccggcgcgctggaggcggcccagggccgcttcaacgtcagctatgcccccggctattctttggagggggaaacgccagacccggcgctgatcgagcaagccgtatccgcggcaaaggcggcggatgtggccgtggtgttcgcaggccttccggatgcctttgagtccgaggggtatgaccgcgcacacatgcgcatgccccagagccataacgccttgatcgaggccgtggccgcggcccagcccaatacggtggtggtgctgtacaacggctcgccggtggagaccccctggatcgatcaggtcaacgccctgctggaagggtatctgggcgggcaggccgtgggcgccgccacggtggacctgctctttggcgattacagcccctgcggcaagctggccgagaccttccccctgcgcctggaggataacccctcttacctcaactttcccggcgtcaaagataccgtggagtaccgcgagggcgtgttcgtgggctaccggtattacgatagcaaaaagatgccggtgcgcttccccttcggctttggcctgagctacactcagtttgaatacagcgctcttcgcttaagcgccgataccctgggcccggacgataccctgacctgctacctcaaggtgaagaataccggttcccgcccgggcaaggagatcgtccagctctacgtgcgggactgcactggcgcggccctgcggccggataaagagctgcgcgcctttgccaaggtggccctgcagcccggggaggaaaaggaggtggcgctcaccctggatatgcgcgcctttgccttttacgatgtggaaaaccacgcctggcgcgcggccgacggcacctacgagattttggtgggcgcctcttcccgggatattcgcctaagtggtgcagtcaccttccaaaatcccgttaaaaatcccgcgcaggtgcacgagaactggacggtgggcgacctgctggccgacccgcgcaccggcccggccgccaaaaagctgctggggcagatgatgcccgacctggacctggaggacgaaaaggccaaggaggatatgatgctgcacgtgatgctcaacctgccgctgcgctctgtccgcagtttcgtgggcgcggattttgataacgaccgtctgcgcggcctgatcgatgagatgaacgccgcgctaaagggttaattccaagacgcctacgtttataaaagcacagcccccgcttttagcgggggctgtgctttttacggcgttataggccctgtaggaggaaaggccctagtctttccctgtcattcagagcgggcccgcgaagaatctcccgcgttgcctgttgtgctctgtttccccgccgcgcctgtggaaacaccctttccagcgggtaaccccgagattcctcgttgcgctcggaatgacagattgccgccggcatgtcacgcaaagcgcatcttcctttccctgtcattcagagcgggccgcaggcccgcgaagaatctcacgcgttgcctgccgcgtttcgcttcccctccgcgcctgtggaaatgcccttcccggcagataaccccgagattcctcgctgcgctcggaatgacagagatttgctttttaagcaacctacttgttcaacccgctgcgccggcagatgaagttcatctgctctacttataaccattcctttccctgtcgttcagagcgggccgcaggcccgcgaagaatctcacacgttgcctgtcgcgttttgctttccctccgcgcctgtggaaacaccctttccagcgggtaaccccgagattcctcgctgcgctcggaatgacagaggtttgctttttaagcaacctacttgttcaacccgcagggccgacagatgaagttcatctgctctacttataaccattcctttccctgtcgttcagagcgggccgcaggcccgcgaagaatctcacacgttgcctgccgcgtttcgcttcccctccgcgcctgtggaaatgcccttcccggcagataaccccgaaattcctcgctgcgctcggaatgacagaggtttgctttttaagcaacctacttgttcaacccgcagggccgacagatgaagttcacctgttctacttataaccattctgtcattcagagcagggccgcaggcccgcgaagaatctcacgcgttacctgccgcgtttcgcttcccctccgcgcctgtggaaacaccctttccagcgggtaaccccgagattcctcgctgcgctcggaataaccagcagaaaagcccgcctctgccgtatggcccatctcgagccaacaggcaaaaaggcagccccgcaacctttaccaccctacacctttttaaagcgggtggcctcaaccatgggcatcccagtatcgtaatccagctggcgcgcttcccccggctcggtctccttttgccgggtgtagccggtataatcccatgtcgcgggccgcgcgtccgcccgccagggccgccgctcccaataatagcccctaaagggatctcgtgtgcggttcatcatctccaaaatccggtcgtgcagggcgtcccgcaccgcggcggtatcctcccggccgatgaggttctccatctcgcaggggtcctcgcgcaggtcgtacagctcgtcggtgcccagcaggttgatcaccagcttatagcgcccgtcaaaggccgcccgcatgggctggaagcccccaaacccgtcgtgatccacctcgtagcggccaaattcgaaaaacacctgctcatccaccggctccgccccgcctgccagcgcaggcgccaggtcgtgccccggcagggtgggcgatgccacccccatgtaggtaagcagggtgggcgccaggtcgatatgggagaccggatggggatatacccgccccttttgcgccgcgccgccggctacgatcagcggaatgcggcagatctcgtcataccccgccgggcccttgccgctcaaggcgtgggagccgataaagtccccgtggtccgaggtgaacacgatcatcgcctcgggcgccatctcccgcgcggcgtcgatcacccggcccagctgctggtcggcaaaggcgttgcagcccaaaaggtagcgcggggtcagcttcagcgcgtccgcatcccgcttcaggttctcccccgcccaggcccgctggtggggcggcttgttttgcaggtcgtcccaaatattggcgcttttggggaactcgtaattttcatacatggaggcaaagggttccgggcagagcgaggggccgtggggctcatccaggctgacggtcaaaaagaagtcctccccgccgttctcctgcaaaaagcgcaccgcccggtcggctacccggtagccgtaggtaaactcgggctttacggggttgccctccacccgggagtagcgccgctcttcctcggtcagctcctctaagtagcagcgcatatcataccagtagtccgcgtcccaccccggcgggcaaacgccgttgccaaagtagtcgcccccgtccaggtgccatttgccaatgtagccgcagtgcacccccgcatcggtcagccgctgccccagggtcttgacgtccgcgttaagcgccaccgaattggtccatcccccgttcgagtgggggtacagcccggtaaagatggcactgcgggccgggccgcacaccggctggcaggtgtaggcccgctcaaaccgggtgcctcgcgctgccagcgcgtccaggttgggggtgtgcatgtcgccattgccatagcagcccagcatatcccaacgggtggtatcggtcattaaaaagatgatctgccgcttgcccgccatcttacatttcctccttgatcgcctgtatggccctgatggccagcatcgccgattccggatgggggcaaagcttatcccgggtgataaacacccgctcgccgcccagcgtgcgggccgccgctccatccttttcccgccgcaccagggattcaaagcggctaagcggcatggcgatcacctgctccacctcctggccgggggcaaagtcagccgcgtcggcctgtgccaaaaatacagtggccacctcccggtcgcccggctcgtcctcccggcactggccaagcgccgtcaagccctgggcctgcagctgcaatcctacctcttcgcgcacctcccgcagcgcagcatccaggggcgcttcgccggcggaaatatgcccggtggttcccgcgtcgtaaaatccgggataggtctttttctccgcagcccgtttttgtaaaaatacgcacctttcccgccggaaggtgccgtacagccatacatgtaccacctggtgccagtgctctccgccatgggcctgcgcccggggcagctcgcccacagggtttagatcatcgtcatatatcgtcagcatttcctcggccatctgcattgcctccttatcaaagcgccggttcccgctccggctactgcgccccgcacgcgctggggaagcgcacgtcctccgcctttacgctcatgggcacatgggggcagccctcctcgtcgtaattggggccgcagcgcttaaagccgaaccgctcgtaaaacgccgccacccgctcctggccgttgaccagaatttcctttgccccatagcgcagcgcccggtccagcagcatgcgcaccatcaggtccccatagccctggccccgatattctttcagcaccgcgatccgcccgatgcgcagcacccccggcttttccatgatcagccggccggccgccaccgtctttccgcccacgttgatcatcccgtggtgggccagcgggtcgtgctcatccacctctttatcgccggaaaagccctgctcctccacaaacacggcccagcgcaccgccaaggccggctttgccgcctccatcccctggacgaatttaccctcaaacatggtctttctccttcctttttgccatcaaaagcgccgggcagtcccggccctttaaccagttgcacccgccggggcagccaaagcaggggttgaccggctctcccgcccgggcccgcgcgccaaagttctcgtccgccaaaaaggcccggcccaccgccacgatgtccgccaggtcgcgggcgatcacgtcctgcgcctgctccggcgtgcggatggaattgaccgccaccaccggcacctttaccgccgcatgcaccagggacgcgccgtatacaaaccagttatacccaaagtcctccggaacggattccggcacgggccccagccccgccgatacgctcaagtaatccgccccggcctgctccaacgcccgggccagctttacgcccgcgtcaaagtcgttatcgtttacccccatgcggtagcctacgataaagtcctccggcagcgcggcctttaccgcccgcagcacctttagcggcagggcgtacccggcgtatgcgtccgtgcgcgtgttataggtgggcgaggtgaattcgttgagcaggtactcgtggcagccgtgcagctctaccccgtccatccccgccgcatgggcgcgcctggccgccgccacgaattgcccgatgatcgtttcgatctcttccgcccgcaacgcccgggccttgcggccctccctttcgcagtcgctgggtgcggtcaggtcatcagttaccgtcgccgccgccttgaacccggcgtggtgcagctgcacaaagcataagctgcccgccgcctttaccgcctgggcgatggccgccatcccttcgatctgcccatcctcccacaggcccagctctccccggcccaaccgtgctttaggggcgatggcggtgcactccaccaccacaagccctgcgccgcccctggcccgggcgccgtaatgggctacatgccccgcatccgcccggccgtttagctctttgtcatcccggcgggtcagcatgggcggcagcatcagccggttaggcgcgcgcttcccctttagcgtaaaatcctcaaacaaatgtttcatcttacatcccccttttcaccgcagcgcggcggccatcttctctatcggttcaaacaccggttcatgtcccttaaagtagcaaagccgctcaaagcccgcagcttccgccagcgccagcgcttgcctaaagtactggcccaccgcttcgggcgcgtgcgcatccgagccgatggtggcgatctctcctcccatctcccggtagcggcgcaaaatatccgcctccggcatggggccgccggtctttgggaagcttgaggtgttgatctccagccccttgcccatctccaccagcctttgcaggatcgcctctaccgcctcccggtagtcccccaggcgcagggccgggtccgcatagggcgcgcatttggcgatgtaccccaaatgccccatgcagtcgaacccgtcccaggccagcagcgagtcataaaccgcgtccagataccgaagataggcctggcggcgggtcaacccctcataatactctttatcgtagcaatcccatcctcccgccacgtgcaccgagtagagcaggtaatccagcccataccgctgcgcgtacagccgggtctgggcgatggtggcgggcatataccccacctctaatccccaaagaatggtcatctgcgggaactgctcccgcgccctttcgatctgctcgcgctcccggtagggttcgcacaaaaacagtatctccttatccggatggccgatatccacatgctcggtgatgcaaagggtgccgatgcccttttgcagcgcggcctggcacatctcatccaaatgcgcctgtgaatctcccgaaagatgggtgtgcatatggcagtcaaacactttttgccgcctcctttatcccgtaatgagaaagccgcctaacaatttaagcggctttaccgttccttacgcttggtcggcctgtggcgcgttccgtcctcttcttctatgatcacgttgtccagcatcgcgctcacgtttttgcgcagcgcctgcagatattccgcccgcagggccagctgctcctgcttttccgcctcgctcaacccctgcgtgcgggatttgtgcgccagggcgttgatgcggttgatcttctccatcggaagcacgataacccgttctcctttcccccgtgcggcccggccgcccgatacagggcaatgcccttgttcatttatacgatgtccctacaatatctatacaacgcctatattattcgacgcacccgtccgcttttcctccctacaaaccggttcgtcaatcggtttcgggctgtcgctcctacgtttctgcagctgtacggcttttgtcattcagagggagggacggctccgggtgaaaacccatggcgggcaaaggcgcctggggtgtgcaggggccagagcggttaaaagggccccagcccccacgcgaagaatctcgcgcgttggcagggagcggtgcttgacctgtgctacgtgatgcaggcgaggccaacagggcgtaaagagattcctcgctaacgcttcggaatgacaggattggaaacgatgagctgcgcgggaaagtataccttagcactcgctgcattgtcattcagaacggaggcgcagccggagtgaagaatctattgcgttagcagaaaagcgacgcttgacctatgctacgtgatgcaggcgaggacaacagggcgtaaagagattcctcgctaatgcttcggaatgacaggattggaaacgatgagctgcgcgggaaagtataccttagcactcgctgcattgtcattcagaacggaggcgcagccggagtgaagaatctattgcgttagcagaaaagcgacgcttgacctgcgctgcgcggtgcagccgtaacaatgagagtaccctgagattcctcgccagtggctcggaatgacatgtgcagcatactgttgatgagtggaaaggtatactttagcactcgctacattgtcattcaaaacagagggcagctagtttatagcgggcgagaaaatagggaaacataggaagtcaggagcgactaaaagggcgatagcccgggagcggaaccgggaaacgaaacaaaaaccatggcgggcgagaaaatggggaaacataggaaattaggagcggctaaaggggcgatagccctgtcattcagagcgaggccgtaaggccacgcgaagaatctcccgcttcaccgcgcagccgcgcccgacctgtgcggcttaaaaatggcagaacccggagatgacggcagattcccgctccagctccgcacggcagggcaaaaaaacctcggccggcagtggtaaacccatgctttgggccgcgtctttcgcgcccggcagtccatgggcgccgtctttttttgcatccccctttacattcgctttgggcgtgttataatgttatttcccactttttccaatcgctcccccagccccataagccgcggggcgtattttgctgcccgcagggcagatcattttataaaggagggctgcacatgtccgtacaaaaccatcccgcttatccccaagagcaggcgcacctgcaacaaaccctctccctcatcgcccgggaaaccaccctggcccgcgaggaggagcgcgagcgccgggaggcgctggaggatacccgccgccgcagcggcgagggtacagccctgatgctgcacgaaatgcaataccgcatgacgtcccaggccctccacaacctgcagctggccgcaaaggccccctattttacccgtgtggattttgcccaaagtggcgaaaccgcccctaccgcctactatatcggcaaggccggggtgctggacagccgcacccagaccccctgggtgatcgactggcgcgcgccgctggccaacctgtactacgccgggcagctgggtcaggtctcctaccgggcgccggacggggagatcgaaggggaacttagccttaagcggttgatgaccatacaggatggccggttgcaaaccatctttgataccgacgtggtggcccaggacgcctacctgcaaaacgtgctgggcgagagtaaggacgaccgcctcaaggacatcgtctctaccatccagcgcgagcaaaacgacattatccgcgccccgctgcgcggcccggtggtggtgcagggcgccgccggcagcgggaagactaccatcgccctgcaccgcatcgcctaccttttatatgcccaccggggggaacttgccccctcgcagatgctgatcctggcccccagccccctgtttttggactatatctccgccgtgctgccggagctgggcgtggaccaggtgcgccagtggaccttcccccagctttgcgcccgcctgttgggcaaggatatgccccgcctgcaaaccgaggacccgctctttaccctgctggaccccgccgcgccccaagcgcaaaagcaggatctggccctggcggcccgcctgcggggcaccttggccttccgggatgcgattgtgcggtacttagagcaggtcgagcgcagcctgccgccccaaaagggttttacgctggaggggcagaccgtgctctcgggcgaggcgttacgccagctttatctccaggacctcaagcccttccccctcaagcggcggatggaggagcttaaaaaacctctgcgccgccgggtaagcgagatgctgggggcgctaatcgccgcgcgggaggagcgggccgccgccatggcgctgctgctgcgtcgcacctccccggaggacagcccccagcgccgggccgccatgcagcgcatctacgcccagcgggaccaggccgtagccgccctgcgcgagcagatccgcgcctatcctgcccaggcagccgcggcgctcaccccgccccgggtgatggatgcctatatcgcctttctctccagccccgtgcctcaggggatcgatccgcaagcctgggccgccctttcgcgggtagccctgcccgcgcttcaggccgggcgcgccgccgaggaggacctgcccgccctggtgctgatccgccgcaagctctacggcctgcacgaggagatggctatccgccataccgtggtggacgaggcgcaggatttttcgcccttccagtttgacctgctgcgcaccctggcgggcaacagctccttcaccctggtgggggatctggcccagggcatccgcgcctatcggggcaccaccgcctggcgcgaggacctctccgccgtgttccccgaccccgcgcccacttttttggggctgaccaccagctaccgctctacggtggagatcatgcgcctggcgggcaaggtctgtgcccgccggccctatcccggcatggtggccgcccagcccgtgctgcgccacggcgaggctccggcgctggaattcgtcaagccccgggcgcttggcggtgcgctggccgcccgtgtccagcgcttgttggatgaagggtaccgcaccatcgccgtggtcgcccgggatgagaacgagtgccgcccgctgcaccggggcctgcaaaaggcgctggggcagccggtgcaacggctcacccctaaggatacccactatgccggcggggtgatggtggtgtccgccccactggccaagggcctggagtttgacgcggtgctcatcccggatgtcagcgccgatcgctacccgggcagcgatctggacgcgcgcctgctctacgtgaccatgacccgccccctgcaccggctttactgctactgcacgggagaattgaccccgctgctggaggcggcggattttgaggcggaaagctaagggcagcgcgcccgcgcccaccgccctcctgtcatgcaatggccactttaatggcctccgccattcagagcgggaggcgctttaccctccacctgtcattcagagcgagggctaaagcccgagcgaagaatcccctgcatcgccccttagcggcgctttactcgcgccgcagaagtacgggcccaaccaagcggtttccacaagattcctcccctgcgctcggaatgacagataaaagttgtagtggtgctcacgatgatatagagcacaacactgcccgtcatcctggcgcagcccgctttgccctccacccgtcattcagagcgggaggcgctttaccctccaccctgtcattcagagcgagggctaaagcccgagcgaagaatcccctgcatcgcctcttagcggcgctttactcgcgccgcagaagtacgggcccaaccaagcggtttccacaagattcctcccctgcgctcggaatgacagataaaagttgtagtggtgctcacgatgatatagagcacaacactgcccgtcattcctggcgcagcccgctttgccctccaccctgtcattcagagcgagggccaaagcccgagcgaagaatctcctgtatcgcctcttagtaacgctttgcccgcgccgcagcggtgcagaccaacctgcccttccccgtttgcgtcccagcgcgcaacgcccttcctcatctttatacgccaagcgggcggctttcgccgcccgcttttttcatcctgtacccttaaaacggattgcccgcatccctcgaatcaaagccgaagaacttgagcgcccgctggatggtcaagtcccaaaagcgccactcgtgctcgtatccgtcaaactcctcaaaggtcgcctccagcccgatcttgtcggcgtaatctttaaacttcaggtagttctggtagccaaagtcctccctgccgatggcgaaatacagccggggcagcgtccctttttcgatcagcccgggcagcttatcccaggggttgcaagcgctgtccaaaaacgcgtccagcccgcccagctcatctacctgggtctgcacccgtccgcggaaccgggtcataaacgggtcgccctcctcccccggttggcaggcgaaaagcgccttgtaatccataggcccggcagaaagaatggccgccccggcaaagcgctccgggtaggcgcaggcatactgcatcgtgccgcccccgcccatggaaaggccggcgataaagttgtcctcccgtttatccgaggccgggaaccagttgtagatcagcggcatcaattcgcggatgaggtaatcctccatgaaaaagccggtgccaaagcccttccagttcatgtaattgctgttgagcgcgctgggcatcaccacgatcaggtcattttcgcaggcgtatagctcgatcatgctcttgcgcagccagtcgctgtggtccccaaaggtgccgtgcagcagccagagcaccgggtactttttgccgctgccgtaaaaatcggcaggggtctgctcccggggcttgtcgggcaggatcacgctaacctcgtggttgaccatcaggtactggctctcaaagttcaggttcactagtgccattttaattccccctcttttttctctatcagggctttacaccccgtttacccctttatgataccacaggcggggtcaaaagcaaatcctttgccggttcaacatccatctccgcccccctctcgtcccagcgcgcaaaaaatactaggtgaaatgcggcccttatggtagaataatagggaacgttcccataaaatagcaaagggggcgtacagcatatctgatttaggcatgcaagctgcgccctgggcgacgcattcagcttgcaagccgtcttcttcgcatcacagcaggagatttctgcatcgatctatggagatcttgcgcctgtttggcgcttaaaattgagggggtatggttttgagggagtatctacgcaagatggacccgaacgtcaagctgtttttcatcatctccgccctgatcggcctgggcatgggcttgagcgattcggtgtacagcaactattttaaggatgtctatgacgtgaccgccctgcagcgcgggctgatcgaaacgccgcgcgagctgcccggcatgttgctgctggtgatgaccagcctggccggctttctgggggatctgcgcctggccatcatcgctcagctgttgtgcgcggcgggcgtgctggtgctggggttgtggacgccaccctttgggctgatgctggtgttcctgttcatcaactccaccggcatgcacctttacatgcccctgcaggagtccatcgccgtatccctcatcaaggatggcaagaccggcagctggctgggcaagtttaccggctttcgcaccgcgtttgtcatggtggcgggcctgctggtcttcttcggctttggcagcggctttttaagcttcaacaaccctatcgtgatctttatcatcgcagcggcctgctcggccgtagcggcgctgctgtttatcaaaatgcggcgcaacgccggcgaggtgtacgaaaaaggcaagcccaagttccgcttcgtctttaaaaaacggtataccatctactatgtgctggccatcgtcaatggcgcgcataagcagatcatgacggtgttcggcccctgggtgctgatcgagctgatgttccagcagaccgataccatggccattctctcggtcatcggctcgggcatcggggtgctgtttatccccctgctgggccgcctggtggatcagttcggcgtcaaaaaggtgatgttcggcgaggggttcaccttcattttcgtctatctgggctacgcctttgtgcagcaagccttctctccggaggtggcgctgtggtgctgctttgccttttacgtgctcaaccgcatgggcatgcagtttgcggtggcacgcacggtgtacctgcgcaacatcgccgaaacaccggaggacatcatgcccaccctttccaccggcatcagtttggaccatctggtctccatcgccgcctccgccctgggcgggtggatctggtacgagtggggctaccagtacgtgttctttatcgccgccggtctttcgctgatcaatatggccgccgcccttatcatcaaggaggataagcccaaggcccgggcctaaaagggtaacgtaaaagcggtccgccggtcttggcgggccgctttttgacatgctttttactatcgctcgacaaacctcaggtcgatcccaccgttggtggagcaggccatcagctcccattccccgcccacggagttgggcaggctgctgcccccgtttaccgtggaggtgctcacggcgtactccgcctgttcgccgatcagcgtgccgccaatcgggccgttcaccgtggtcagcgttacattgccctgcgcgcgtacctggcttaagtcgatgcggccgttcatgctctccgccgtcaaaccgcccacgcggcagtctacaaggctcaccgggccgttgacgctgcgcgccgccgcgccctcaccgctctccagcttcgtcaggtccaccgcaccgttttgggtcgtcgcggtaaacgcgcccgccctcacggccgagccatcgatcccgccgttggtgttcacaaggctgatctcgccctgggcctgcacatccctcaggctgatccgtccattgacggtgctggcgctgagcgtattgagcgttacgccctcggcctccaccgtgccgttgacgttgcgcacgctggtctttagcgtcaccccttctggcagggccaccgtcacctcatgcggagtaaaagaaaaattcagtaccatgatgtgatcgtaccaggcccggctgtcccagtaattgcagctgatcaggccgccctcctgcgtcacgctatagtgatcaaactcggtttcccagtaagtgatgtggatctgcccgtcctcggagggaacgatccgtacaggctcattcgtcaccgagatggaaagcgcgctcaccccttgcggctgggcagagaaggtgcgctgctcatactccagctgcgtgcccagcttttcaaagtcgaacccggccgccgctacgccgcaaaaactcagcaccagccccagggccagcacgatcgcggcgatcctgtatagctttttcatcatcttacgccacctccttacgaataaacggggccttgatcttgcgcagcagccacttgcccaaccacagcgtacccttggccgcgcccatcgcacaggggaaggccaataccgccagcgccaacgcgcttaaacccatgccgatgcagaaaaccaggttggccccgccgccggcgccaaacgccctgataaacatcagcgggccggaaagggccagcgtcgcgtctgccacgaacaggcaaagcaccagcacccaaaagaccaggtaaagcgtcagccccaccgccaataccgccagcgccaccggcagccagatgggcgagccgatggcgatcagggcgatggccccgcctgagagcctgcgccccgtcctggcgcgggcgcggatcaggttgcccagcggcgcctggctcaagatctctttggcgatcaccggcagtggctccaggctggctacagcctgttcctcatccatgccctcttccacccggtcgtcgatcatctcggcgtaataggcgcaggtctttttgatctcctccgggtccagcgcgtccagatagcccgccagcccctccaaaaatgcctgtttgttcattgctcgatcccctccttgataaaggtatagatccggtttatctcctgccactcgccaaggaaatcccgaattttcgcctccccctccggggtaatggcgtagtacttgcgcagcctgccgttgtgctgcgcggagtagacgctgacgcatccgctgccctccagccttttaaggatcgggtagagcgtggattcggatatctgaagcaccccgctgagatctttgatgatctggtagccgtacgagtcgccccgggtcaacaccttgagcaccccgatctccaggatgccgcgcttaagctgtgcgtccaagcccaacacctccttacgcataatactatataacgcatagtataatgtgtcaagaggtattcgacgtcttattcaggggatgcctatccccagtccttcagagcacagtcacagccccctcgcatacctgtaaacgagctcccgcccacattttattcttttctcccggggctggcgcctcctataaaaaaagcgcaagggagtgcatcccctgcgccttttctaatcttccgctatggttctcgtttatcctgtatttgcgccgtcctggccttgcgcccgctgtacaggtacaccatcaccgatgcggctaccaccagcgccccgccggccagcgaggtcgggcttatcccctcccccaggaagaggaaacccagcaccatggaaaacgggatgcccgcgtaattgtacacgctcacctccgaggccggtgccatgcggtaggcataggtcaggcagatctgcccaaaggagccaaacaggccgatggccagcaggcagacaagctcaaagggggtgggccacacaaaatccgccagcataaaggggatggaggccaccatcgagaaggtggaaaagtgcatgatcaccgtcagcgcgtccaccttgtccttaaaatagcttaaaagcgtataggccacccccgaggtcaccgaggagataaaggccatggccagcggccaaaggttgctgttaaagctggggttggccaccagcaccgccccgccaaaggccagcagcagcgccgggatctgtatcttggagagcttctcctttaaaaaaatcaccgcaaacagggtgaccagaaagggagagagcttgcttaagatcgccacatccgcctgggccgcgttattggaggcataaaacaccgtgatcacgcccagaaagccgaaaaagctgcgcccaaacagccacttttggtatttgcgcggcccaaagaccgacaggtgattgcgccggatcaggataaaggccacgatcaggctgatggaattgcggaaaaacacctgctccatcaccggtatacgcccaccggacaggcgcacggcgatctgcatgctactaaacaatagcgcgctgaagatcatcagcaatatgcccttttgcttttgcgtcagcctggccatgtgttttccctcccgtactcttggatcaaagccgcggccccggttaaaggctgccggcctattatggttcgccgccataaaaaagcggcgccccttaaggcgccgcatccgctttacttttacgccgcgcccggggcctattcgtcctcctcgggcagttcggcattgtgccacacgttttgcacgtcgtcgtggtcgtccagcatctccagcatcaggttgatcttctgcaccgtatccgggtcgctcaccgccacggtattttggggcagcatctcgatctcggccgtttcaaagctgaagccctggccctccagcgcctcgcgcacggcggagaaatccgccgggtcggtgtggatctcaaaggcgtcgtcctgggcctcaaagtcctcggccccggcctccagcgcctgcatcatcacctcgtcctcgtccaggccctcccggtcgatcaccagcacgcccttgcgatcgaacatccagcttacgcagcccgtggcccctaacgagccgccgcgcttatcaaaaatatgccgcatctcccccgcggtacggttgcggttatcggttaccacctcgacgatcacggctaccccgcctgcggcatagccctcgtactgcaggtccacataattggccccgtcgccctcgcccgccgcctttttgatggagcggttgatgttatcgttgggcatgttggccgccttggccttggcgatcacgtcgcgtaaccggctgttctgctccgggtcagcccccccgccctcgcgcacggcgatggcgatttcgcggccgatcttggtaaagattttgccgcgctgtgcgtcggtcttttcttttttatgtttgatattggcccacttggagtgtcctgacatccgaagttcctcgctttcactattcttccaagcgtgaattataccatatccattgccatcgtgcaaggctgcctgccgcagttccggcgcctttgccccttctaaagggcggctcctgcccgctttttttgccgcaggccgtgcgttgtcctgcccagggccgctcccggccccccgatcctatcctccggcgccccctacgcccggtgcgcgttacagcttgccctgtttaaagccgcggtaacgcttggccgccaggttgaccagcgcccggtcctggctgtaggtgatcatctccagcgcctggtcgatgggataaaacccgccgtccacaaagccgtcctcagcgctatagcggctttgcaggctcccggccgtcatcaaataccaggtcacctggttgcacaccggccgtttgcgtgtgaccgagtaaaactcgtagttggtctccccgatggaggagaggatctccgcatccacccccgcctcggccttgacccgccgcagcgccacctcccgggcataatccccggcgcggatcacgcccttgggcagcacccactcgtccttctcgttttttaggatcagtacgctatcctcgcaaaacaccagcccaccggcacaggaacgaaacagcatcgcccttcccccttcatcttatgtatttttatagtcgcttcaaggtgtttatcctgctggaaatgaggccgcattttccgcggcgctttatgcttaacctcatgataaccccgccggcgcgaaagcgcaagccctagctgccgccccccacatcggggatgaggttgagcatctggtcggtctcgtctacattgacgtaggattcgggcaccgtgcctacgataatggtctgcgccacggggttgaccgtatcgatactcaccgtttcgccgcccaccggcaccaccacgcggatctgcgcggtcaccttcaagctgatctccagcttggtctggttgatgcccgccggctcaaaggaggtgatatactcggtattcacccagcccaccggcatcacatacaccggaaacgccggcccgcgcccggcaaacatcgccccgccgaataccgacccgatggggatcatgatctcctgatcctgctgggcctgcagcttatcctgtatatccagcgccgtgcggctggccaggttgttcagcctggccgtatcggtctgtaccgccgtcaccctgccgttttcgtctttttctatggtgatcagcgcctcgtaggggaaggtgttgcccaacacgtcgcggatcgaatcgttgatgatctgcgccgcctgcgagcgggcctgcgccgcgctgatggagatcaccagcggttttagccccagctcaaagcccaaccccgcgccccccagcgccagggccaacgccgtcaataccgccgccgtcttgcgcttgattcgccttgcgcgcatctcgtcccctcctttgtcctttccgctttgtctcctctactccattccctttaccttatgcccgcgcgcgggttttgttgcatcctggcgcatttgcgccagtgcgccgtcaaagtattacgcttccattacagttcggttaacaatgcgcggcattttgcacgggggcgggtgttatgttataatatttgtacttgtacgtattttttgatacgcatcctcaaggaggctttatatggcaaagatgaaggaccagctcaaatccggcgccaaaaagggcgcggaaaaggcaaaacgatctggccagaattttaaaaaactgctgaaagggactaccggtacctcgatatttaccaagcgtacccgcaagcccaacttctttttatcggtagccatcaacaccttccgcatcacgatgatcgccatcctgctgctttgcatctccggtgcgggctcgctggtagggctggtcaaagcctatgtggagaccgcgcccaccctctcggtctcggagctggacgatcaggaccgcaccagctttgtgtacgatgtcaacggcaacctgatcaccaccctgcgcaataccgaaaaccgcatctgggcctcgtatgacgagatcccccagcagctgatcaacgcctttgtcgccattgaggatacccgctttttctcccacaatggcgtagacatcaagcgcctggtgggggcctttgtcaacaacatgcaaaactcctccacccagggcggctccaccatcacccagcagctgatcaaaatgcgcgtgctctcgcccgagcgcacctataagcgcaagatccaggaggcttacctggccatggagctggagagcgagtactctaaagagcagattttggagagctatctcaataccatcaacctgggggacagcaactacggcgtcaaggccgccgcgcaggactatttcggcaaggatttagacgagctgaccctgcgggagtgcgccaccctggccggctgcacccaaaacccctattcctataacccgcgcaaaaactactatacccgcgaaaagcccgagcagaccgataaccgcaccgatacggtgctgatgcgcatgtaccacgtgggctttatcactaaagaagaatacgaggccgccctggccgaccagttggtggtcaaagaggagagcgagcagcaggatctctacgagatgccccactttgtggaatacgtgatctatgacgtggtctccttcatgctccagcagcgagacctggaggataatacggccaaccgccgcgagatggagcgggagctgcgcaccggcggctaccacgtctatactacctgcgatcctaccattcaaaagacggtggaatccaccatctataattggaagaactacccgcgcatggccaactcggccgacagccagaccaccgataccagcagcgacggcaccattaccaccatcacccagccgcaggtctccgccgtggtgatcgatcagcactccggcgagatcaaggccatggtgggcagccgcacgccgccccagagcatgaaagagctcaaccgcgcttatcaaagctccatgccggtaggttcttccatcaaacctctggcagtctacggcccggcgctggatctgggcgcgggcgcggccagcatcgtctacgatattgccgctcccatcgagggctgggtgggtggccagggctacccctccaactccggcggcggcaaccgtggtgcagtcaccctgcgcgagagcatcgtgcgctccatcaacgtgtcctccgcgcgcaccctcttagagcgggtgggcgtggagacctctaaggattacctgctgcgtatgggggtcaattcctcccatatcgaggtcacccccagcggccttgccttaggttccagcgggctgactacgctggagctggccggcggctttagcgccatcgccaacgatggcatctaccagcagcccatcagcttcacccgggtagaggatgaggatggcaacgtggtgatcgacgccaccgccctgcgcgccacccgccaggtattcgagcagtccaccgcctggatgctggtggatatgttggaggacgccgtggaccacggcaccggtactcgggccaagatccccgggatgaccgtagccggcaaaaccggtaccaaccaagataacaagggcgttacctttgccgggatgaccccctattacactgccgcggtctatgtgggcagcgacgagtataaatccctcagttcggattctcagggtgggcgctccgccgcccccatctggcaggactttatggccaagatccactcggggctgatgaatatgcccatactggaagagagcgccgaagaagccggcctggtacaggccacggtctgcgccatctcgggcaaaaagccgggcagcagctgccccagcaccgctaccgattacttccgccagggcaccgtgcccgaggagacctgcgatatgcacgtttcggccgaaatctgcaccaccagcggcatgcgcgtaggcccctactgtccagaatccacccactcgggcggggcggccatcgtgatcccccaggataacgtactggccaagttgccgctggccacgatccagcgcttcttccccggggcgacactgggcacgtctctgggcaacgggcagacctgtaccgtacataccgccgaatgggcggcgcaaaacagcggccttatctcccaggccggtagcctggtcgccacggcccaggcctggctgcctaacctgtccgagggcgatgcggccctggtgcaaagcgccattactcagttgcaaaactgcatcaataccggcgcagcctatgaggaaaccaaagctgcctacgatgcactgtacaacaccctgagcaccgccatcgccgctacaccgcaggtgcccgctacgccgcctggcggcgagggcggggagcctcccgaaacagagtagggcctgatgcgctccatctaaagcttgtgcacgctctgccccctttataaaaagggggcatggcttttgccccggcggcgaccctgccgcacggatcgataccctatacagaaaggaaaaagagatgaaaaagtttccacgttcttttatgcttccgttgctccttgccctgtgcctggcgctgaccgcctgcacggatgcggcccagcccgccgccagcggtacgtccgccgcgcaggcttctccgtccgcttccgcctccgcctccgcgcaggaggctacccccgcccccgctgcggaggatgtggccaccctggtccagggcgccagcgagagcatgattttagtcaatgccgataaccctgtgggcgaaggctttcagcccccggcgctcaaaagcctcaagtccctgatcacccaacccgtcaagctggatgacgattccatccaagccgacccctgcgtggccgatgccatgaacgccatgctctccgccgctaaggcggacggggaggccaccatgcgcatccagaatggttaccgcagctataagcggcaaaaggagatcttcgacagtaccgtcaattatcataaaacccaggagaaaaagaccgagcaggaggccatgaccatcaccaaaagcaaggtggccgtgccgggctatagcgagcaccacaccggcctgtgctttgattttggctccgtcgaggccgatggcatcccctttgggcagaccgcccacgccgcgtggctgaagaacaatgtctacaaatacggctttatcatccgctaccccgaggacaagcaatccatcaccggcactatccccgagccatggcatgtgagctacgtgggcctgcctcattcggagatcatgcaaaagcagggcctgtgcctggaagagtattgggaggcgcttaaaaacggccccattaccgagaccgtggacagcggcacctatcaggtctattacgccccggagggcggcagcctcaccctgccccagggcgagcgcaccatcgcctcggatgggcgcggcggcgtggtggtggccgttaaggtatcctgacccgcaataaaaagagcctcccgaaacagccgggggctcttttttgttgcgtatatttatccttccgtcaccgcttcgggaatgataaaggcacgcttatcacagtcgatctggcccagcgcgccaaaggggatcagcgcgcgtggggcgttatgcccaaagctcatatccgccagcaccggcaggtcgctccggccatactcgcccagcacctttacgatggccgcatcgtattcctcgctgcgcttcccgtccagcggccggcccagcagcaggccgctaagccgctccaatatcccagccgcccccagtgaacgcataaagtcctcaatcacccaggcccgcgggcagagcggtgaggtctcaaggaagaggatcacgtcctcaaattcttccgccgccgggaacagcggcgtgccccgcagggagtagaccacctccagacagccgcccaaaagccgcccctgggcgcggccctgcccctgcaatagcctatagcccctatggggctgcagcctgcgcagcacctgcgcgttatcaagcccccgcgccgcccggccgatccagcctgtcgccgggggaatctctcctaccggcccgctctcaaacaattcgcgcacgatccactgcttggtgtagggcagcatggggccctcgccgtcaaagtccgaaaacaggctggccccgtaaaagctgcccagccccgccttcaggcaaaagtaatgggcgctggtcacatcgcttaagccggtaaagatcttggggttcgcgccaatcaggtcaatatccacatagggcagtacccgtatgccgtcatccccgccggtgacggcgatcacccctttgatctccgggtccgcaaaggcggcgtttatatcctctccccgcttttccgggtgctcccaaagatagcggctgcccttcaaggcattctccatcaccaccggacgcagggcaaactcgttttccagccggcgcagcgcccggtcaaagcgcgcccggttctccgcatccccggcaatgccgctggatggacagacaatagccacccgatcccccggccgcagccgcgggggcttgatcagtggtttcatccttctccctcccctttttgctccatcatatcttccatgggtacaaatccgcaggcggcgtacagcgcccgcccctgctgcgagctgtctaaaaagacgcggcccgccccgtaggccctggcccggccagtcaggtattccaccacccaggcgcccaggcccctgcggcggtgcgcctgccttgtataaatgttcatcaaatacccgcaccgccccgtggggttatccggcaggggcatctcctcgtacaggcaaaccccgccgcaggccgccatctccccatcccggaagatcatgcaggcctcgtgtccccctgcgggcaaaaagcggatatagtacgcccggttggcctgggccagcgcctccatatcgtattgctccggcaacgcaaataccgcgcgcagcacctcgacgcgggcctgcaccaaaacctccaggtcctctatgccgcagcggtacagcgtatactctccccggcgcgcgattggctccatgccctacaccgtcccttctttgagcaccaccggcagggccctgcggtccaccttgccgccgctggtcttggggaagctctccatcttcacaaaaaactccggcaccatgtacgcaggcaggtagcggcccaggtaggcccgcacttctttcaggcgcagcgcgccctcgatcagcagataggccgtcaggtagcttaggccctgctcgtccagggcgctttccaccaccgcctgttcgatcccggggcagcggttcagtacgttttccacctccataggctctactcgcttgccaaggatcatcacctgctggtccttgcgctctaaaaaggccagctccccgtcgggtaacacccgccccaggtcgccggagcggtacagccgctccccggtttccgggtcgcgggcaaagtgcgcggcgttttccgcgctgtttttcagatagcccaggctcacgcccccgccgtaaatgcagatctcccctacctgtccctgcggcaccgggcgcaggctttcatccagcacgcgcacccgcgcgccggtcaccgcccgccctacggggaacgtgccgtcggccagggcgcttgccggcccgcagcgaaaataggtggcgcacaccgtggtctctgaggggccgtaggtattgtacaccgctacccgccccagcaggtttttcacgtattcatagcgcagcacgtccccgccgctgatcaatagccgcagcttcccgggcagcttgtccaggtggttaaagcgtatcataaggtaggggaagccgctgaccatcgtaacgtcatagcgcttaataaaggccagtagcttatcaaagtccccgcgcgcgcccacgtccgcaatggccagcgccccgcccgaaagcaggatggggaacacttcctccacaaaaatatcaaacgtgcataccgagttttgcagcatcacgtcccccaggccggggtgaaactcgttttggaaggccctcacgtaatggcaaaggttgcggtgggccaccatcacccccttgggaaagcccgtggtgccggaggtgtacagcacataggccggcgcctccgggtcgatctgctggggcagtgcgcccgcttgcgcctgcatatctcctgcaaacagggtatgcggcccgccgtcaaacagcccccggtaacgacactgggtcaccaccaggtccgcttccgcctgccccaggatgtagccgatccgctcgggcgggaaatccggctcgatgggcacataacccttgcccgccatcagcgcgcccagtatcgcggcgatcatgtccgccccatggtccatcacgatgcccacaaaccgcccctgggagcgggcggcgatccgcctggcaaattcctgcgcccgcgcctgcaactgcgcatagctcagcgtccgcccatcctcgatgatggctgcgcgcccgctgtaagccctggccgccctgctaaacgccgttacgatgtccgtcccaatctccattctttccattgcccgtgccatccctttcccgtggttccgtccttatccgcctttactcatgggttctccaacacatcctgtatcagcgccaccgccttttccagcccgttttccgcccgcatcttccgggatagcgctgcggcccgtccggccagcgcctcccgctgatcctttacctgctccagggcacgggtcaggcgctgctcgctcagcgcatctgcccggaccggctccacccccacgcccagctcgtacaggcgctgtgcaaaggcaaactgatccagcacgtgcggcaccggcacgctgggcgcgccgtacagcatggccgcggcgctggtgccaaagccgcagtgatggatcacgcacccgccctgccggaacagccagctatggggcgccgccccgcaggatagcatcgtcccgggcagctcatacccttcaaggctcttgttaaagtcctggatcaccgcgcgcatgccggcgttttgcagggcgcgcacaaaaaggtccagcttttcccgctcctgcctgctctcaaaggccatggcccccagcgccagtatggccggcggctcgcccgcctccaaaaaggcgcgcagcgcctcgggcggctggtagccctcatcctcatggtaccaataccctacgatctggttgcgcccgtcccaataggggttggcttgaaccacgtagcggctgatggggatcaggttcagccggggcgacatcacctcgtccatagagcttacccgccccagcccgtacagcttgcgtatcttattgtagggcctggccatctgccggccgatcagggcgtctatcgcccggccccctaggcctcgcggcctgccgggctgggcgatcatctcggtctgcagcgtcacgtttaccgtgggcagcctcggcctcggtggcgcccatctggctgtgagaaaccacgatcaggtctttatccctgcaaactgcgtaaatatcccccgatgcatttttgatgatctgaaagacgaaattcatggttttgagcatgctggtcatagggctcttgctcctgccccggattgcggccgcctcctgctggatgtcgatatccggcccgatgggagcaaacccgatcccagccgcccgcaccagcccctcccaacaggggtgcgtgcccagcgtaacgcccatgcccgccttggtcagcgcgcggcccaattccagatagggctgcacatctccccgcgtgcccatggtaaaaattgcgatctgccgcattgctttttcctttgccggatgcgtgccggcccttttccccacggccggacatatccttcttttttactaggataacacattttaccgcatctgtcgcgtctatgaaaaggaaaaactttctttaaaccggctgcccttccccctccgggtagcgcagccgctgctgcgtcagcgccagcaggccccgcaggtagtccgcccggttatccgcccggtagaccagcgcgggcatgtgcccctccggaatgtaagcttcacaggccgcccgcaccgcctcaaggtccgcctgggccactccagcgccggagaccgttaccaccgctgggttcaccaccgccacgatggcggcgatcacaaagctcgccgccgcgatcctgcccgccgcgtcctctaaatcgctcagcatcttcttcagtccgccgggatagggcaggcagcccacctcccccgccaggtgggtggagcccgagatcaccttgccgtctaccacgattccgcagcccggtccgaacccggccccgccctgggggaatatcaggtaggcgttggtgtcccccgcgggcagcgcggcgctctggtgatagccataggcgcagcagttcatatcgttgcacagctcaacagccgcgccaaagcgcttctcccaatccctgccaaggtccaggccttgcagctccacaaggtcgcaggagagcacccgcccctgcgccactacgccgggcagcccaacgcctatggcgcggatgtccggaaaggcctccagcgcctgagcgatcagcccctcaatcctatcgcgcaccgggctttccagctgcgcctccccggccttgacccgctgtcccagcgcgtcgcatatcgtatagccagcccttgccttctcccctgcgccgcccgcttcgcaggccaggcaaagggtgtggtagtagtccgcattatattgaaagcgcctggctggccgcccgccgctgggcctgtccgcagatagttctataacctcgctcttttccagcatcacgctgagcaggttcccgcaggtggccacgctcaaccccgtctgctcggccagcgtatttttcgttccccaggccatggtctttagcgtatcgcgtatcagttgcaggttgcgtaagcgcacctgcgcgttattgctgctgcggcccatcgttcaacctccggctttcaataaatattatctaaagtcagtatagtctttgcccttcagcttgtcaaaccgggctatcgcccttttaccgctcgctgctccatataaaaaatgaaaaaccaaaagcctcccgagggtgcgggaggcttttggtatgagagaggggtatgtacaaataaaacgttgttggtaatgttaggttgtctgttgctctttctctgctgcaaatatagaatacccacttttcatgaacgggatacatccaatctatgaataatccatgaatttttggtatcaaaaaagtaaatgccgcccctgcacgcgcgatctgcgcccccgcccctttccttttgacccgccagggtggtaaaataaaacagagccgcactttaagcggcccatagcgattaacgtattgatgaaagggcgattttgattatgaaaagcattggtatcattggtcttggctccatgggcggcatgatgctggaccgtttcatcgcaggcggcacgcccgcgggcaacatctgcgccgcaacgcataacccccaaaagctggcgcagtttgccgcccgctatcccggccttaagaccggcagcaacctggaggccgccaaaagcgatatcgtctttatctgcgtggaacccggccagtttaaagacgtactgctggagatcctccccgcccttagcgagagcagccacatcggcaacatcgccagcaccgtgaccatcgccaatgttgagagcctgatcccctgcaaggtgaccaagctcgtgcccaccatcaccagcaaggtgggccgcggcgtcaccctggtcagctataacgataagatcaccccccaggacaagcaggatataagcgggctgtttgccgcctttggccagctgcaggagctccccgaaggggacctggcctacgctacggagctgaccagctgcggcccggggctttacgcctacatcctggggcagatcgccgctgctgcgcaaaagtataccgatacggtgggcgaggcggagattcgccgctggctgatggagacctttgccggcaccatcgccctggccgaggctacgaatatgacctttgatgagatcgtaagcggcgtggccacccgcggcggcatcaccgaggagggggtgcgcgccatggccgatatggacttaaacgccgtgtttgacgccatgttccgccgcacgctggaaaagcgcgcccgcaacgaggaaaagaccaacagcatgtattaaggcaatttgatcccataaagtcaggcggacgctaaatcgcgtccgccttttgctattccctacatcagcttggccatctcgctttgcaggtggcggatgatctttttctccagccgggagatataggactgggagatgcccaaaaggtcggccacctccttttgggtgcgctccttgccgttttccatgccaaagcgcagcttcatgatccgcttttcccggggcggcaggttgttgatcgcctcggtgatcagcgtgcggtccacttcctcctccagcatccgggtaaccaggtccggctcggtgcccaacacgtcgctgagcagtagctcgttgccgtcccagtcggcatttagcggttcgtccagcgagacctccatgcgcacccggccgttgcgccgcaaaaacatcaaaatctcgttttcaatgcagcgcgaggcataggtggccagcttgatctttttgctggcgtcaaaggtgttcaccgctttgatcaacccaatggtgccgatggagatcaggtcctcaatattgatgccggtattctcaaattttttggcgatgtacaccaccagccgcagattgtgctcgatcagcgtggcccgcacctgcgggtccccctcgtgcagcacgctgaccagctcgcgctcctgctcgggcttgagcggagagggcagcgcctcgctcccgccgatgtagtgtacctccccgccatcgggcgtaaaccacttttgcatcagccgccgcagcgcccggcggatctcctcccacgtcatccccatttgatttttcatgttcgcttccccctctttgcagcgttatcgtgttgtctttagatgcctgtgcccccgccagcacgtccggcggcatcagcgcctggaaccggtcgccggtgcaaagctcccccgcatagtacgccaggtagacccctgccgggctaaactgcccctgcggcccctggagggtgatctggttcgtccgccaggcctttaaatagcccgcgtcccgccccaccgagcggaagggcacgtaccgcgcacgggctgtgttttcgtcaaaccccggcggccatgcgcttttctgcacgacgattaccggcagcccgctttgcgcctcgcgcagcgtacacccggtatccagcaatgctgtaaaggccatctctccggccgggcctgtggcccgcaccctgtacaggtagtgcttctgggccgcaccgcctgcaaagtatgaatagatcgcccgtatcccataagtgacgaaaatgccgctggccgccagcagccctactgggaagccctgcaccacgatggccccgttttgcaggtaagcctctttgcccagaaagaagaacagccccagcgccgcgcctcccagcaaaaaggtcaccaggtaataagccgccagctggacgatcttgcgcttaaaaccgcgaaagccgaaggccaggccgatcagcagatagcttaccaccagcttactcactacccccgtcagcgccggcaggtacagcgcggcaatggcaatgcccgccccgcacagggccgagagcgccacccgccaccgcttaaacttcagccgcagtgccaccgccgtcaggtacaggatgagtatgttcatcagggcattgtccagcagcaatgtttccacatacgccaccatacctaacgccccccatactgttatacctatgcaccgcagggatattatacgtctatccaccctgcaaaaactgtctaaccaggggcgtagtccctcttaaacgcaccggcttttgtccttatcacttccgttcattcccatactacacacgttccccccttgccctgcctttatccatccaggggtataccccctcttaaccgcgccggcttttatccttatccctttcaccctttcccgcattacacgctcccccttgctctccccttatccacccaggggtatatcccctcttaaccgcgccggcttttatccttatccctttcaccctttcccgcattacacgctcccccttgctctccccttatccaggggtatatcccctcttaaccgcaccggcctttatccttatcattttcgctcccactccctgccgccgcctttgtcatccagagcgcagcccaaagggcgcagcgaaggatctccggcatcgtctctccgccgagcgtctccacaagctacccgctcatttcgtttccgccgcgcctgctcatacggcggtatgcctgcgccttttaccttgtcccccctttttttcttccgggtactggcgcattctgtcctgattgtgctatgctaaacctataaataaggtagacaggctgtaaatccacctgtccgcacgatagatcacaaaaagggggaaaataccatggcacttgtcaccatgaactttgagagccagtacctgatggtcaaccacgagatcagcgtgatcctgcccgacaagccccgggagcaatcgcctgccgatttttacggcagcggcaaaaagtacccggtgctctggctgctgcacggcacctttggggaccatagcgactgggtgcgcaaaagcaatattgagctgtacgcctgcgagaacgatctcatcgtggtcatgctcagcgccctcaacagcgattattggaattggccgggctttggcaccggctacaacgcctgggattatctgaccgaggagctgatgccgctgatctacaactggttcccggcctcggataaacgggaggataactttatcgccggcctttccatgggcggcatgggtaccattcagtatgcctgcgccctgcacgaccggttcgccgcggccgcggtgctcagttgggcacccatcgacctgcgcgcccgcctgaaagaggggaatctgcccgattcgccgcgcgaggccaaccgcatcgcttccctgggcggggtggagaactacctggccagcgacatcaacgtgtgggataagctgcccggtttgatcgaaaagggcgtgctgccccggctgtacttcgccatcggccaggacgatttcctttacgaaaacttcgtagccttccgggcctatgccgaaaagatcggcttgaacgctgcctttgaagagtttgccggctaccagcacgagtggcgcttctgggatctgaccatccagcgcgcgctcaagttcttcggttttgaatcccgggatgggggcaatcccttctaagacagacctttaaaccaaggcagggcggaaaaaccgccctgcctttgcttattccatagacccgcaccgagaaactggtataatattcctatactgcaaagaagggggctacgcgatggaactgcgcgtactcaaatactttttggccgttgcccgggaggagaatattacccgagccgccgcgcttttacacgtgacccagcccaccctctcgcgccagctcatgcagttggagcaggagctgggggtcaagctctttcaccgcagccggcaccgcatcgttttaacgccggacgggctgctcctgcgccggcgcgcgcaggagatcgtcgatctggcggggaaggcggagcgggagctggccgggggcgatgcgccgcttacaggtgaaatcgccatcggctgcggcgagacccggaatatggaagccctggcccggatgatcgccgcctttcaaagccggtatccggatgtgcggttcgatatttataccgccgtggccgatgatgtgaaagagcgcatcgccaacggcacgctggatatggggctgctggtggagccggtggaatttgacgcctacaattatgtgcgcatgcccctgcgggagcgctggtgcgtgctgatgcgcagggacgcgcccctggcgcaaaaggccagcatcgccccggcggacctggccggccagcgcgtcatcatcccggggcgcccctccgtgcgcaacgaattggaacactggctgggggatgtgtacgcctcactccaggtagtggccacctgtaatctctcctacagcaatcgttctctgttagtagccaacggcatgggcctgtccctgacgcatgaattcgataatggggatagccggctgtgcctgcgccccataacgcccgagatggccaataccagcgtcctggtctggccgaaggatcaggcgctctcccccgcggtttcccgcttcgtggcccatattaaaaatacgttacaggcataattgcgcatgcaacataggtattagacattttgctcttctcattatacaatgcaggtgttctaaaaaacgcctgcgcagcatccacgcgggcattgcaaaaatctttccgtaaaaaggaggggttcaggatgcttcaacccgtttcgtccttgcctcgtcccgccgcagtggcccgtccggcggcaagcgcgcggcagccgcaggcccccgcaagcatttcgcaggtctgccggcgctattcaatttctgccgataccctgcgctattacgagcgggcgggtgttctccccccggcggcgcgcacgccgggcggccggcgcgtctatgatgaagctgcctgccgcaatatcgaattcgtactttccatgcgggcgttgggcgtgcgcatcgataccctggtgcaatatcgccggatgttggcctcggggcaggcggtcgcacaggcccggcgcgccatcctgttgcgcacgcgtgcccaaatgctggacgccatatgcgacgcgcaggagaaggtgcgccgtatcgatcaaatggccatctagtcttttcacttcatccgtcagtgtataaccgaacaggagttgattttgggcatgcagcaggaacggctttttacccccaggcagttacggcttttggtccttccgctgatcgtggagctggcgctcaagctggtcgtgggcatggtggattccgtcatggtggccagcgcgggcgaggcggcggtctccggcgtgtcgctggtggatacagtgatgcagttggtgatctatgtgttcgcggccatggcctcggggggcgccgttgtggcagggcagtacctgggcagcggcaatggcgaaagggcgcgccgggccgcagatgaactgatgtggctgaatatggccctctcgctgatcattatgctggcggtgctgctggcctcccggtggatcgtgggcagcctcttcgggcagatcgaggcgcaggtggcctatcacgccagcggctatctgttttacgtggcgctatccatccccgccatcgccatttttgaggcgggcacggccatcttccgcactatgggcaacgctaagataaccatgaagatctccctgttgatgaacgccatcaactgcgccggcaacgccgcgctgatctacggcctttccatgggtgcggtgggcgcggctatcgccacgctggccgcccgctgggtggcggccgtcatcgtggtggggctgctgctcaaccaaaagctagagctgcatctttttaaaaccctccgccaccggttcgatctggcgctaagccggcagatcatgtccgtcggcgtgcccggcggcgtggaaaacggcgtcttccagctggggaagattgccctgctggggctgactgccaccttcggcacctccgccatcacggccaatgccatcacccagaccctggcctccatccaggtcatcccgggcagcgccatctccctggctatggtcactgtcatcgcccgctgcgtgggtgcccaggactatgcgcaggcccggtactataaccgcaagctgttattgaccgcctacctctctttaatcgtgctcagcgcagccctgtacctgtgtctaccgggtattttatccctctatggtctgtcccaggccacggcgcagcttaccggcgatatgttcctttggcatacccttggcgccgcgctgctctggcccctggcctttgacctgcccgcctccctgcgcgcagctggggacgtcaagttccccatgctgatctccatcctgtccatgtgggccttccgctttggcggcgcgtatctattggcctatcccttgggcatgggcgcggtgggggtctgggccgctatggccctgctggactggggcttccgcgcggtcatctactgcctgcgctggcggggcggcaagtggcagcgcatgcgggtgatctaagcgtgcccctcctctaccctttggccggtttagcgtgcggcacaaaaaaagggccggcttttgccggccctaagggcttaggaatattgcgcaaggtctttgtacccttacaaccccatcacattgtggatatactcgcgggagaccagcgcgcttttgtagttgcataccagcggcttatccagctccacgcacagcaccccgtcgtatccgccctccttgagcacccgatagatgccccggaagtccaccgtgcccaggcccagcgcgcaaaagcggttcatgggccactcgggcgaattattcacatccgggtctacgtccttgaggtggacatagccgatgcggggcagatattttttaaaggccgccaccgcgtccatccccgccagggtggtgtgggcggtatccgggcacagccacacgtactccgggtccgtattggccaggaagatgtcgatctgctcctcggtatacaccggggtcgccgcatggggatggaacaccgccacgcacccattctccttgcacagcttgccgatgcggttggatagcgccgcatacgccttgatcgtggcctcgtcggtgggccggtcaaagggggcgtccttccacatcacgccctggaggttcaggtaggtggcgccgatcttcttcataaaatcgatgtactcgcccgcctttttgtaatcctcctccgggtcggtggagaagtgctcgtacaggttcaccatctccaggccgtatttgtccagcagccccttcacttcttcggcgttattgtcaaaatacttggtgataaaggcaaagttctccaccgagtcgtacccgatgtccgccacctcttttaaaaactgctcaaactcgtacttgtagttgtcctgatggttgaccagccacgtccaccccgtataagctactttcattttctcttttccccttttctttttccgctcctatcgtggagcttttttatgtttttcgcccaccacgggctttatctgcattccctgtctgccattgcgccaccggttatctaaccggttctttcctcagcgctttttatgtttcttcacacgccacggggctctatccgctttccttgagcctttggccctattccgctctccgcacccgtcatcccgagtccatcggcgagggatcttatgcgccgcctctgggccacgcttttcctcaagccccgcggcccgcgctttctttccggctgcttctccccacggcccgcgccctttcacgcgccgctccccgcacgttcctacgggctgctttccgcccccgccccccgtcatcccgggtccatcggcgagggatctttcgcatctcctctgggccatgcttttcctcaagccccgcagctcacagctttctccgccaagcgtcgtgcgccctcaatccaacacgccggtcagcgggctgttcaccatgggcttttgccgctcaaagcgggattcgatctccaccttcgcccccgcgtcgctgctgcgggcaaaggccgtcatcacttccaacacgtggtatgtctgcttgtagctggcccggggcatgcgcccggtagcgatggccttggccatatccgccagccccagcgcccggctgttctcgggatacgggaaggtcagcggcatctccagatagcgcttctcctccggccggtacagctggatcgggccgccaaagtagttggggtcgggcacgatcagggtgccttccgagccgtacacctcaaagcgcgcctgggtggggtaatgtacgtcaaacgtggtggtaatggtccccaccgcgccggagtcaaactccatcatccccaatatatgcgtgggcacctccacatccaccaccttgccaaacttgggcgcgctggtaatcgtgcgggtggggaaggatttgcgcgtcagccccgtcacggttttcaccccgcccagcaggttgatcagcgccgtaatatagtacggacccatgtccatcatcgggccgccgccaaattcgtaataaaactccgggtccgggtgccagctctcgtgcccatggcagatcataaacgccgccgcgccgataggccggccgatgtacccgtcgtcgatcagcttgcggcaggtctgtatccccgcgcccaaaaaggtatccggcgcgccgcccagcatcagccccttttcctcggccagggctaccagctttttgccgtcctccaaggtggcggccagcggcttttcggagtagacgtgcttgccggccttgagcgcctcgctggatacgccatagtgctcgtttggccgggtcaggttgagcacgatatcgatctccgggtccgcaaacaactcgtgcatggtgtcgtagatcttgggcacgccgtactccgcctgggccttttcggccttctcgcggatcaggtcgcacaccgccaccagctcgatctccttaaacatccccgtgatgttttttaagtagatgccgctgatgtcccccacgccaaccatgccgatctttactttctgcatctttttctagctcccccttccattggcgctttccgcaaacgcggtgcgaatggtctttatcttgattgtatcacgctttacttctgtgtacaggacggttagaataaaaatatagacaattattgcgcacttgagagggggtcttatcctgtggtgcccacctatgaaaaccgcccggaggatctggacgtttacgagaaccgtacacttacctttccgccccatctgcatgagggtgtggagcttttttacgtggaatccggcgccatcaccgtcacctgcgccgggtgcacgcgcacgctttatccggggtggatggcggtcatctttcccaatgccatccattcgtatctaaccgatccgtgcgaaaaaaatggacattttctctttgctatctgccacccccgtctggcgggcgaggcgcttcgcaccctcacccattttgagccggaggatccctttttgcccccggacgccgtgcatccggatatggtgtacgcgctgcgcgccctgcgcgcccagagccgtggggagcgttcccccgccgtgtgcgccgcgctcacccagctgatcctggcgcacgcctttacgcatttgtccctgcgccgccctgccgaatccgccccctatgacctgaccgcccgtgccatcgcctatatcaaccaaaatatcgcaaagccccttacgttggggcaggtggcccaggccatagggtccagcaagtattatctctcccgccttttttctcaaaagctggggatgggctttagcgattatgtgggcagcctccgggtgcgccaggcccagggcctgctgcgtgctaccgaccggaagatcgcccagatcgccctggactgcggctttgaaaaccagcgcacctttaaccgcacctttctgcgccactgcgccctcaccccccgcgcctatcgcgagcggcaggggtagcctccacccgtaaaaatagcggggccgcccggcatacccggacggccctttattcgcaaattgcttctgtgttttttattttacccgcgtcagcgtataactcttgccgatgacctcgtttgtcaccaccacctgatcggtgcggtcatttaacgcaaaccgcaaaagcaggtctacattttcaccctcctcgtccagtttgccaaacatcttgctgtcttggaaatagaccccctggtaggttctccagctcaccaaattcatgtcaagaaattcgatcttctcgcttttggcatccagctgcatcgtgagataccggccctcatcgtcccgccattttccgtgcagaaattccagcaggtaacggttctcgatccagttgcgtatcggttccaacccccagtaatccgccatgatcatctcgcaccttttcagcctggtgggggtggggtcgtacactacctctaccgctgctttgtagtcgctgctgtccttgtatccatcgatcacctttagaaggctgaagatatactcacaatcctcgtccgaacctatccgctggacagtgtacatcgccttttcatagatccgctggcgcatctgctccaggctctcccccgcacgggcatacccttgctcttccaggtcgctcagcagatcgatcgcctgcaagcccgtctgctcgtccgccgtttctaaaaagcgatcctgcagttttatcgcgtagcggtagtccaactcctgggcgatgtcctgcgcattgggggcgcccttagccaccagcgcgtcggcgcactccttggcgcccgggtagttgtccctgtccagccggtaccaaatcagctccgtccggcactgaatatcccggtctgccgcgtcccggtagccgctcaatgcagcaaaagcctctgcagcgggctgatagcgctcctcctgcagcgcgtccgcctccagataccctttaagctgggccacgtccgcataatcctccggcagatcctgaaggtattgctggcaggtctcccgttcgccctgcgccagggcggtaagggccgcatcataggccttgatgcggggcacggcctggccggcccaaacgccgcttgccgccagcgccagcacacacgcccctcccacgcagcccatggcgatgcgcgccgccttccccctttgtccgcgtcccttgctcatctctatcggcacccagcgccgctgttaacgcggctatatccggccgcttttcgggttcctgcgccattgcagcttggattaccgggtccgcctgcgccagcgggttctcccctacggtcatgcgttggagtaccgcgcccagtgcataaatatcccccgggcaagtggcggctccgccttcccgccgttcaggcgccagcgcataggcctcttttttgggcgtcctgccccgcccgccggataaatagatctgcccgtccttccccagcgtcatatgcgctgcgcaaatgccgccatgggcgcgcccctttgtgtgcagcgcggcgacctcgcgcattaccggggatagcgcctgtcccgcctccccgggggcgtaagctcttccgctgcgcgccagcacccggtccagccgatgcctgcggcggcgtatccccagtatcagcgccagagccaccgtagagagcagcagtatcccatccacaatagctaccaccagcagcaggtttttctcctggaggtgctgggccgccggcgcaagcgccatctctccctgggccaaagcggccgcggcagggggcaaaacgcctagtgcgcttatcaacagggtcaggatcggggcgtatgtttttttcatggcaaaagctcgctttctccagttttggggggcaaaatacagggctgtacgcgttgtagagagatcgttttagaaatgttgcttttattatactatccgaccacgccgcacacaagggatgtaaagatatatctcgtctgcatcttatcaaagcattcagttgcgtccgccgccggtttatggtatctttaccttggaagccatttccgtttataaacagaccgcaattatctacaatgatcgcctacaaatgaaggaggaaaaggatatttatggagaattttggtttttacagccccacgtattttgcctttggtaaaggcatggaatcctcggccggggatctggtcaagcgctttggcggcagcaaggttctgatccattacggcggcggttcggccgtgcgcagcggattgatcggccgggtggaggcttcgctcaaggccgcgggcatcagttttgtctccctgggcggcgtcaagcccaacccccgcagcggcctggtgcgcgagggcatcgcgctctgccgcaaggagggtgtggatttcatcctggccgtgggcggcggctccaccatcgattcttccaaggccatcgccgcgggcaccctgtacgatggggatttctgggatttctacgagggcggcgtagccatcgaaaaggccctgcccgtaggcacggtgctgaccatccccgccgcgggcagcgagggctcgggcgatagcgtcgtcaccaatgaggagaccatgcacaagcgcggcaccggctcggatgcgctgcggccccgcttttccatcatgaatccggaactggtgttcaccctgcccgcctaccagagcgcctgcggcgccaccgacatcatggcccacgtgtttgagcgctacttcaccaacaccaaggaggtggagatcaccgaccggctgtgcgaggccgtgctgctgaccatgatccgcgagaccccccgggtgattgccgacagccacaactacgatgcccaggccaacgtgatgtgggcgggcatggtggcccacaacaacctttgcggcgtaggccgcgagcaagactgggccagccataatatcgagcatgagcttagcgccctgtacgattgcgcccatggcgcgggcctggcggtgatcttccccgcctggatgaagtacgtctataagcacgatgtgaaccgctttgccaacctggccgtgcgggtctggggctgccagatggatgagcagaatcctgaaaagacggcgctggagggcatcgcggccctggagaaattcctcaagtccatcggcatgccgctctcctttgccgagatcggcgccaagaaagaggatatccccctgttggtcaaaaccctgggcgtcagcgatgaaaaccgcctgggcggctttgtcaagctgaacgctgaagacgtcaccgccatctacaacctggcggccgatcggtaagcacaccctaatgcgttcataaaaaagctccccgctaagcggggagcttttactatttatttatcaaatttaatttctccgtgttcagcttcaaattcaccaatacatcgcttcaccagctgctctaactgtttgtttacagagcggccttcaaattgcgctatatagctgatcttttccagtaactcacggctaatccgcaaagtatatctgggctgtgacccgttcatccatttctcctatgacgcatttttaacgtagtattgacattattatagagtcatattattttaaataggagaaatgacgcacttttgccgtcacatttttttggaggttactatgccctcgatcaaagcctgtgccaattatttctgcgtctataacgcctcaaaccgctgcacgctggagcagatctcgctggatgtgcagggcagctgtgaggattgcatctacatcaccctggccggatggaagctaaagcgcctgcgcatcaagacccttaaagcgctgggcgggcggcgctgatctataacgcaaaaggcgcgcggtctcccgcgcgcctcatcttatccccggctattccagccccagcgcgtgcatctgctcatccacgccggcctcgcaggccttcatggcctccagcgtcctagcgatcagctcgtccagctcccagcccagcatcttggccccgttggcgatcacctcgcgcgagcagcccgccgcaaaacccgcgctcttgaactttttcttgacggacttgggttccatgtcctgcacgctcttgctgggccgcatttttgccgccgcgccgatcaggccggtcagctcgtcgcaggcgtacagcaccttttccatttcctgctccgggacaatatccaccgtgaggccgtagccatggctggccgccgcgcggatcatttcctcaggcagccccgcttcccgcatcatctcctggcccttgatgcaatgcgcctccgggtacagctcaaaatccaggtcgtgcagcagccccaccaggccccagaaatcctcctgttcgccatagcccagttcccgggcaaagaagcgcatcacgccctccaccgtcagcccatggcggatgtggaagggctctttgttatattgttgcagcagcccaagcgccgcctcccgcgtcatcatcgcattttctcctccttttggttcccctgtctttaggccctattgtagggcggccggcccaaaaagtcaacgcgggccctgcaggctgcccatcccgcccaccatgaacccctcggccatgcgggctgcctcctgcgccggtatcgccatgccctcatccagccacttttgcataagccctatgcacccggcgctgacaaaggcgtaaaagtacgccagttgcttggggctggccccggcaaacaggcgcgagtacgcctccatatatgcctcccggccgatgtttagcagccgcagcgcaaaggccttgtccccataggggcccaaagtcacggtgcaaagatccgcattctcctttaacagctcaaaaatgcccgcggtaatgtccgccggggtcaggtggtcctcccccaccgccagcaatggctccagcgcctgacggaaatctcccaacatctcctcttccatttggccaagcaggccatgcaggtctgtatagtgggcgtaaaaagtgccccggttcacccctgcctgggcgcagagctccttaatggagatgttctgcaagggcttttgccgcagcaggtcgcaaagcgcccggcgcagcagcattcgtgttacccgcaccctatggtcccgctccttcatctcccatgcctccctttgaaaaatttctgtgaatacgctctgtttccgcacatcccttgtttgctatgtcggttatctcccctgccgcatccggcgggcgattgttgaaataggctgattagaatataatatagacgagaaataaaatcaacattgtgttcaataaaattcgaggtgttcaatatgaaacaacggatctactgcgtaaccggcgccactggccacctgggcggaacgctggtgcggatgctgcaaaaatggggggtgcaggtgcgcgccctggccctgccgggcgagcccacgcaagatgggccgcttgtcacctattatcatggcgatgtgcgcaagcccgatgtcctgcgccccttcttccagggccttgaggatcgggaagtctacctgatccacgccgcagggctggtggatatcggcggcgagagcgcggccctatacgccgtcaacgtgcagggtacccgcaacatcatcgcgctttgccgggagtatggggtcaagcgcttggtctatgtcagctccgtccatgccattccggaaaaacaacccttagaggtcatggccgaggtcagcgatttcgatccggatcaggtggtgggcggctatgccaagagtaaggccgccgctaccagagcggttttggaggcggcccgcgcagggctggatgcggtagtggtgcagccctccggcatcatcggcccctttgatgaggcgagcaaccatttgatccagctggtgcgggattatatggccggcaagctcccggcctgcgtcaagggcgggtacgatctggtggacgtgcgggatgtggcctatggctgcctcaaggctgcggaaaaagggtgcgcgggcgagtgctatatcctctccaaccgccattacgaggttcaggaagtgctggccatcgtccggcgcctttgcgggggccgccgccttctcaccctgcccctttgggtggcccgggccgccgcgccgctgatgggttttgcggcccggcgcaaacacgcccggccgctttatacccgctattccctctataccctgcgcagtaatgaccgtttctcacacgacaaggccaccgcaaccctgggctaccgtccgcgggacctgacgcataccctggccgataccgtggcctggttgcgaggcaaaaaagccgccgtggcggtttgagggtaaaaaaaagcggaaggcagacagcctcccgcttttttattgatatatgtcattggcgcgtacaaaatcgtaatctctatcgcgcaaacccatcccgcccgtccgggccggcccgggtcgctttgcgtccacctttgtcaaataaaaagttgcctgccttcagtgcgcaaaggcgcttggtatctggataaagcccgtcaatattatttcctgtcattccaagctgcaagcgaggaatcttagggcgaccgctgggtgtgtttgaatcacactgtgcataagtcatgcatagctaagagggcctgcaggagattcttcgcgtggcctgaaggccgcgctctgaatgacagattacagatacgacgagaggagccgcaccctaaatgaccgtgctattgcaactgacgtgcatcaaagcacgaaagcgcggcctacttcatgcgggggtggaagatcagcgcgcagaggtagccaaagaagatggctgcggcgatgccgccggccgccgccgtgacgccgcctaagaagatgcccaggaagccctcagtctttacggcggagatcgccccctgggccagcgaatggccaaatccggtgagcggcacggtggcgcccgcgccggcgaactccaccagcggctcataaaggcccagggcgctcaacaccacgcccagggtgacgaacagcaccaggatgcgggcgctggtcattttggttaagctgatcagcagctggcccaccacgcagatggcgccgcccactaaaaaagctttggcaaattcccaaaacaaatccatacttagttccccctttcccgaacgatggagaccgcgtgggcgatgccggggatggtctcgccctggaggcttgtggtggggctgtgcagcgcgccggtggcgcagaccaggatgcgctcaaaatccccctgctccagccgctttaacaggtagctgttgagcacggaggccacgcagccgcagccgctgccgccggcatgcacgtcctgtgcctcccggtcgaagatctccagcccacaatcggtataattggggcccatgtcgatgccgtgctggcccatcatctcccgcaggatctcgctgccgatggcgcctaagtcgccggtagcgatcaggtcgtaatcctcaggacggcggccggtatcctcaaaatgggtgaacagggtatccactgcggcgggagccatggccgcgcccatgttgttggcgtcggagatgccccagtcgttgaccttgcccacggtgaccatctccacaaaggggcccttgccctccgcccccagcagggtggagcccgcgccggtcacggtccactgggccgcgggcgggcgctggctgcccagctccagggggttgcggtactgccgctcggccgtggcaaagtggctgcagctggcgcacagcaccgtatcggcaaagccgccgtcgatcaggatagagcctagcgagagggactcgcacatggtggagcaggccccgtataggccgaaaaagggcatggtcagttcccgggcggcaaaggaggccgagacgatttgattgagcaggtctccggccagaaaaaagtgcacgtcctcctgctgcagccccgcgcgcttgacggccatgcgggtggcggtgagcaggatctcgttttccgcctgctcgaaggtggatttgccgcacatatcgtcggacagggtcacgtcgaaccaatcctttaaagggccctgggcctccttggtacccaccactgaggcgtgggataagatggcgggcgggttttgcattttcagcgtctgtttgcccaggcgcttggactgtcgcttggccatttttctctttcctcctggtcccgcgtcagggcaagggcgcccggcacggggatataaaatggattttatcagtttaactgcttttttagtatggctttacacgggggttttatacagacgacgaccgggataaggagcccagacggcgcaaagaacgggctgcggaaaaggttgcgcattgcgcgcggactgccggatgtggtacgataaagcggtagaaaacttgaaggaggggaaataagatgatcctgtgcattggcaaagctctatgcaaagtctgatttaggggcgaatttgcatagagcgaaagaaatttcgcccggaaacagactttgcggccgatgaaaaatattttcagtaaggagcaaagtcaaaatgaaaaacatttggagcaccttgggggagctgcgcggcttcctgattttgtggtgcacgcaaaccctatccaccctgggcagcgcgatgaccaacttcgcgctggtgatctgggcctatgagcagacgggttcggcgctttctacggcgctgctcacggttgcctcctatgcgccctacgtggcgatgagcatttttgccggcgctttgagcgaccggtggaacaaaaagctgaccatgctggccagcgatacctttgcggcggcctgcacggtggctgtgctgctgcttttggccacggataacctgcagatctggcatctttatggcctcaacgccctgaacggactgatgaacaccatccagcagccggcgggcgacgtggcgaccagccttttaaccccgaaaaagcactaccagaaagtgagcggactgcgctcgttctccaactccctcgtcagcattctgacgccggtcctggctaccgctttgctggcctttaccagcctgcaaacggtgatcctgatcgacctggcgacgtttttgctggcctttttcgcgttggcggcatttgtaaagatccccgacgccgcccgggagggcgaaaaggagggcgtgctgcgggcggcgcgcaaggggctacagtatttaaaggagaacaggggaattttaaacctgatgttttttctggcggccatcaactttaccgcttcgatctataatgcggcgttgccggccatgctgctctccaagacgggaagcgagacggcgctgggcgcggtgaacgcagccagcggcctggccatgctggtgggcagcggtattgcaaccctggcgcctgcgcccaagagccgggtgcgggtgatctgcaacgcgttgctgatctccatgagcacggagaacttttttctggcctttgggcagagcacgccggtatggtgcctgggcgcggtgctggggtggctgcccatcccgctgatgaacgccaatatggacgtgctgttccgcagcacaataccggtggagatgcagggacgagtgtacgcctgccggaacacgttgcagtttttcaccataccgctgggttaccttgcaggcggtgcgctggtggaccgggtatttgaaccctttatggctgcgcaaagcgccaatgggctgctggcgcaggtgtttggcgtgggcaaaggctcgggcgcggcgctgctgtttttggcgctggcctttatggggatattgacctgcctgatctttcggcgggtcaagagcatctggcgcctggaaagggaataaaagcaccctataaaaatcaatgccccgcaggatgcgtcctgcggggcattttttcatggccgttactggatgttaaataccagatagatcagccccaccacgatggaggcgctgatgccgtagaccagcacgggcccggccagggtaaagagcttggcccccacgcccagcaccagcccctcgcttttaaactccatggcgggagcgacgatggagttggcaaagccggtgatggggacgatggaaccggcgccggcgaacttgccgatccgatcgtaaatgccaaggccggtgagcagcgcgcctaaaaataccatgacgatggcggtaaaggcggcggcgtgcagatcgctgtaccctaagacgatgcggcccaggtaactgaccccttcgccaatggtacagatgatgccgcctaccaaaaaggccttgacgcagcctgaaaacagcttggtgtttggggttttttggttgacataatcgttatacgccttttgtttgggcgtcatttgacttttcactttcgttccctccgtttttggtagccgaccgggcctcagagctgaggtatgggccgcggtagcggctctcgtgctcctcggtcacgttcatgccggacaagtcgttcaccggaatattatgcaccttcatgcggccgatcattcctttcttttctcaataaagggggtagagccagaacagcagggaggctgccagcttgcccaggatgatgccgccgatcaggtaccgggcggtgttcatcatgcgcaatctccggatgcccagggagataaactccagcgattcggccagcgcggcggccaggatgcccacgaatatccccaacatcagcccgggcagggcggcaaaggcgggggccaggttccagtggggcatatacagcgagagcagcgagagcgcaaaagcccccagcgcaatgcagccgccccaggcgttggagggcatgcgcacgcgcagcgcctggcccatgcgaggcactacccccaataagttgagcagcgcgcccagcgccgcgcctaccaccgccccggcgatgatgtacaataagaccagcagcacggcttgaaaaaagttcacgacccaccgccccccagctggtttttacggaagttctccacatcctgggcgtaggtgaactccttaagctccaggggcgtgggctcttgatacttgcgcgcgccggggcgcaaaaagaagatgcccgcgcccacggccagccccacgctgtagggcaggctgacccagagcggccgctcctgctgctctcctgtgaccatctcgtagatctgctggtgaactttgggcatatccacatccgcgtgaaagtagaccacgccgaagcccgcgcccaaggccaggatcagcaccgccagcgcggtgcgccagaaggcggaaaacccgcccttgggggaggggggctggggcatcagccagacctctatctcgccggcctggaccagctcgtagccgggataatgggcctggatcagcgcgcagaccgccacgaaggagaccggctccataccctgagggcgggattgctgcacgcgcagcttttcaatccccttgggcagcccctggggggaccagagggtggcgatatccttgaggcagatgccttgccccttttgaaaaacgaagcgctgcttaagcgcgatatagagcttgaccatttaaagcaggcccctttccaccggcgcctggacaaaatactggcgccccaccgtgccgccgccgttttgcagcgaatcggtcacccaatagatcaccacggccataaagatggccgccagcagcgccaggatcgagcgcatctcccactttgccataaattaccacctgccttacgcttttcttcccctctagcatgtaccaaggaggcttttttcaaacccggttttaaaaaacaaaagcgccgaggcggcgaatggggcgtaaagggcaacaggttttgcccaagatgctacgctggtgcttgggcatgacagaagtgaagttttggcgcttgtatgcaaaaaacggttttgccatagaaataaagggcgccgggaacgcgaattgcgcccgggcgtagatgggtgctataatggtacgaagcaaaaaccctgaatgaaaggtttgaccctatatgaaaccacaaaagcgcgtggcggccatccacgatatttccggctttggcaaatgctctttgacggtggcgctgcccatcatctcggctgcgggggtggagaccagcgtgatccccacggcggtgctctccacccatacgggcaatatcgaggggttcacctaccgggacctgaccgaggatattttgccctttgcccggcactggaaatcgctgggaatacattttgacgcgatctataccggttacctgggctcgtacgagcagatcggcctgatcgaagaggtgatcgacctgctcgcagacgaggatactctggtgttggtggacccggtgatgggggactatggccggatgtacgcattgctgggcgaggacttccccgaggggatgcgccggctgtgcgccaaggcggacgtgatcatccccaactacacggaggcggcccttctgctgggcgaaccctaccgggacgggccgtatgaggcggcatttgtggagaagacgctgaaagacctggcccggctgggctgcccgcgcgtggcgctgaccggcacatggctggaggaggcaaccttaggcgcggcggtgtacgacgcgcaaagcgggcaggtgacctatgccatggggcagcgggtggacgggccttatcacggcacgggggacgtatttggcagcgcgcttttgggggcgctgatgaacgacaagcccctggggcaggctgcgcagatcgcagtggattttgtggtgggcagcatcctgcgcacgaaagaggcggggacggactggcgctacggcgtgaactttgaggccgggctgccggcctacattcgcgcgctggggctggtataaaagtataaacgggccggaaaaggcagtgagatagcatgacgcatgcgtgagaagtatgggcttttattcagcggaatttctccctccggcgcacctttaggtgcgccacctccctcctcagagggaggcaagtgtgggtgaagcccaaaggcggagcacgggtgaaaaggttcgtttaattttcattcagaaggaggccgcaaggccgaggaagaatcccgcgcatgggcgggaaagcggcgcttgcccgcatctatcctgcgctctgtctgccagccccatccacccgtcgcttaaactgcaaaaaaagtttacaaaagcatcataaattcttcccatcttgggcctatacttccccttatcagggagggccataaaaggacgggatcgagattgaaaaagaaaattttatgcctgttcgtcgggcttttatttctagccgtaggggcaagcggctgtaccggcgacgatgaggatgcccagacggctgctaacaccgccgcccagcaggtgatctacggtcaggtatcctctatcgaagggggcaacttcacccttgccctcatggagggcggcgccgcattgcagctccaggaggcggccgcgcccggtgcccttatccccagcggggagagccagaccctgcgcatgcccgaggatgggcagctatattgtctcagcggtcaggaggccgtaggcgcggattttctgacactggagcccggagatgtcgtgcgcgtcaccctcacgagcgaccagttaagttcagtgctgattttatcccagggggaataaacgaacaaagcgccgcgaaaattcgcggcgctttgttttaggttttcatgcattaaagtacatatcgtataccacaaatccatggatatcctgcaacgcaccaggataagtttcctggcacatcatacatcttggctccttcattgggtaaccgcttgtgggataaataccgtatccggcggatgtcttaaaacccaagcggttgtaataatggtagtctccctctaggatgatccccttatatccgctttccctcgctctttcaatccccagggatagcatggtttttccaatgccctgtctgaaatgctcagcatgtacgcaaacaggggcaagcagcacggtttccgcttcccgggctggcccatgcccaccctcggccgttggcgaaagcggaaagcgggaaaacataaagtgtccaacgatcttgccgttctcctctgccacaaacgatagctccgggatatgataggccgaatctctgatttcttcaatcagcgccagtatatctgtgccatcagagtaatccgtgccctcctgaaacgagcgtagcaccagggcaataatatccttataatccctatgggtttctgggcgtatcgttacctgacccgccataaccttccctccttccaagccataaaccatggcgaggtatttttctattccgccagccccagttcctcgtataccaggtcccggatcgcgcagtggatatcctcgatatcctgccccatgcccatcacgtgttgggcgtagaagatggaaagctgatgcccggtgtccagcgccacataggccccggccgcgccgtcccagccaaactcgcccaccggccccttggatgcgaatttgtcgatcagcgtgcgcacgcccaggccatagccgtaaccggccttgcccattttttcaaaatccgccaaccgcacaccggcgagccggttgcgcttcatgtcctcaatggtgtgcgcctgcaaaatgcgcgcgccgttggcgcctacgcccccgcaagccaacgcatccgccaccggtgcgtagctgtccaccttgcagatcagcccgccgctgccgctctcatagttcaggtcggtagagcggggatggataaaggtaaacggtacgatatgccccgccccgtccacctcgtacatctgggaaaaatgggccttttccacctcgggcgccaggtggaaggtcaccggctgcgcccccagcggcaggaagatatgctcgtttaagtattcgccaaaggtctgcccgctcaccacctcgatgatacccgccaacacgtccagccccaggctgtactggaaatgggtcgaggggtcaaagtccagcggccctgcggccagcgccgccaccatctcccgcgtggtagcctgcccgtccgtgcgcgccatcaactcctgaaaggccggggtgcccatgtcgtagttaaagcccccgctcatggtaaacaggtcctccaccgtcagcgcggtgctggccgggcggatggcctccccctcccgcaccgtcatctcctcaaactccggcaggtatttggccaccgggtcccccaaaaagagcttgccctgctccaccagctgcatccccgccgtcacggtgatcaccttggtgcaggagaacagccggtactcatcctgcgccgtcacgggttttgtgcccgccgcgtccgaaaaaccgcccatgtggcggtacagcctttcatgccctctttgcaccacacagtcaaacgaaggcacgccatatttctcttttaatccgtccagatacgccgtcagtttggtaaagctcaaattcccccaccctttccccgatcgatctatttacaggttgtatatagcttaacactccatagtatccctcgtcaacgcctatccgtccgcccggcggatgaggctcttgctcatccactttctgctgcgccagcgcatcatctgcgccatgccgcgcgccagttcatccatggcaaaggcgatccagcagcccaccagcccaaggccgcacaccacgcccaggatgtaggagaacaggatgctgatcagccagcagctgggcaccgatatcgccatggagaacaccatgtcccccgcgccgtttaagcacccgccctcgatgttgttaaacgcccggccgatctccaccaggatatccgcaaacatcaccggcaggcacatggcgatgatctcctcgctgctcgtaaacatccccagcaccggccggtaaaaggccaccaccagtaccgagagcaccacgttgcaagcgatgccgatcacgatattctgccggttgagccgctcggccttctgatactcccctgcccccaccatccgtccgatcatgatggtggtcacctgccccaagcacatgcccagcaggtaaacgtaaaagaagatattgctcaaatacaccttggccgagaccgccgccatgcccagcgtggcgataatggcggtggagaccacctggctcaccccgtaagagaggttggctacccctggcgggatgctcaccgcaaagatctggcggatcatcttcaccggcagcggccgcagcgcccttaaagtaaagcccaccttcacccggcggatggcgatgatcatgatgccaagggccaccgcctcgctgatgatccgcgcccagccgatgcccgccacgccctgcagcggggtttcaaagggccggtaaaccaccagcaggcagagcagggcgttgatcacgttcatcaccagcgccaccaccatggcgatctgcgtgcgtccatagcagcgcacgataaaggaaaacagcgtgatcagcgcctgggtgatggccagcgccgtgacgatgcggaagtaatccgccgccaataccagtacctcgccggtcagctgcatcatccccatcagcggcagcgcgaagatggacatggccgcccccgtcaggatgctgagccccgcgcaaagcgccagcgccaccgtggccacctcgcccgagtagcggcggttgcccgcccccaggttttggttgataatgatggccacccccgtagccaccagcgtataaaagatctgcaccatattcagcagctgggtggccgcgcccaccgccgccaccgcgttatccgaatattgcgagaggatgaccacgctgaccgtccccatgaggttgcgcagcagcgtctcgatcagcagcggcaaaaacagccccagcagcgtgatctgcccctccggcgtctccaaacggttgatatcccggttcgccctcaaaaaacccatttgcttccattcccccaacgtttttccccataaaggccagctccaagccgcccttttctctctcaatcgtcactttctcacaaatggctctattcccggtagacaaaggccccggagaaagggttccccagggccttgcaaagtctgatataacggtttacgcctcgtacttctcgatcgccgcattgatggtggcgatctcctcgtccgtcagcgtccagtcggtggccgcgcagttctcgtcggcctcggccacgttgcgcacgcccatcagcgccgtatccaccagcgggttctgggtgctccagttcaccgccacttgggccaccggcttgccgtgggccgccgcgatggcgtccagggtccccagcagctcctggcacttggagaacttgggctctttaaagaagttgtagaagctgtaccgcgtatccgaagggtcccagttgggcagggtgcggatggcgcccgtcaggatgcccgcgcccagagaaccataggtcataacgcccatgtcgcggctcttggcgtattccatgaccgcaagctcagagcggtccaccatggagaaggggggctggatggcctccacatcgccgtactgctcggcttccttggtcagctccacgctgtagttgctcaggccgatatggcgggccttgccgctctttttgatctccatcatcgcccgcatggtctcctcggtgggcgtgcccttaaagtccggcttgtgcaccaggtaaaggtccacatagtccgtgcccagccgctttaagctctggtcgatctcccacatgatgctcttgtaggtgatatcccgctcgatcccgtcgatgccctcgccccagatcaggccggccttggtggagatgatcagatcctcccgcttcatgtcgcggatggcctcgcccaccacctcttccgagtggcccttgccatataccggcgcggtatcgataaagttgaccccgttatccaccatcgcgcggatcgccttgatggaatcggccttgttcacatcgccccagcccgtgccgccgatggcccaagtgcccaccgtcgccacggatacattcatctccgtcttaccaaaccgtttaaaacgcatgtttttttgttcctcccttaacccagataaaaagtacgtttcgccgcgcgccgcactaaaccgtcccgcgcagggctttagaaaaacccacctttccattataatgcaatcgcagaaattatcaatcattgttaataaagtaacaggcaaccctgcgcaggagctcccctgcccgcgcagacgccttttatctccagaaaatatcctgcgttttaccccatcgttaccgtaaagctctcgtcctgatgcgtcagccgcgccaaaacttttgaaagcaattcatactcgtcctgcaagtcccgtggcagcccctctccccccgtcaccatgatctgtgccggatattcgcagtaccccgtcaacatgtcccatatcgcatccatgttcatcccgcaccacgctggaagctccagccctttttgcagcgccttataaaaatcccagtaggtcttaaccgccttcaggtcgatctcatatcgtttcatgctgcctccctatacgatctcataaaaggtattataatggtcatacgtcgcaaagatcaatccatcgcttgaatataggatgcggtgcccgttgcggtatccgcctgttccgtattcttcctcgcccttccttttccctttgctgttaccggtaagttcattctatctaacccactcctttgtgtcattccgagcgcagcgaggaatcttctgctccttaccctttcattgggttatatgcggtgaaaaaacgcgcgcctgaacgaaaacttgaactgcattcttttcccctgcgcgcacatgccgcccggcctaaaggattataaaccccttcgtgaattttttatcgcaaaaccgctctctttcccgccacgtttgtttattttttatcaattcgtcaatgaatttattcatttacaggccttttattgcaaatttattttcacaatgctatactgcaggtagaaacatttcttcaatctcatttcggaaaggagcgtatttatgaatgtaaacagtcccgacctgccgttgctgctgctggataacagcaatatgatctctgttttaaacgagggggagttccgctgccacaaccttacctttgaggaggccagggcgattctggaaacgctggacgtggacagcatcctgcgctgcttttccaacaaggatctggagaacgtgatcttcgattatctgggggtcgcgcgcaaggagtatcgctataaaagcatccgcaatatgcgcgtggggcaggatgcgctggtattcaagctctacgtcaccccgtctgagacccagccggtcatccacgtggacggcgtagaggccaagaagatctggaacacctacgtctactgccagctgctcagccgggagaagtagaccttttgccaagcacgcctctttaactatgaaggggcgtgcttttttgtatactttagcactcgctacgctgtcattcagagggaggccgtaaggccgagcgaagaatctcacgcataggcaggaaagcggcgcttgacctgggctgcgcggtgcaggcagggccgacagggcattaggagattcctcgcttgcgctcggaatgacggtgcagcatactgcttatgagtgggaaagtataggtatatgttcagcggcatctctcccaccgacgcacccaaagggtacgccacctccctcaacagagggaggcaagagaaagggaaaacaagcggcggagcataagcgaaacggctggagaatgaattggttcatcggcatcggagagtttgaaaaacctccgtccccaccacttcagtggccgtttggggaaatctatagcgagcgcgtccggtggacgagcaagcgagcggtgatttctgtgaacgtgaggtgcgcccgagcggccgacgtgccgcgatgggcaaacccacagtgaacagtgaaccttcaggtttagggattgttaagggaaatctatagcgcccgccgccagtggcggagcaagggcgcgatgatttctgtgagggtacggaacgagcgccggcagtgccggatgcagcgagtgcagtacccggtgagcgtaaggtgagggcgaacgccgtaaggcgtgaaggccagacccccagcgaaccgagagttgcccggctttgccgttgccggagaaagtactaaagcgaacccgctacgaacagaggggctttagcctaaagggggaaatcggaattcccctgcttacgccccctgaagttcgctatggacgcagacttcgcggcgcgttagccgctcgcctttgtctcatgctcacagagcgctgcactcacttccatagtccgtctctggggtcgcctctgttcattgcgggctcattcttcgcggcacggcggccgctcgaatttacctcgcattcacagaaatcatcgtgccctttttcacccactgggcgcgggcactatagatttccgccggcggcgttcgtttcgcgctcccttaacgaataaaaaaacgttccctaactttcctccctgcctcgcgttaagcctggttcattactgaacaaaaaattatactttagcactcgcttgacctatagggtcggagaacgtgcgcagcctagagggtgtcaaaagcttcctcactgttgctcggaataacaaaggcgtatctaataagcgaacgaatcagcatacatttgtccgcaaaccatcctctcctgcctcccttaaccaaagagtagaaatcaactcatagcgcatggttcagcccaccgcaatgctttattgcatacaaaaaggccctgcggaagttccgcagggccctttttatcctcgcttattccttggtggaatcaaaggggtttccttcgctggcgctggccttgctcccgcagcaacaggaagcggccttgcccacagaaccggtcacctcaaacagatgcttgacgatattcaccgtaatatcgttgatggccgcatataacccataggccttgttgccggacaggtcggtgttcttcaggccttccagggtcaggcgcatcacgtcgttgaccacgttgaccttggccacgcccaactcgcagcagcggtggatgttgtcctcgccggagccggagccgccgtgcagtaccagcgggtgctggcaagccgcgtcgatctccttcagtcgctcaaagtcgatcttcggggtgcccacataggcgccgtgcgccgtgcccacggccaccgccaggcaatctacgccggtatcggcgataaagcgcttggcctcttccgggtcggtcagcgcgctaacgccgtccacagcgtagttgtcgccctggcccacatggcccagctccgcctcgatgctcacgcccaccgcatgggcgatctgcgccaggcgcagcacgtcggctacgttctcctcataaggcagggtcgagcggtccgccataatggccgagcagccggaagatacgcccagcacgcaatcttcaaaggtgcggctgtgatccaggcaggaggccacgggcacatccacctcgtcggcaaagcgcttgatcatgtaatgggtaaagtgggggtctttgcggttattcgtcaggaaaatcagcggcgagcgcgattccaccgcagcctgaatagccgcgcggatctgcacctcgtcattgctgggcaccgcaggtacaccatacttgccggcatacgccgcgtcgacgatgtctttcatgggaacaaacatttctcttacctcctgatcgttcgtatgtaaaaactgcattgataccgcaacaaagcgcgcccccggcgcaagttctattatataactttgttaacaaaggtagtatagcacacttgtccccttctggatagcttttctgcgcgatctagcgcaattttatcgctaatgtcaccgattccatcggccgtatcggctcacatcagtccctgaaatacaaatcccgcgtgtataccttatccatcacatccgccagttcatcgctaaaacggttggccacgattacgtcgctttcgcgtttaaaggcctccagatcccgcaccacacgggaattaaaaaacaactcctctttgagcgccggttcgtagacgattacttccacacccttggccttgatgcgcttcatcacgccctggatgctgctttggcggaagttgtcgctgcccgccttcatcgtgagccggtatacgcccaccacaggccctggcacgtccgggaatccagccaggctcaaaatccggtccgcaatataatccttgcgcgtgcggttggcctccacaattgcgccgatgatattgttgggcacctggtcgtagttagccaacaattgcttggtatctttaggcaggcaataacctccatagccaaaggaagggttgttataatggtctccaattcgcggatccaggcatactccttcaataatggcgcgggtatccagcccccgcacctctgcataggtatccagctcgttaaaaaaggctacccgcaatgccagaaaggtattggcaaacagcttaacggcctccgcctcggtggtatccgtcaacagcaccggcacatcctggtcaatcgccccctcccggagcacgttagcaaaggcccgcgccgcttccttcaatccctcgtcctcctcgggcgcgcccacgatgatccggctggggtgcaggttgtcatatagcgctctgccctcccgtaaaaattcagggctgaacagtatgttatgatagcccagcgtacgccgcacacgcttggtgtaccccaccggcaccgtggatttaatcacaatcacggcctggggattcacctttgctacctggcggatcacgctctccacagaggaggtatcgaaataattctttttcgggtcgtaattggtgggggtagagatcaccactacgtcggcctttccgtatgccgcatccccatccagggtcgcccgcaggttcagcggcctttcacgcagatattcctcaatttcccggtcctccaggggcgatacccgccggttgatcttctccaccttctcagctaccacgtccaccgccgtcacctcgtggtgctgggccaataatatcgcgatggataagcccacatatcccgttcccgcaactgcaatcttcatccattcattcctccgtcaccgcagcaaccataatagtttttgtaccatttggcaaacctccccagcccgtcccggatggatgtggtgggcttaaacccaaaatcccgctccaggtcgcttacatccgcaaaggtctggtacacgtcgcccggttgcatgggcaaaaattccttatgcgccggccggtcgatcacgccctccgccatcaagcattgttccagcgtttcgataaagtcaagcagatcttcaggcctgttgttgccaatgttgtacacccgcgccggatcctctccctgcggcgggtggtccagcatcgccgttaccccgcgcacgatatccccaacataggtaaaatcccgtttcatatccccattgttgaatactttgatggtctctccccgcaccatcttttgcgtaaagctgaagtaagccatatccggccggccgtaaggcccgtatacggtgaaaaaccgcaagcccgtagtcgggatgccgtacaaatggctgtaagtataggccatcagctcgtccgtcttcttggtagccgcgtaaagggatatcggtttggatacgtcgtccgctacggaaaacggggtcttttgctggttgccgtatacagaggaagaagaggcgtataataggtgttctactcgctggccgctcaggtcgcaggcgtgcctgcaggcctccaggatattgaaaaatcctaccacattgctgaagatatacgcctcggggttggtaatcgaatagcgtaccccggcctgtgctgccaggttgaccacgatttgcggccggtactttcttaaaaccgcctctaccgcctgcttttccgccagatcccccttgacgaacacaaatcgctcgtcttcctgcaaaattgccagccgcgcacgcttaagctctacatcataataatcgttcaggttgtcaaatcccaccacccacacgccctgcttgagcagctgcgcgcataggtggaagccgataaatcctgccgcgccggtaaccaatattcttccctgtgccgcagccttgtttgtttccactcccatgacttgcgcctccctattatcgtttaaattcattccgccttttgtttccctctcgccattgcatataaatcgatgatctgcctgcgccccgctgggatcacccacatcagccccaaatagctccccgcgcaaatgatgatcgatacaaactgccaaatcatattcgagctgacctgctgaagcagcaaagcgatggcagccatccctagggtgcagccgatttggggcagcgtattggtaaaaaagcgcaggatagagatccccgtgtatcgctttaaaaagaagcagtttgccaaaagcagcaccagcaacgtggccgagcgcacataaatcaacacttcaaagccccatttcgccgcccaaatcacagccggtatcaacacaatgatggagattaagtgcgtaataaaggatagtttgggcttgccctgcgcgcgataaatttcatcgcagatgtaatcgtatgcaatggtaatacacgttaccaggctccataggccgataaagctggccgcttgcgcccattgcgcgcccagggccacccccgtaaccagctcgcggtataaaaacaaacccacgcccatcggcaaaaccagtgtggtcatcatactctgggccctgtacactacgtcgttaaaccgtttgggctctccctgcaaacgagagattgtcgcgaatacaaccggcaaaatcgcactggagacgatgcgcaacacctcgttcacagtggacatcgacgttttataaagtcccaggtagtagctggtcaaaatcgttcccacgattaaaatgtcgacgttggtcgccaaccataccgtgatgctttcaaataaagaccatatactataggaaaacatagccttcagcgtcgaaaagcgataaaataagcgcggcttccatttagagattacggtcatggcaacggcttgatacaggtttcccgcaatctttccgatgatcagggcccagtatccaaggcccacaagggccagcggaacggtgatcgccagcggaatcgccgcgctgatcaatcgaacccaaaaaagcgatttaaagcgcaaatttctttgaaagatcgcagcctgaatgctagaaaacgaggtaatcggcagggatatacaggcaaccgccaacgcaatccccttcccgggcgcaccgatccaggtggcaatcggatcccgaaaaaagattatgcccgctaagaaaagcagcgatatccacaggttggtccaaaacgctactgaggcgatctcttcaagtttttcatccccccttagctcgtgttggacgatatatttttgaaagcccgcctccgtaaacagatccgtaaagctgatgaccagcgtaatggacgctacgatgccgaatatctccggcgccagcaaatgcgccagaatcatattggttaccggcgagattattttaagtacaatctgcgacaatgccgaccatttcgtcgcgttgactattttttttgctgaaaaactagccaatcgtttccctccgctttacgttaaatatgccccttccaaccggcagtaggttccaggcgccaatcttctgatccggcaaatgtagcagcagggcattgtacccctctctcgcaaaccgtaatatcctgttcacgcagcccttccttggccaggcgcggggcaatatagcgtaccgcggcggggttaaagcccaccattcggcatattaccaggtccaccgcagcgccgctgttccccatgacgatcgcccccacatgcttgggcgagggcatcatcgggccctcgttctgtcccgatacgatcatatcgcacaggtgaaaaaccttgcgctgttcggtttgcgtcataatcccattttggtcggcaaatcgtatgcactcgtttaaatcgactatcgttttccaaatcgtatcgttgccgtaccagctcccctcccaaaaggggtcccgcgtcagcctctggcctattctgcgcaaaacagcatgggcgtaacggtacaatatgcagtacttacggccctggtacgccgcgttattatagcgatccagcagatgcgaggccgcgcgtttgatccagtgcgccctgcggtattcgtccccgccgtcctccggggaaccctgcgtatggtgcggcaaaaattccttgcgcatattcgcccctacaaagttttttgcacatgcggtcaaccccgcttttcgatgggatttaggcttgggtaaattaaggatcacatcggcgtttaaaacttcctcgtgcagcagatactcatgcttatcccccgcatggtgctgacccagcaggtccgtagcgtaattcgtaattctaaagcggctagcgtccttcacctgtgcgaacgctgaatctttgtttaggcaaatcactttgcccgataattcatcttgaacggtttgaaaggttccatcggcctgacgcttggcaaccatgcctctaaagtcaaccacgcgtacagggattttctctgtctgaaaaaaatcccatacgggcctataaagttcttgcagccgctcaaaatccgctaattgcacgggcgcgtcgcccaccgtgatctctccttgtccctgaagggcgattaccacataatccaaaaccgcgcgtatgaccgaaggatgagtgaccaggcaggacatatcatggctattttccgggttttggtgagatacccagttgggtttaagcaaaaccctttgcccaggcttgatcaactctcccagcggattccagcatgccttcccataattatcgccgtccaaacccatctgggcaaacccctcgcgcaccattgcgtaaacgtcattgggccgggaggcggtttccttaaaaggatattctggatacgcttcccccggcgaaaaatgttcatccggctgaggatactccgcctgtcggtttgaaacgatatatacgttttctttcgccacttacttctcctccttgggcagggtaaaccaatctcccagctgctttccatattcaggcggggtaaatttctcgtacccagagccatggataaacgtcagctctccaaaatagacgcgctcctcatgctggtaaaaatcaacccgcacatgtggaaaatcctgggatagcacccgcgcatagtccagcatctcctccagccgggagggcttttccaccttaaagccagggtctgtggggtatttaattgaaaccggaacgtaattccaatttaggtcgtatatattgcgcctgtggttttgcgcgcggtcaatatcaacctgaattagccttggcgcgccgtcaaagcagaatatcttataatcctttaatcccccctcggaggtatcctccaaaaaagcctcgcatacaatggcgggacgtatatctttgtagacccactcataaccatggtaataatagttatcgtgcagccaccgatccagcaataaccgggtggcccgccggtccagcttatccttatcctcgcaaaggatattccatccgcttccatggttggccttgagtacaaatttttgtggcagcgtatcaaagtcaatttgggatacccgttcatatacgccgatcaagtcgatcagaatatgctccaggcccttcgcctttacatactcgcgcacgcggtatttatctacgcaaatggggacgcgctcgtcccgccaatataccttcatccattgcagtttttcgttataggtctgcggattttcaagatccagcgtcattcctgtagaatggaaatatcgctcgcatatcacctttgccagttggtcatccgtaacctgcgcacgctttcgccgcaacgcatcgtgtatgcgcattgcgtaaggaacattacgcatcgccacccttaagctcaacatcatcgcctcctcgcgttctcagctcttatcatgcttcaataaccttttcccactcccgcaggatcgcctccggcgaaaagtccctaaccctttcaaagcccttggtctcatagtgtttgcgcaggggctcgtcctccagcagccggatgatcccctcggccagcatctcttcttcccgggtcagcggttcggtggcgttgcgctgcccatatccgcaaaccggcgtcaatacgccgaatggcgcatattctagctgcttgtacaccgtaggggtcgcacaccccggtgaaagtacctcgcggctgcccgaatggcaatcacaggcaatacacgccttaccacagcccaacgcctccagtaatacgttgctcatcccttcaaagttagagggcagcacaaatagtgtcgcgcctacgatataggcatgcggtgattgaatgtatcccataaatttaacctgctctgcaatcccgagatcttttgccagctgctgttgctctttctcaagttcgccttcccccaaaagatagagcgtagcctgcggctgcgtttgtatgaccttcttaaaagcgcgtattaaatgccactgtcccttctgcgtcgtcatccgtcccatagttatcacgctttgggatccaagatttatccgctgcccaccggctaaatcgaataacatatttccatcacagacgttataaacggtagccagctttttttctgggacaccgaaattactccttaaatcatccgccacatcttgggccacgcacactacttgatcactgcgtttggcaataaatcgcataaactggatctggagctgacgactaatccatcctttctttagtcgcgaagtagacatatgtacccttactgaggagattactctatctcgttttctggagagcacgttaaccagattcgccccatccatcaagctgatactacatacaatattctctttagcttttatacatttgaccttcttaatccgcttaaatagtacccgtagcttaccccacaacgagtgcataggcggtaaattcaaatcgtgtatttttccctcaacaggataactaatctgagcaccatcaaacacaatgatatgtacttcatatcgctcacccagaaaaatcgacaggttcgacgccgcccgctccgctccgccaccgtttaatttttggatgataatcgcaatcttttttttcatttgtttatctcctggcctgctcagtataaggcggcggcaacgtcaaccaatcgccaaagattctgtcccattccggcggctcaaatgtcccccacccactcactggataaaaggttagttctccgaaatatacccgcccgtctgattcgtaaaaatccacgcgtacatgtggaatgttccatgccaaaactttagccaattccttcattcgctcaaaattgacgggtttttccagctttctatccgaattttcatagtcccacactaaagggaggtggttaaagtccatgtcataaaaatccatcttcgtattcacctgccggtcggttacaattaacattgcttttggcttcccatcaaagcaataaaacttatagtccgtcagccctgccgccgcgccgcctttatccatatggtcctgcatgtaacgttctgcaataatacgtggaggtacatttttatagggccactcccgatgtaaccgttcatatttccttttaagccagccctgtatcaggtcgcgcagttttttataatccaactggcttttatccttgcagatatatacatctcccgatgtatgcgtgggtttgagcacaaatcggttggggagcgcatcaaaatctatatcgtcaaaactgtcccacaccccaagcaatgggatcaaatattcctctccgatcttctctgcgaccaattgccttaccgcgtatttatccaccatctgcgtatattctggcctacggttgtacaatttaagccattgcagtttctcgttatatgtttctggttttgcaagattcagcggccgcccaagcaatgcgcggtacttgatttttaaaaatattttatccggtaatgcctgcataccgaatcggatcatttttcgcgccatctttatcggagcgctttgataaagctgctcgttcattcgccattccctccaattgctttgggctttatcccaatatgctcaacaaatttgacgatgatatagcttgccaatatataaaacgctgtctgtgcaaacgaataaagttgaaaatagccgatactatggagtaccatcaaacatatcgcatacttcgtggcgctgtaaaacagattgtattgcgtccgttcaagcttcgtctctattttttttacagccattccatataaaaatgggataattgcaggccccagaatcccgatctgataaatcgatgcggaaatcatatctgtgggtatcgtcccccccactcccccggcgataagttgcgtattataggtccatatcgtatccggtaatttaaatggtaaaaagctgctgggtatccacgccgtcaaggcgttgacaagatcattccccaattgtaattgataaccgccattcatccagcttttcaaaatatgctgttgcgtttgaaggataaagccaaattcattcgtgatagtagtggccgagtcggtggtatccgtctgcattagcgtgccaaaacgaatatactccataaccgcttcagacaaaatgacgatcaaaaatgcaatcaccgcaatgattcctgtttctaccaacgctcttttgatcgatacgcctcgcaccttcagtcggtattccatcataataaagtaaatggcaagcacaaaaaatccagcgttcgtacgactgtccgttgccagtataaagccaattccaccagcggcagccaataccgccatcacccctatcggaatttttttcacacctttcacctgaaaaaaatagggaacaaagataaatgctgcaaactgcagtatgcgcgttaccttttccaaaaaggccaaggggttatacaccgtcgaatagtttgcccgtactgcatccgcattttgaataaaattagagataccgccaaaggcccgtgtccataaatagaaagatatccatccaatggcgagtatcaccgttgctcccaatatgatcggttgcgtaggcattgcctggtctttttttacccgggccggtttagctactttatatcccagcgacagcgcggcaaaaccaattaaagacagtagcagcataacgaacagctgcatttgccctgttgcagaaaaatcgattgtccatcgcccgctctcaccctgcaaacagatcgtcgccgggaggataccgtaaataaacgcatacatataccgcgcgcaagatagcattccaaaacttttctgacgcagcgtatgtcgcgtttcaattatcaaatagctgattgccaatacagcatatcccagcccgataaacagcatcgattcaccttctcattccttagctgataacctcatcccaaaggtccaatactcgctcggcacggtattgctccgccgtcttaagcgcaccagcgcgcagtttagcttccagtgcggggtcgcgtaaaacccgcagcatggccgctgccagcgcgtttgcatcccctaccggcaccaaaagcccactctcctcttgcttgatcacttcttcaacgccgtcgtactttgtgctaacgcaagccagtcccagcatcatcgcctccagcagcgcgttagaaaggccctcaaagtctgaggccattacaaataaccgcgctccggcgatgcgttggtgcagatcggttacattgccagccagctctaccgcgctctcaatacccagctctctggcctggtgcgtcagcgcctcgccaagcgggccgtccccgtaaagggtcaacgtgcattgcggtagctcccgcctcaggcgggcaaatgcctccagcagtaaccgttggttcttttgtggtaccagcctgcccgccgtgacgatgcgccagccgtctgcgctgccgggcgcacaggttactgaaactggattggggattaccctgccctttcggcgaatcccacgggaaaagcaggccctttcatgttcattttgaaagactaccgcccgcgctttcggataaagcaaattgcatccccaccggatcagcgccccgcggccatctcttttcgggtcgttgcgctcggatacgatgatcggcacgcgcaaccctaggcaggcggccaataccagtccattgatccgcccaataaacgaaacgacccgatccggtttatcccgttttacgtatgcgcggatacggcccagccaccggggcatacgggccccatagcttgtgcccttaaccgtacagtccaccaaacgcacaccgctttccagttcataaccgcactggttttccagtaaaagcaggatatccacctgccatcccctacgcgcataatggtttgcgagaatagaaatgacccgctctgccccgcccctgcgtaagctgccgataaaaaaagcgatcttcatctatcccgcctccctgccgcccggtgcacggttcagcagcatttcataaatactctgtaattctgcctcaaccgtttccaggctataacgcttaatcttttcccggttcgcccggcccatctgctgcgccttttcccggtctgccgccaatatggtaatcttttcggcaaacgccttgctgtccccaaccggcaccagatagccgccaacgccatcctcgaccaaatccacatttcccctgatttgggtacacactgccggcaggccgctggccatggcctccatcagcgaacgggccaggccctcctgcctggatgtaaacaagaacaaatccgccgcttgaagcaactcctttatatcctgcctataacccaaaaaatggacctgatcggtaacctgcagattttcacatagtgctcgcaacttttcttccatcggccctttaccgcagatatagtattgcagtctttgatcgtgagccgcagcaatcgcccgaatggcagtttcatagtcctttctccgaattaggtcgcccatcgaaatcagcatcatctgatcttgattcaatccaacctccctgcgcaccttatcccggtccacctgtacattccactgcgccaggtcgatccccacgccccgcacgtagtaagtcttgccctcgccgcgcagcttaaatcgccgcgccagggcaaaatcttcctggttaatggtgatcagcacatcggtccagcgggccaaccatcgctccacagggtagtaaagcagccagttcagcttcggcgcgcccctgtaaaagtggaaaccgtgcgcctgatagatcactttttttatcccgcactttttcgcggccagccggcctaagagcccacctacaggcgtattacaatgtaccaggtcgtattgctcgcgctccatcagcgcgcatagctgccggtatgccttccagtttccgggatgcagcgggtttcggatgaaatcgatttggcgcgttttgacctttagctcgcgttcctgcgctttaattttatcctcatctcccccggacaggttgcaggcgatgtcaaattctgcgccgatagcccgcgccgctcgtatcgaggctgttgcaaaaccgtcgtcgatcttgctgccaatattgctgacaaaaaggatcttcgtcattcttcatccctctcaatatggccggcccagcccgccgcgggtttaaaccgttcaacttcatgccactgctccagagggcaacgtacgccgccccgttcaatggtgatctctcctctgtcgcagatcagcggataccgatccatatgcggcgtttcccgcaggtagtggatcttctgttcatcaaagcccatgtaacgcgctgcggccatatctaaggcaaagggattttcgctaataaacagctttccgcatggtttaggcgtagggtgcaacggaccctccccctgcccagccactagcgcgtccgctatgcacaggtatctgcgctgtcgcgtatcctgcagtacgccgtcacggtctgcatacaggatgatcctgttcagatccaccacagagcgccaaatggtatcgttgccataccaggcgccatatcccttcatggtgcgcaactttttaccgatcagcttatcgtgcacaatctttaccggcaccaagcaatagttgatcgccggatttttatatcggatgattttacgcaccacgctgcgcagccccttgtcggcgttaatgacgttcgtttcattagagggataggcgtcccctccctcggccgaggcgccatcggtgcggtgaggcacgcagtttttattggcaacgatgcccaccaggttcttcatcgcacaggtaatgcccgccagacggtgggttttaagcttggggagattgataaataaatcgcactccaatgcgctttgggatacctcgtaagcgtgttttccgccgttatggtaatcggttataggctcggtggtatcctccatcgcaaagtctgccttggccttgtccttaaaggcgctctctccgtccaaagcgacccgcagcgttcccctggggtcgccgggcagctcgcggcgcgatacgcacatatccgccacatgtttccaataaaagcggcggatatcgatcaactcaatcggatgatccgggctttggtagcgcgcaatgcggcccggtagatccattttttccaatatggtatcgatcttcgtcctggccatcggcgcatcgcccaccataatggtacagcgtttgaccttttgcgtgatgcaccggatcgtcgcctcgatcagattgggatctgtcaccgcggcgggccaggcctcttcctcccctttccagggatctataaccaaattgggcttaataaagatacagtccccttcttgtacctggatataggggtcgatcatccggctcagctcgtccacagcgccatcccggcaatctaaaacggtaacgttcatgcggtcggctccttcacatagttttgcagcaaatatttatattttcctgaagcgatcaccggaatttcgtccacatacgtcagattaatttcagcatcctggccgaataattggtgcagcagttctatatactcgctatcggcatagtgcctgtccggatcgttgacctttaaatcgtaaaccgccctgccttgctgaacgatttgaaactgcttgattttattgaaattccacatatgattggtgatcacatgcggcgagagtttcacaccctgcgtagtatacaatacgtctactgcccgtccctcaatactggtcaatacctggccctgccaagcgcagtccgccttgttcttgaggatcgccaaatcccctgtatcgtaccggatcagcggcatcgcacggttaaatagatccgtgatcaccacccgtcccatttctcccggcataacgggctcattccggtcctccttgagcagttcaacgatataagaggccgtgttcacgtggaactccgtgtgcgccggacactctatcgccagcatcccattttcctggttggagtatagcgagaccaccgtacagccaaatacccgtttaagcagctctcgcgtatgctcggtcagtacttcagagccggataggatcgtacgcacgccaaacatctccggtgtatccccacagcgggccagatactccgccaggttattaaaagtgctggcatagcccagcaacatcttgatccgcttatcccgctttagcctgctgcgcacctgttccaggcgcgcctcatccatcgtgacgatgtcctccatcaccaggttgcgcataaaagcgtccagcttgctttttttaaccgtatccgtccaacttctaaaaaacacgtatcgcatgccgatcctgtaaccagccctgccccataaagtcatcatttcggccaatacccggttgcgcttatcagggtcctgctctacgataaaaggcgtacccgtagaaccgctggtatgcatatggatcgttttccccgcgcatagcgggcttttaaaactctcgatattagctttgatccggttcttatcgatcacgggaaagtcctcaagtgttttaaaaccggcaaacgttcgataaaactccgtattttccacggcaaaacgcagtatctcttccagcttacgcgcttggaaggctggaacctctgcttcatggttcagcaggtattcaatttgtttatagtgcttgcgtaccggcgaacctttcataaaatctaatgtccaatagcccgcacgccgtatccattctagtatcatttatttgccctcagtttcagtttttctggctctccggtccgttggtataaagattttcccttcggagcaccgtggctaccgtgcgcaatagaatccgcatatccagtaaaaatcccacatggttggcgtaccatgcgtccttgatgcgtttttcacgcacactcagtccattgcggaagtatgcctgcgtgtaaccggtaatgcccgggcgtaccttcatcttgtccatctcatcgtcttgatagctttccagcgcctcccagccgctggcgcgcgggccgatcaggctcatatctccagccagtacatttaaaatctgcggcacttcatctaggctagtttccctgagaaaacgtcctgttcgggtcacccgtgggtcatttttcgcattataagtgctgccatcctcgtttagaatattttcggaattgaccttcatcgagcggaatttcagcatatcaaatcgtttgccgccccgcccgatccgggccgcatgaaagaaaaccgggccgccgtcgtccagcttaatggcggtcgccacgcctgcccaaagcaacagaaaaagaggcagcagcagcacgcttacgccaatatccatcgcgcgttttaccaaacgatacatcccctcatcctctcatgtttcccgaatgatactctggtcgattctctgtaaagccgcatccgccttgcgtaccgcctcatgcatcgtatctccccgtgccagcacatatccacagccatccaagttggtacgatagggggtgatccttcctcccgtcgtcaggtggtgcagcatctgtatgtcgagttcccgctcaagggcttcaaagtcgggcaaccgctccacaacgcctgggctaagcgccaagatccgtgtggctacagcctgtttcgcggcgccgccgggcagttctgccgcgtcgcctaccgccatgcggatcagattgcccacctcgtcataaccggtgcccaatggtaccaggtgagaaccgatcaggttcccgcccatccgcgcgccgatatctacgatatgcaccctgccctcgtcggttaacaacacatccatattgacggcgccagtgatgatccccagggccttaaccgcgcgtatagctgtacgcgcaatggccgcttcccgctctgtagtcaacccgcttggcagcgcatggcccagctccgcataatgcggcggcggcgtcatccatttgcgcatgatcgccagtacacgtggttccccctgcacaacgatcaattctacgccgtactcctgtcctacgatatacggctcaatcaaggcacgtccgctccgggaagcacgccaggcggccagtagcgcctgttccagcccagcaagagcttctactttaacagcgccccggctgcccgaaccatcgcagggcttgaccatgacgggaaacgcgatcttgtccggcaaatgggtacgttgacttatatcggctaaaaacgcgcccggtaaacctacgccggctttttccatcgccactcgagttcggtacttgtctttgaccagacgagccacttccagtttgtttcccggtaaattcaatgcttctgcaataccggcggcggcttccaccgcataatcggtcgccgcgcacagaacgccgtctatccctttgtgctctgcatagcgcaggcaggcttgcgggtcggctatgtcaaccactgcatgctcatccgcctcagccagtcccggagcgtcagcagccccgtcgaccgctaccacaaagtagcccatttctttcgcccggcgaattacaaaccgctgtaaaaaccccgcgcccagcaccagaagttttttattcatctctcgcttccatcctccgcatccggtagacgcggaaccggcgggtgggcttctcccctacgatctggaacccatttttttcataaaaccggatcgcatccaggctttcatcatatacgtcgcactctatacaacgcttatccccataaagcttgacgatctcgcgtatcatctgccggccgatcccctgccccgcgcgctcagggtgtaccgcaaacttatgcagcatcacaccttcttggaatatttccacttggaacgtgcccaccgccgcttttccatccaataccaggtaaacgtcgcgctcggcgcaatcccgcacaatagcctctcgcgggtatggttctttccaatggatcaagcccttgcggcaatacatatcttcgccgcaccgcttcaggattttatatacttcgcctatatcgctttgatcctgtgcagtcaagcgcctgtaattcagctccacgttgttccccctaacgctaacccctgatgaggcttgcaaacgtctgcgccacatacgccgcctcatcgtcgctaagcaacgtgtgcagcggtaaggtgatctcgttttgatactgcgcataggccatgggataatccgcaatatcaaagcccatgtttttataggccgtcagcagcggcagcggcttgtagtgcacattggtagcaatgcccgcatccgccatcgcctggatcaattcattgcgcaccgtctccccgatcccagggattcgggtcaaatacaaatgtccgtttccccgtccgcaggttgtatcctgcgccagggtttccacccctaaggggtgtaatgccgcatcgtagaccgccataatctccctgcgccgtgtcagcaagctttcatagcgcttcagctgcgccagccctatcgcagcggaaatatcggtcatattacatttatagcccgggaacaaaatatcatattcccaggcgccgggcttcagctttgccaaagcgtctttggactgcccatgcagcgcatacagcatcagttcccggtaaatctcatcatcatccataccctgacgttttttccaggtgatagcgccgccctccgctgtagtcaggtttttaacagcgtggaatgaaaagcagctaaagtccgctacggcgccgctgcgctctccattgtaggtggcccccagcgagtgagccgcgtccgctatcacgattactctgtcaaaagccgcttgccggtggttgttcgcgcaaaacaggccctttttctcctccagcacggcaaagatccggtcgtaatcgcacatggccccgcccacgtccaccggaatcaccgctttcgtgcggggcgtgatcgcctctgccaaccggtcatagtccatctgataactgcctttggccgtatcgaccagcacgagctttgccccgacatgggcgatcaccgcggcggaggcggtataggtataggcgctggtaatcacctcatcccccggtccaatgcccagcagccttaacgtcagctccatcgcagccgtggcagaactcaagcaaaccgccctggccgtgtggcaatagcgggcaagctcggcctcaaatgctttggtcttaggtcccgtggtgatccagcccgagcgcagtgcatccaccaccccggcgatctcttcttcgccgatatccggcggcgaaaaggcgattttcatacttcgttcctccaaatatcttaagccaatctagttcgccgcaacaatgccagagccatgttcgccgccgatgtattggcgttccttgaccgttccggtcaggtcaaagatcagcggttctacctcgtcgggctcctgcaccgcaatttggatcaacctgtccaatctggtcttaaagacgatggtattgatctcatacggcggcgccaccatgatggtctccttttccgtgcggtgcatctgcgccttttcaaagggattcatcaattcctcgtgcatcttttcccccggccgcaggccgatgatcttaatggggatatccttttccggctccagcccatggtagcggatcagcatgtgcgccaggtccagaatctttaccggctctcccatatccagcacgaagatcgccccgttctcggcaatgccgcccgcctgcagcaccagctgggccgcctcggggatggtcataaaataccgggtgatctcagggtcggtaatggtcaccggcccgccggcggcgatctgctcttcaaacagcgggatcacgctgcctcgggagcccaatacgttgccaaagcgcaccaccatgcacttcatttgcgtccttagcgcataggtctgcacgatcatctcgcagatccgcttggtagcgcccattacgttggccggctttaccgccttgtcgctagagagcagcacaaagcgcttgaccccgtgggcgtccgccgattcgatcaggttttgggtgcccgcaacgttgttcttcaccgcctccgcggggctgatctccatcagcggcacgtgtttgtgggccgccgcgtggaacaccacctgcggacggtaccgggtcatcacctcgtccagccgctttcggtcccgcaccgagcccaccagcacgatggtacggcagtcctccccatatttctggcgcagctcgcattccagttcataggcatggttctcataaatatcgaagatcagcagcagcttgggcgcaaagcgcatgatctgccggcacagctccgagccgatggagccgcccccgcccgtgaccaggatggtttgatccctcaggtaatcgctgatgggttcaacgtcgatatccacctctttgcgggccaaaaagtccgcaatatcgatgttgcgcagccgcggcgtcgcccgctggctgcgggcgtccaaatcctgcgccagatacaggatgcgcacccggcaccgcgtatcgctgcacagggtgacgatctgctgcatccgcgttttatccaacgagggaatggcgataatgatctcccggatgtggtagcgcgctacgatctggggaatctcctccagctttcctcgcaccggcacgccctgcagacgcatcccccatttggcagggtcatcatccacacaggccaccggcatcccttttagcaggttgccctcgcggaacatgctgatgcagtaccgtcctgcctccccagcgcccacgatcagtacaggatgggcttctccgttttccctggcgctcttctctccctctccccggtcgcgcctctgccggcgcaacttgtacgtcacccgcaggatcaggcgcatgcagccgatcagcgcgatcgcgcacatacaggtgaggatcagtacagaattggaaagtcccaccgcgaagatcacgttcatcgcaagggtcaaaagcccgcctgcgcccataaagcagaccattttcagcagctcttttgagccagccagctgccacatgatgttatacatacgcatggagagcagcatcgccagataggcaaacaggttcgtcagcacatacaccggccaaagctccagctgcgctggagggacgcgcccgtcaaagtgcagcagcatggcgatccccagggcagccaataccagcagcatatcccctaacaccagcaatagcttttttgtagccgcccgcctttgtggcgccgtttttttcatatccctcacttgcaacctctccatttatcccgcatcagcaacgcttcaacgccacagtgtttcaaaccgttcccattccagaaactgcggcgtgacctttccgtccccaatatagcaatacgccttttccagcagcgcataatcctccgggctgtgggcgtccgaagcgataaagtgcagcttgtccacgccgcgcagcctgcgcaggatctcgcgcttgggcccaaatctctttttgaaggcgctggcgttgacctgaaaaaggcagttcatatcgatcaatctttgcagcatatcgccccttcgctgcagaggcaggtagcgctccggatgggcgatgaccagggtcagcccctgggcctgcagcgcatagacgatgtcctcccagttggccggccagtcgtcaaaggggaattccgtcagcaaaacctcgctcccctcaatgcagcagcgcctggccaggctgaaatccccctgttccagggcccggatgttaaactcatacccttgcaaaagggtgatgcccagctcccgcgcatagggtctgatcttttccatccccgcggccatggccccaaagtccacgtccgcccgctttacatggggcgtcgccacgatatgggtcacccccagcgcattggcgcaatccagcatggcccgcgcctcgtccaggtcccacgcgccatcgtccacgcccggaatgatatggcagtgtaaatccagcatcttctctcccgtttcaaagccgccttactgcttgcggcggatcttcttcctctttttgtcgccccgcttgtcgtagtaatagccatagtagtccgccggcttgtgcttcaggttattcaccacgcagccgatcacgtgcgcattggccttttccagctgcgccaggctttcctttacctcggcggcggtggattttccgctgctgatcaccatcagcaccccatccacctgtgtagaggcgatggccgcatcgataaacagccccagcggcggggtatcgatcaccacaaagtcaaaatcctgcttgactttagccaacagcgctttataccgtcccgaggaaagcacctcgatggggttgttcagccgccggctgcccaggtccagcataaaaaggttgtttaccttggtgggcacgcaagcctcccgcgggtctaccttgccggagaacagctccgtcagggaatatacgcccctgaccatcaatcggttggcgatctgcgggttgcgaaaatcgttgtcgataatcaacgtcgtcttcccggtctccgccatggcgatggccaaactcagcgcaatggtcgatttacctactcccgcctccacgctggtcaccgctaccgagcggacgggctcgtcgataccggcaaattcaatattgacccgcagggtcttgatcgcctcgcgcagttccgggctgttaaaatatatctgataggaattgtccatccgtttaaaaccgccccttcttatttaccgtctactctggccacctgcgccagtaccgataggccgacctgctgctccacatcggccgccgtcttaagcgtagtattgagcgcgtctttcaggatcgcgatcagcatcatcacaagcgcggtgaccatcgccgccaaaacgatcgtccgctcccgcgcggggcccgatggtttttccgctacccgcgcttcgtcgatcaccgacacgttatccacccgcatgatgtcggtaaccgattgtgagaagacctgcgccaaaccgtttgcaatgttcgccgccatttgcggctcccgtcccgtcacgctgatctgaattaaacgggtgttgctcagtgaggtcacgttgatatcatagcctttcaagctttccagccccagctgctgggcgacggcgctggtcaccttgtagctcaacaccagctcgcggtagtcgttcaccagcaaggcgctggcgcttaaatcgctgctggaaatcacattttcattttgctgggtcaatacgtacagcgtcgtgtccgacgtatactcgtccggcatcatcttaaaggtataaaacgacgtcaccacgactaccgcaaacaccactaaaacgatcaatttggcatggcccagaatggatttaaatacatccttgatactaagctccttcatcaatgccctccctctccgcgctcttagcgcactatttcatgcgcttgttgatcatattgcagatcaaaagtacaacgccccccagcacggcgctcgccacgatccagaagatccatccgtaccggtcgtacaggctttgccggtagggcgcactctcttggggcgctaagctgtccgccgtctggccgtccggatctatctgtggaggcagcggctctgtcaccgcgccatagttcagcggaatgcgcgcgatcggctcgccgctcagcgtcactgcggcatatgcgtacggcgcgttttccgcaggcgggtccacccggtccaccagcgtataggccagcgcgccgctctccggctgccagccctttgcggcgctgacgaagatattcccctcgatctgcgcggtcaattccctgtccccatcttttacgccttccaacatctgtgcaatgggctcagccaggtccacgcgctggtactgctcgcccagggcatccagcaagctgctgatggcgggataaacctgagcgccattgccgtttccacagcacacggcgatcacctgcatgccctccacctgggccaccaccacggtgttgtatccttcctgggcgctggagcccgcgccaaaggccgcctttacccgttcatcgtaagccgcgctgccgcttaccatcatctctacccggtttacagcctcgctcttcagggcggtccccgtcgccgtcagcggaatactggcctgactgaacagatcgtccgccttttcttccttatataagctatacgccaggcgaagaagatcctgcgtggcggtcttctgtgccccatcgtaaatacccgtggcgttggtatagtgggtgtggatcattcccagctcgtccgcgcgggcgttcatcttttgcacaaaggcttccgggcttcccgcagcataaaccgccagcgcctgtgcactgtcctgcgcgccggtcagggtcatcgtggcgatcaggtctttcaccgtaacgttgtccccaccctttagccccgccttcatcgcgttttccggcacggcagacagcatttcggcggtgatttctaccacttcatccagcgcgtgctcctgcaaaaccaggtccgccgtcatcatggtcaccgcgccgccggtaggggtaaattgtgcctcgtcattcaggccgccaagcagcatccccgtatccacatccagggtactggctcgggtcaacccctgctgtcccgtcaatcctgccgcatctccgtacgcccccgttagctttaccggcagttgcgccgcccgccctatcggagttgctccccacatccctgccaccagcagggccatcagcgcgcaaaaagctgttttcaagggacgtccaaatcttttctttcgttccatactacccccggcaaccacatgtatttgctactatcagttaacctgcgtttctttgtatgcctcaagcttttattcgcgggctttccactcgccctcctgtctttgcgctcgaaggtccgatccctgtagaagtgcaaaatcttaaagatgtaaaccggtcatcacactgttttacagcgctcatacggccttcgatcatttaaatcagtcacattttcggtcgtattttaatactttttgacgagtaatctacccttcacaattatacatattaattgtattctgtcaacgcgcctgcacatccatggcagtcttttacatggaaatagcagacagtacgtattaacttatcgggtcttgtccacactgattatgaggtcaatcgtcaccctttttttatgctgcaacgctgatttaccggccggcgatcccccatagtatcgtatccgccggcaattatatgaattacataggcatttttatgcctatgtacgttattaaattataaaatatacgcctttacaatttaagtataaattaattggatgggcaggtttaattggattatatacagataggccgtcggatacgcaatatacgcaaatccaaaaacatgacgcaggaaaagttggccgagatcgtggatatctcccttacgcacatgagccatatcgaaacgggctcgactaaattgagtcttcccgtattggctaaaatatcaaaggctctcaataccagcacggatgaactgctctttggcaaagcacaaccgctcagtcccgttacactgaacaggatcgccgaattgtttgagcactgttcggcgcgggatatctgcattatgacggatattcttttggcgaccaaggcaactctggataaaaacaggtgatgatgcggcatgaaatgcgggggccgccgctacggcgtgctttcgtgcgttaaagcgcagtgcctttgcgttctttaacgctgcactttaacggctggatgcaccgcctggttaaatactactaagcgtataggccctaggtcttatccgctatataaaaaaaacggcgccggtagcgccgctttttattttgatttgatctgctgttctcggatcatcggtacgatccggcagagaagttcatacgcaatcttgcactcttccggcgtcagctggccgatctgtgccatcagtacgcccttaagcccatcctcctcttgctcgcggtattccggcagcagcagcgcctcgataggcacgcacagtacctgagagagcttataaaagtaggcgatcgtcgccatctgccgtccgcgctcgatatatccataatagctgggggccattcccaccatctcggccagctgctcttgcgtatagcctcttaattctctatagtatcgcaaacaggatccggattcagggaagggaagtggggtcttgcgtttcatcatgattgctcacctctcatcctcaaagaatatcaaatagaaggatcaattgttagcatcataataagccgcaattttagacaaattaccccctaaaaatcgttttatgatactgccccatccgctcatactgtttcgtataatatccatcgggccctggggaaaataaactcgtttggcgcccatgtccttcccttatccactccctatcccgatcttaatacgatggaggaatttttatggaaacacagtggaactttgaagacgcactgcaagaactgttcgcccaagcctgtaacgaagtattgctcgccagccctccggcaaacgcctgtcaggaggacgccgcccgttttgacttcctgttcgaggatgagggcgtactgacgctaacgccagaacagcgcaaacagctgcaggattactttcatacctcctcccagcccgatctggaaccctatatctcctgctatagccgcggcctgcgcgacggtatcgccctgctgaaccagatcggcctgttttgatccatttcattttttaattatagccggtttcctctatttcgcctttagggtaaaaagaaaaagggacgggggccaatcacccccgtccctttttacagcatccctctatcggtttaaaatcagcagcatgcccgcgcccaccaaagcgcccgccacacccgacagcgcgctttttaccagcgtttgccaatgttccgccggtcgtgcctgcatggcgtccatatctcgccgcaggctgtccacatccttgcgcatcgccttgatctctcctgccatatcgcgcaggctcagcgccaggttatgtaccgtttctaccatttcgtgttgttcgtcgatgcgcttaaaggccatctttacatccgtgcgcaacatcgctaccgcctcacgcagatcgacgatctcttgcataaagcgctcgctctccgcttccatcttcgccctccttaccaccgcgcgcgatagccgcgaagatccagatgggtgaagtccgcgtacttgcccaggccctggtcagggtacatggcatccagcttggcgtacaccgtcgagggcgccacgccctgcacgttgaaatctacggcgtttgcggtcaggtgctggctggctttagccccgccgcactgctggttgtaggttttggtgcggtacccgctgttgatgacgatgggcctgccccacaccccgcggatcttctccagttccgccatcaacgcccgcacgttgccccaatactcccgcggtaccgccgatccatcccggcaggcgaactcccgcagtttaaagtgctccgtgcccggctcatcctcggcctgcagcaccgcccaggtcttggggccgcagatgccgtccaccgccaggccgtttgcctcttggaacctacgcagggcctcctcgctctccgcgccaaagctgccgtcggctccatacttgggcagaccgtatcccactgccatgagcagctgctgcatttttttgaccgtttcgcctttgctgcctcgtttgatcgtttgcatctcaacacatccctccagattcgcttattgaacgataagttaactgccgtaaaagtaagcattaatattaaccgattcacccgcagacccattatcgttaacaataaagcactcgccatttctattgataaataatagatcagtattccccacgccagtgctcgcattgcgcaccatgttgccgtaagtacgctccggtatgaatcccgatggtaacgtcaaaaagtgttgatctgttcctcgtttaatagtccccaataagtgcacataattccagggatccttccaaatcattaagctattgtccagatcatagttgctccattcattcaaaaactcgaaatccaacaacgcccggtcattagcaagtagcatcaattcttcgatataatggcgtggtataaattgcgttgcaacgctaccctgctctagctttgcacgacgcgcatatagtgtacctcctgatggtgcattaactttgatatacaccatcagatactctgcttcgtactgatccagtcccgagcttgtaatgcttaccctattccattcattaactccagcgtttgcattaatctggttctgataaatccattcaccttcaatggagtttttaagcgcaatccccatttgtacgccggtattcccactgtcccttttcaaatcggcggaaaaggtatatggcttactgcggtcaaatgatgacaaaggctcaaccacctgcactaaatacgcatatttatccgtaagggatattacgcctgcatcctgcttttctaccgttgcgttctctccattaattgcataggccgcccagcgatctgccgtatagatcgctgtcgcgccaacgctaaacggccctgcccctcgctgccacacatcaaacccgccgttgaccagcaggttggggtttgaaaagcccatctcagagagggaggctacccccgtgccgccgcgcgccaccggcaaaatcccgctggtcatatcagcggcgtcgtgtttgtgccccacgctggcaaaaccgccctgctcgatgatgtccgccacggcgtccccttgctgctgggcatagtccgcctgggtctgggcgttctgggcggcggtgttcgcagcctgcgccgccgtatccgctgcggtctttgcggcgttggccgccgcggccgcagcttgggcggcagacgcctgggtttgggccgcctgggcctgctcctgggcttgcgctgccctttgaccggccagttccgctttctcatttgccagagcggctgcgctgttggcctcctgcgtcgccgtgttggccgctgcagtagccgccaccaacgcgccgtaatcgtccgagctgatcaccccgtcctcgtcatatacgttgggggatacgtccacctcaaaggtggcgctggccagcaccgcatcatctttgtatagaatcacctcgcacaggcatacgcccggtaccgtcaagcactggtccgacaacgtcaggctgcacgcgctgcccgagagctgcgcgttttcgatcacctgcgtatcgtccggcttgcgcagcgcgtatagggccgtcacgccctcccccggcgcgtaaggcaccccgtccatcactagctcacaggtgatcttgcgcgtgcccttatcgccctgttttgcatgcagtttaggcggcgtcacccgcagccccatgtccagcgtcaatatttgtacatgttccatactgttactccctcctattccttctctgccagcacataccggttcatctccgtgctccagacccattccacgtcaacgccattgatttgatctatatccagcgcgcgtgtattgccctcttcaacgtataggcatctcgcggtctcgccgttaggaaaatataagtaaacatccgatgtgtcgactgcgttgtgcttgatgatcgtcgcttgcgtatcatcttcacctcttagctctataacaccatacggttcatccgcgttgctgtatattttgagtgtatctaaaccaccacggctcaaataaaaggccgatccgtacagcctggctttatattcgcccgttgtcatagtgatactgccatcatctaaactgatatccatcgtgccattctggctgatcagttttcctgcccgtatcaaattcgccgacatcgtccccgccgtgatgaaatccgccacgatcgccccatcgatggtcatcgccgtttcatatggcccggcaatgccgttttgagaaaagcccaatccgttcatattccagcgccacaccttgcgcgccgcgtcgatgtcttccgtatccatcaccaggatctcggtaggctttccctgggcgtccatgcgcagcaccacgttgccgcccttagccccggtgatcaatgccgtcgcattctcaatggccgcgccctgcccggctaccccctcgcgcacatcctccagctgattcttgatctgtttgatgctcccttcgatcttgggcaccgcggtcgatagggtcaccacattgttttccgggctaaggggatattccttgtattccactacctggtgctgctggcgggtgccccggcgcttgtccatcagcgtgaccacctgatacatccagttgcctaaaaatgcatagtccgggttcaccgccgccagatccaccacgtcgcactcatagctgcgcaccggataagcaaggcttttcagttgcttttccgcgtcggccttgagctgcgccgcatcggtgtaatcgttggccttccacaccgccgagattaccttgtcgcaataactcagatcttccacatattccttgccgccgttgatgtccgcaaacgtcaatccatccttgccatatgcgtacagccgggtgaccagatccgtgcttatccctttgtagctcatctttttcaggttcagctcttctaccagatatgcgccgcccggctctatcccctccgggtcgatcaccgttacccgccgcgcgggcacgtcgtagttgaataccaccccaaatgcctccgctgtcttgcccagcaggtcgtaatccgtggcgtattccgcctctactgtccccgtgcgcaggatgcccaccgcgccggtcaccgtccagcctggcggcgcaatggcagccagcacctccgccagagaacattgcgtcatcgcaaagtttttgtagaatcggttcttccattcgtcaaggtccagctggcagtccaccgtgcagccgtccgcgtactcatccagcgccttgatcacaaaccggttgtccccagtttccacccgtatctcttccatcagggcgccataggcttcgtgactggcagggagatcaaattcaagcgtgtcctcgccgtcaaacgcatgggtcacggaataatccaccccggccagggcatattgctgcaccccgtccctgtcgcaaatcttcagcaatctcatccctccttacaggtaagcggggtaaaaggcgatcgtcaccttgaccccgtccggtatttcgatatagttttcgcccggcagcatctgggggaaagccgtgatgtccgtatccgcaaagcggttgaccccctcctctgtcacccggtattcgatcccgtccaccgtaaaatccttgcccgcatgcaggtttttaagcgtcatccccgctaccgtcacgctttccatatcctgtttggggtgcaccgttagccggtatccggaggctaggttgccctcgttgtacaccgtgccgctccccgtcagctcgcagtctaccaaaggcttgcgcagccgggcggtaaagttcatcgtcaccagcaggtaatgctccaccccggtgtgttccatctcgtaccccgtcaggatggccggatattcaaagtccgacccctccttgcgcagcacgcagtgcttgctggcctccaccagccgcgagaggttgatctgcgcctcgtcgtcgctggcgccgcccacgtaaaattcggtctccagcggtttggcggacatctgggtgtagtagtacgccggctcctccggcggcacctccccgtagtgggcgtccacactgcgcgccagaatgcggaaatcgatcaggtccgcgtcaaacgccgcataggtctcgaccccgtccaccaagcaccgctcgcccactcttggcgggcgtctgtaatgcttttgcttcaatcctcgtccctccttattgtttttttattatccttatcaccgttaccgggcctggcgaaaaattggcgtcaaaaaagcggccgccttcgcgccgctcctcccggtaccgtttctaaagattcctcattttgccaactggctctttttctgcatcagccgcgagatcgccggctccgtcttgcgcgccagcacgtccccatccagctccaaagtcgtatagttgtcgatgcggttctccaccaccacggggttctccctcatcgcccgggataccgcctccatgatcgcctccgggtcaaagaacttatcgctttgtactttaatggagccctgccagtccggcgccgcaaagtccgaaaagtcaaagtcgctggaaaagcccatctcgtcgctcacgctttgcgatagcctgcgcgccgcctgcatcacccggtagcggttttcgtccatcccctccgccagcccctgcacaaagtgcggcatccaggtttcatagtcccgcagcggcccctcgtccgggcgtgaaaagtgcataatgcgtcggatggcactggcaatgccattggcttccataatgatcaattctctcgtgtcgtgcaaacccgaatagaacccaaagccaaaatcatggccccatatataaccggggaagctacccaggggattcatagctctgtttacgctatctgtttgcgcgttaatagcgtacatttggctatacataccgcccgccatcatcgagatggggttcgcgccatatccgctccacctcgggtcatatgcgttggagctggcggtcgcgttcatctgatccatcatggcctgcatctggccgttggcaaaccagctttggcttcccagcccgccgcccagctgcgcgcccatgttgccgcccagcatataggccagcatcggcaggttggatagcatcagcattccgcccagccccatcaaaaaggcctgcatctgcgcgttgggcccctcgccgttttctatcaagctgttcaaataggccatcatcgcgtttgcgcccgagccgtacatggcctcggtcacctgctggtcgttgtttactgtctctgccgcgccggcttgttggtcggtcagcgtctggtttagcacctcttggtttcccgccatgccgttagcctgcgcctgtgtcgcctcgctgcccttattttgcatggcctcaggcaactgctggtcttcctgcgccgcttgcgccccgctggcatttacttcttgtactgcgcctacgacctctccttccccgctgcggatgccttccgcctgcgcgtgggtgaccagttgcccttcgtactggttaacggcagaggcgtcctcgcttccttcacccgccgcttcgctgaccttcacccactgtcctaaagcggtattgtacaccagcccatattttgaagccagcccgtcggcgatctcttcccctggcttcctcccctgctggtttaaatcatccgcaatcatttccgaggcatctttactcgcctttcccaattctctccactgcttttcttcttcatcataaaacagattggaatttgcctcgatgccttcgatgatcgccgggttaatcttctctccattattctgtgcttcctgcaacgccgcaaggtactctggagaatttgcgatctgttgtcccagcaaaaaataggccgcgtccgcgctgccggtcatggcttccagttccttatagtcgtttaagcccttgctgatgctctcgggtatggccaacccctgctgctgatattcctgcgccaactgttcccacttagccgcctctggccgcatggattccaggtattcctccgtcgctactcgcgcgcttcccgtcaggatattgccgccctgcgtcgcggcggttttaaaggcgttcgccatggcgccaaagtctccggaaaaatccgttcccagccgtcccagtccttctttaacggtttttctcatatcagtcgtggattgaccgaattcctgttcaaagttattcttgagaatatccgtggtaaaatcaaaagcccccagcgaaacttcggccttttgctgggataggttcagtcccatctcgtcctgcgcctgttttttgatcctttccgctgcctcttgcgatacgccatctttaatcatcgcgtcatattcatccaggatcatgcgcatcgagattacgttggcctggttggcctcttcctcaaccttctgcgtctcggttttgatgcgttccaataccttatcatagctctctttatccggcttcaggttgtcgctggccagcaccacgcgtagattggccaggttagcctcgtagctgcggtcggccaaatccttcatcagctcgcctatccggccttgcagcttctcaatatccggctgatacttctcaaagtcgttttcagccatcgccaaactgatcacgtcggccagctccttgcccagcgcgcttaattccgcctgggacgccaggtaataggaattgacaaattcggtcaaccggctgccggtggccgaccccgcctgaaagctcacgcccagcgccagcgtcgtggcgtagtgctgctgttccgcatagctttgcaccccggcaacataggcgtcgagtgccgccttatagtcttcctgctcctccggggacagcttcattccaacgttgatcttccaattatattggtttaactgtgctaccgtctgctggagctcattctcagtctggtccagtttcccttttgcgtccatatacgccgatagcttgatcgtccaatccgtcgtggtaatccgctgggcggtcttctccacatcctccatggaaagctttacattgccaaaatggctggccacatccgcatcaaccgccgcctttgctgcctttgtaaacatatccaccagtgctatccctccgcttaacgcggcggttgcaatgcccgataccaagccgccaagtgggctgatcgtgccgatcacatcggtcgccaccccgccgatgttcgcaatacttgagctggcggttttaaagctctcttctccatctgcaaatatcttgcccaggtcggccgccgcattgccgatgtcgcccagcttgtccttcaccttgccgccgctcttttcggcctcgcttcccatgccctttaatgcggtactgatctcacctgcactaatggtcaccttttccagtgccaaccgcgtctcgcttgactttgtcgtgatcttatccagcccttccgtcattttgagggcttcactcatccaggatgaggactcgatcaccatcttgatggtctctgccattttttgcacctcctacttaggtctaaaaaagccgctggcatttcgcctgcggctttccctgtacatttttcttattcttgatcggacaaacgccagctatacttcctcgctgaattaagtattttcataaactcttcaccatccacttcatatcggctttctggagtcttaaataagcaaaggtaacctactccgcttccacactcaaacaaataaccatcacggtatctatacttataatcgtcctccattgttattaatacatgcgtggcagttacatattctgtttctacctcttccagaacctctacgcgtttatgttggcctggaagtacatcgctgccctgaaaatcgtttagccatccttgcacatagatgttttgatcgtcaaatgaaacaaatagttgggtatcgtcatcgatttgatatgttattgcagtcttactttcactattttccactatttcccattgtccaggtatattttcaaccacaaggtcgcctaaatagcgggactgcggctctggctccttgcaccccgccatccccaggcatcccagcgccaacaaaaacgccagcaataagcatacggctctcttatttcctctcattctgatccccctctcttttaccatattataccgtatgccaccgcctggttacaatagcagcctgcccttgcctccccctccttttcgcctataaatttccagcccctccgtcatcttgagggcttcactcatccaggatgaggactcgatcaccatcttgatggtctctgccattttttgcacctcctacttgggtctaaaaaagccgctggctttcgcctgcggctttttacttttatattattaaatttaattgagatttaaagtaacagattctctcgctgaatccaatatttttacaaactcttcctctttgacatcatacttactttccgttgttctaaataaacttataaaaccaattccatatccacacgcgaatacatagccatcgcgaaatctatacttataatcgtcctccatcgtcaataatacatgtacagcggcgatattttcagtatttcttttttctagaatttctatcgtcttcaactgtccgtcaatagtcctttcagggtctttccattcatctatccatccccctatagtagcatgtcggtcattaaatgaagcaacaaattgagtgtcgctatcaatctgtagtgttacaggattcccatttttaccctgttcgaccaatttccactgtccgggaatatcttcaataacatattcacctataaaaaacctttgcggctctggctccttacaccccgccatccccaagcatcccagcgccagcaaaaccgccagcacgaagcatacggctcttttatttcctctcattttttatccccctttctcttttcatattataccgtatgccaccgcctggttacaatagcagcctgcccttgcctccccctccttttcgcctataaatttccagcccctccgtcatcttgagggcttcactcatccaggatgaagtctcgatcaccatctttatagtctctgctattattttcatctcctactcagggtatgaaaaagccgctggcatttcgcctgcggcaattattgtaataagcctatttaaaatgcaatgcgcgcagtatctagcaatttttcaaattcatctcccggcacatactgactatctgctgtcctttcaatgcaaattgctgtaactccaaatcggcgcgaaaaaccagttctacccgtaagagcatatgtctcccgagagaaaacctttgaatttttataataaacgatataatgtatagcctctcttcccgctatcgtccgaggctccaacatctctctacttttataggtgggatctgttgattccttttcgaattcataatactgatccaccagaatatcctttttaaaaacgaaaaaaacattggtttcatcgtcaattttgaacgcataatcataatatacaccgcctacagaattcgattcggtatactcccagaaatcgggcaaatcttcaaaatgaacatcgcctacaacgatgcgctccggattcactgccttacaccccgccatccccaagcatcccagcgccaacaaaaccgccagcacaaagcatacggctcttttatttcctctcatttttatccccctctcttttatcctattataccgtatgctgctgtcctggaacaacgaatgtgcatatgccatagttacccgtattcaggtaatcgatcgtttctcatggagtcgcatcggggtaacagaaaagcacgcatcttcatgcgtgcttttctccactcccatattcgcagcctatcccgcgccggacatcccgaagtgcgtccgtgtgccgcgggaccgttaggtctgcatcagttctccgtaaaacttgcggaggctttggacccgctgctcaaacaccggggtaaatccctcttcgatctgccgctggatataatagcaggcctcgtccaggcaataggctgtatagctgtcctcatcaatgcccattagttcgcttggccttcttcggtacgctcgcgccatcccgatgatcggcatcaccttccggctctttacgaaaggatttcagggcgtccacccccgtctggcaaaagttgtagatatacagcagctgggtatccgtcagccctacgccggcttcttccagctccgcataagtaggttccaccaggctctcccgggcgatcaccgtcatcgtctcggcgatttgcttaaaatcctccccgtcctgagccttttccaggttgatgccgtttttgaacaactccgcggcggcggtcagcagagcgttggggatccgccccgcctgtgccattgccagcatggagacccgtttgagtttcacgcagatgggctcgtccgccacaaagcccgggagggtgacctcgcacccgtcctgataacttttgaacttttgcatcgacgttacagccatattgcctttcctccttagtttttatttattgggattacgcgccgggcgtgaccaccgggtcgctcaccgtgggcagcgcgtccacgtaggcgatggtataaggggcctcgccgttgccgggcgccgaattgatggaatactccgttacgcggaacacgtcgtcctcgctgcccagtcccacgggggaaccagtgcagccggggtagctcaccttttcatagcccaccacttcagagccggacatctgcgcggaatacgcatccaggctgaagaccacgggttcaaacgtggagccggatacctccggggtatagccggtgatcttgccgtcctcgtcacgggtcaccgtgccgccctgtaggatctccagcagctccaaaatggtcatgttgtccgtcagagtcagaatatgaccggtgatggtcttgctctccttcttctgggctttcagcgcccctttgatgatgagcttaaccgcctccttggtctcgatctggggttccacgcccagcttggtgccggaggtgatagcgatgcagcgcggcgtctcctccttggtggttactacgatcatgctgcaatcgatcattgcgcgttcagtgccttttaccggcgtagtcgctgccataatataatcttcctttcatcttttgttttggttcgatcgctcacttgttctcatttccatggcctaaaaggagggcgcggcgcggtgctgcctgctcttctctcttaggttatgtaaccccatcagggtcacgcgccggccagcctttgccatggattatcgcggcccgggctcgtcgcccgcggtttttaggggccgcccctgcggttcgggtacgaaataggcgccatacttcctccgcgccgcccgggtaaacgcctccgggtcgtccagcagccaatcctcggatggctgtgcctcgcccatcgccagcaggatgtaatcggcgtctatacatcccgccatcatcaggttgcgcgccaggatgcggcgcctttgctccaatttgcgcagcgcccgttcccgcatcagctcctgttgcagcccgccaagatccatagcctcgtaaccggccagccgtgcgtttgccgcatccagcccagcctgcagggcccggttccgttcgctgagcttcgtcagctgcttttttaatgcgttgatctgcgcgccgcaagcgtccagtatctggtcgatcgcatccttgttcagaccaaacgcctgcaaaaaactacgggtcatcccactctcccccttccgttacgcgttttttacgaggtttcgcgcctccaatagttcattttgtggactatccggtgagcaaccgctctatttcctgcccgcttcccgatgataccattatacgtcttgttttcgcgtctctgttcgcctttagatcaatctcagtttttttgccacgatccagataaaccgcctccgccgctcatagaaattggttttgcccagcggcagcgcgctgtactcaaaggtaaagtttctccccagcacacagctgtccaacacggcctggcgcaccctgcgccgctcctcttccgagggaatatccgcgccggcgtcctcctgggcctcctcgatagcgcgcataatgcacacgttcgggtgctgttccagctggataagccggttcgcgcggctggccgtgttatcgcccgtactgccactgcgcggaaaatatacccggccgccgcgtccgtccgccattacgtattcctcaaaccgcttgctaccctggtgtagaatctcctcgcgttgctgctggtaccacatcttgcgccgcggatatccttgaatatagcccatcaccgttctgcgcacatcttctggcatcttatatttcgtctggctcatctgctcccccctcaacacatttatacaacctattcttgtcgtgcggtttatcaacaacatatagttgtgtttgtaattatagtacgccattatgttgtagtcaaggtggtttttaactatttttctatgattttacaacttattgtggtatattaaatgcaggagggattgtttaaatgttttcagatcgtctgcgggcagcgcgcggccagctgggatactcccagcgcgcggtggccgaaaagttatccatttcccagcaggcctatgcccggtatgaggccggcacatcctcgcccaatccggagatgctgggacgcatcgcgcatctgctgggcgtcagtgccgattttttgctgggaaggcccatggcctccccctcaaaaggggctgttcagatccccgtattgggccgcgtagtcgccggcatccctatggaagccatcgaaacggtgatcgattacgaggagatccccgaggaaatggccgccgcgcaccagtatttcgccctaaagatcaccggggacagcatggagcccaagttcagcgcgggcgatgtagtcatcgtccgccagcaggatacggcgcagaccggggatatcgcaatcgtactggtcaatggcgacgacgcgaccatcaagcgcgtcaagctcagccccgagggaatcatgctgatccccaccaacgcggcttatgagccaatgttttacaccaacgcccagatcgagtccctgccggtccgcatcctgggcaaggtggtggagctgcgcgccaagttttgaaacgcgcctcccccgcgcttgtatgaatgttcattaacaggttcgcgttttgaatattggcccaacattctgtacaaccataagccccgcatcgcacctcggcattgcggctgcgcagcgctttttgatgatcctgccaaacaaaaaaattcgcaaaccatatcatcggtttgcgaacttgggtgcgagattttgccgccgtttaggcgctataaaatcttattacagaatgttggtgctgaattttcgcaataagttagcggcatgccgtcactttgtccacactctgcgctatgatgctgtgcaacataaaaaaacgccgtaagcaatgcagcttacggcgatgtggtggagatgagcggattcgaaccgctggcctgttacatgcgaagcaaccgctctagccaactgagctacacccccacggcgatattcaattaccacaaccacttcatatccgtggtgcaagcaatattatagcatccacaatgccgattggcaagccctattttagatatttctcacccctattcgccatacctgaaccgcgtattggtctaaataaaaaaacagaagccagcctttgccaggctggcttcttccatcatagttcagtatttccctatgccgcaggctgctccgtcgtcgtagacggggtaggcgtgggcgttagggtcggcgtgggggtaggcgtcggcgtcggagtaggagtgggcgtgggggtaggcgtcggggggggcgtctgcgtcacaacaggcgtaggctcctccgaaggctctggagtaggggttggtttcggcgtaggcgtctccaccgggatggtctcgtccctgttggggtttttcgggtccggatccgtgggatcccacttagttcccgcggcgaccttacccgtgctcaaacgggaaggcacgcccggccaagacccgctggccacgatctccaccgtcgtcccggagcggcagttgtcatagatccacttggcgtcgatagtccgcaggcggatacatccggcggatacagcgctgcccagctgattgtacatattccacttgagcgtatcgttgcgcggcgccgcaaacggaaccgaatggaacaggatatgtcccgtgatccgcgtacagtactgcccgtatacgccgccgttaagcagatgccagcggtacttatcggatgtcttaaaggtgcccttaggcgtctttccacccgcgcccgaggagcagatcatgctgcggacagggatggtaaagttgcccgaatcgtccttggcaaaggcggtgaccacctggccttttaggttaacccggatcaggtacccgccgttataccccgcaggcaggtttgcactgggcgtagcctgtggcgcagagggcgtagctgttgcagaagctgacgcgcccgcctttactttatagagaagctctccgttctcacctaccatgtttgggctgagtgaatccgccggcaccatggcgcccgagatgtattgcagcgcgggatccatcacatacccctccggcacatcgatcttaggtacggatacctgacgctgttcagcactctgctgcgcggcatcagaatccatcggcaccagcgcgtcctgcacggcaggctggcacccgcctgcaagcaatgctaggcacaaaatcacactaattaccattagtagcgatacttttttcatacccttactccattcccctattttctcatctgtcgcgtaaaattttacaataacaaagtcattataacataattgcgcctcaaccttaatatctattgtgtaaaatattgccggagattgattgcctgtacgcaataaatatgttaaaataacttaaaattcaatcggacagttcgtaaccatcctgtcctaaaacaaaactacgggcaaacctgccgctttacgggcggacgggataaaaggcctggcaacatggcccttttattttgcatgcccgcgggaggtcttttttatgcagaaaaaatccgtacgctatctcgtccaggcagcgctgatcgccgcgctgtacgccgcgcttacccttgcgctgcaacccatcagcttctcggccaccggccaggtgcgcgtctccgaggcgctaaccgtgctgccctttttcaccccagccgccgtgcccgggttgtttgtgggctgcctgctggccaacctgatcggcggctacggcatcctggatatcgtctttggctcgttagccacgctgctggccgcactggcggcgcgcaagttgcgccgctggccttatctcgtgccattgccctcggtgctgtttaatgcggccatcgtcgggcccatgctcagctatgttacgggtttccccatgctgcccaccgtgggctatgtagtgttggggcagctggcagcctgctatgtgctgggcctgccgctgctatacctgctgcgccggtatgacaaaatccttttccgcatggatccataagcttggttgatccctttatttctatgtagcctgtccgcccaatatgaaacgtaaaaaggtgatggcctaagccatcaccttttctgattaccggtataaaaactccgcctcgccgatactgtaaatatccgccggtctatcaggagaggggacccctttgatctgcccggcttgcgccctgcgcgccccctccagcagccggggcaacaattctttttccaccgttgcaggcccgtgggaggggtagatgatgtcaaaccggccttgcagtccgatcaacttctccaggctggcctgataagcgtccatatcccgccagcgtccaaacagatggatcgagccggcctgtacgctgtcgccggaaagcaaaattcggttttcggtatccaaaagcgcaatgctgcccggcgtatggccagggatcaagatcacctcaaagcagcggccgccaatatcgatatgatctccttcccatagcgcaagagcaacccttccttttcctgcatcggattggtgatagtgctcaaaatccgatgggtgcatgtacgcgcaggcaaaggccgcattgcccccgcagtggtcccaatccgcatgggtattgaccaccatgaccggccggtctgtcaacccctctaccagggcgtgaagatcgcccttgccaaagccggtatccaccagcaatgcctttttctccccttccaagagaaaaaaccgcgtccagtcctcgtcgatacgccaacatctctggccgatttcatgaatctgataatactccgcgcacatcttcatcccccctaattttatttattcgtagcgcatgacctgatagggcatttccttgtcatagcccctggcaaggtcaaattcctctgtatagggctgcgggcacaggtgcatccgcgtgcccatgccttcctttctatagggcggccagtccggaaggcccggcgcactcggttcgcccctttgtacaaagcccgtccaaatgtcgttcatcagcttggccagcttgtgattttcctccgtatccgggtaccccttgtcgggctgctccacaccgccgccaaaaatataagccatctcggtggcgtgcgcggccgccggcactctgtttcggtcgtgatcccagcggtacagccacactgggccgccggctttggccgccaatgcagccagcgccagggcctggttgccataaacgtattgggtcagggtattggccatcgccagggggccgccctgggtttccttcagtttttggtactgcgcttccacatgtgggcggttagccccaaagctattcagctttagcgccacataggccggtgtaaacgcctcctcgcttggcggcgggcacatctcatcccggttgctgccgaccagcagcggcatattgcctagcgcgccgcctgcaatagcatcctccgggcgctgggtaatcgtgatcccatcgatgaccgggccaaaataatgcaccagaatacgtccgtcgtccagcttgttctgccgggcgatcagcgcctcggcgggcatttccaatagctgtgccgcgtccccttcttgcagcccaaatgcctccaaaatctgccgcgtcagcgctctggccgttttctcatcgtggacggactggatcgccccgctttgcaaaatcgctttatggaacaaccctttggcttgcggggttaccagcagcccgcctaccgaccggccgccggccgattggcccataatggttacattttccggatcgccgccaaagcgctcgatattctcccgtacccaccttagcgccgccacctgatccagcaggccgcagttgccgctttgggcatattcctctcccaaaagatgccttaaatgcagataccccagcacccctaaccggtactggatcgacaccaccacaatctctcgatcttgcgcaaagcgctgcccttccgagcccgcatcgctgtttgcgccccagcataatcccccgccgtggatatgcaccaataccggacgcttttgttggtccacgccaggcgtccaaacgtttaagttcaagcagtccgcctcgctcatccaagcgccggcattctccggcttactgcggtcctgtaccgcccgggggccataggctgtacagtcccgcacaccgtcccacttttgcggcagttggggcggcttaaagcgcagcggccctatcggtggtgcggcaaagggtatgtttttaaagacctcaaagcgtccttccctgacgccctcaatccatccacaagtggtttcaaccttcatcttgatctctccctcatcttgagcctaatcgttttagctaattaaattataccccgctgcgcaagcggctgtaaaggcagagatgcaaagtctatatgcttagggatggtcttatttcagccgcaaataaacccaaaacagctgaatcaacaagaatgatatttcatctctttccgcggcgccagcttttgcaaataactggtacagcttgtgcttttcacccagaaaatggttgcggatatacattcctaacccaaaatgatattgatatagatctgcaaatgaactttgtttgaactccttacatccttgcgcacccaaatagccttctaaccgaacaaaggttttttctatttccgggaataaagacatacccatcacctcagaataatttataacctgtttcaggttaaattgcaataacctgaaacagattatcttaacctaacgctgaggtgagaacgttgtatagacgtatccgagagctgcgggaagatcgggatctgacccagaagcaggtcgcacaaatgctgggcatgtcccaaacgggctattccaaatatgaaaccggcgaaaatgacgtacccacgcaggtactgctcaagctggcagatttttataatacgacggtcgattatcttttggggcggagccaaaagcccaggccatagtcaaaggtccggcatgttgccgggcctgtttattcaaccttctccatcccggccagcaggtcgtcctgacgttcctgcataaactggcgggtataaagctcgtaataatgccccctttgcgccatcagctctcgatggctgccctgctcgatgatcttccccccgccgatcaccaaaattcgatccgccgagcggatggtggaaagccggtgcgctacgataaagctggtacggttctccagcacgttatagatggcctgctggatcagcgcctcggtctcggtatcgatggaggaggtggcctcgtccagcacgaacagctgcggatcgggcagaatggctcgggcaaaggagatcagctgtttttgtccggtggaaagcagattaccgccctcgcccacctgggtatcgtagcccttctccagcgcctcgataaaaccgtccgcatgcaccagccgcgcggcgcgtctgacctgttctaacgaagccgagcggttgccatagcggatgttgtccgcgatggtcccactaaacagatggggcgattgcagcacgtatcctaagttggattgcagccaaagctgcgagcgggccctgtaatccttcccgtcgatcaggatctgcccttccgttggctggtagaaccggcacagcaggttgacgatggtggacttgcccgcccccgtctcccccaccagggcgatgcgctcgcccggacgtacatctaggttaaaatcctccagcacccgctcgccgctttgataggcaaagccggtatgctggaaggtcacgcgtcccttgatgggctcccagttctcccgcttgggggcaaacacatccccatagatggcctccacgccctggctgtcggtgatctccggctgggtttccaccaggatcatcacccgctcggccgcggcctgcgcgctttgcagctcggcgaaaatccgggccaactgctgcactgggtcaaaaaactgggtagtatagctcaaaaaagcggccagtgtgccaaatccggtcagcagcgcgatgttgccgccctgccatagggccagcgccgtgccgatggagcccagcaccatgacaatgggcatatagatggccgaaaacgtggcgcttttcaccgaggaacgatacatctcttttgttaacacctggaattcctccaggttggcctgctcccgcaccagggtcttggaggtcttagccccggttatcccctcgttaaacgccccggtgatccggctgttggtgcggcggatgatgcggtgatagtgcaggatctttttctggaaatatagactgaccaccgccagcggcggcagcactaccaataccagcagcgccaagcgccagttcatagccagcatggcccccgctacgcccagcacaaagcagatggaccaggccacgtccgttaagctccagccgatggtctcgctcaatcggttgacgtcgctggtcatccgggccatcatatagcccaccggcgtgtggtcgtaaaaggagaaggaaagctgctgcaatcgcctaaacccctctttgcggatgtcataactgacgtacatctccaccttgctggccttgcgcacaaaaaacgccaccaacgccccctggatgccgaagatcaccgcgtacaccgccataaacccgggcagcccctgcagggagttgcccgcgatataggtatcgatagcgtacttggtcaaaagcggcaaggcaatatccgccgccgcggtaatcgccatagcaataataatggcgatcaggtcccgccggtagggccgggcaaatttcaatagtcggcgccagatggaaaaatcgatcttctcgccaaattctttttctttaaacccttgcatcggcttacatttcctttatttattggtttacgcctcctgcgcggcggcgccctcttgcagcgcccagatgcgcttgtaaagcccatcttcttttattagcgacgcatgcgtgccccgctggacgatacgcccctcctccagtaccaaaatctgatctgcctccgagagggtattgatccggtgggagatgataaaggtcgtagtgcccttacgccgtttttgcagcgcctcgcgtatggtggcgtctgtttgggtgtccaccgcgctgagcgaatcgtcaaagatcaggatgggcgcgttttgcatcagcatccgggcgatggccacccgctgcttctgcccgcccgagagggtgactccccgctcgcctaccggggtctcatacccctggtcaaaggaggtgatcacttcgtgcaccgcggcgatgcgcgccgcctcgatgatctcgtcctcccccgcgccccgcttggtgatgccgatattctcccgtatggtcttggagaagaggaaaggttcttgcagcacgatgcctacccggtgacgcaaccacttgcggttcagctggcgtattgggcgcccgcccagggtgatctcacccttatcataatcgtacagacgctgcaaaaggtgtacaagcgagcttttgcccgaaccggtggcgcccaatatggcaatggtttcccccgccttagcggtaaaggatacatcccgcagcaccggcttatctttttcatagccgaaccacacgtggtcaaatacgatgtcgccccgcatggcctgctcgtcctgtaccccgtcgtccggctcggaaggctgggtcaatatctgctgtagccgctcaaaggagaccatggccttgcccatatccgccaggatgcgccccagctggcgcaccggccagagcatcatgctggaataagaggtaaacaccagcatcgatcccagggtgatctcgccgctgacggtcatggcgacccccgcggtcagcgagatgccgatttgcaaaaaacccatgtagtcgctaaagccccagtaaaagcccatcaatttcattagcttgtaataaaggtcccggttggtgcggttgtaccggtcaaacttttctacctcgtaggcctgctggccaaaggcgcgcaccacccgcatccccgtcagattctcctggagcacggtactcatctcgccctcggcctcgtccgcccggcggaagcgttgttgcacctttacaaaatagatcagcgagaacaggaacatgggcggcaccataattagggatatccccgtcagcttggggctaattggcagcaggatcgccaccgcgatgcccaccataaatacgccccgcaccagttcgatcacctgcaccgccaaaaagcggcgtatggtctccacgtccgaggtacaccgttggatcagatccccggtctcagccttgacatggtaatcataagagagggattgcagatggccgtataacctatcccgcaggcgctgggcgatcccctctgacgccttggcggtgtacctgccccggaagtaggtgaacaatccgccgatcaacgccacaaccaccagtatcaccgcgctaatccacaagttttgccgccaggcttcccgcccaccggccatttcgatccacgccaccagccatcccggcaggtcaaagggttgggtgtcgatcacgctgtccaccgtgacccgcacgattagcggcgtggcgtaccccatcaggctggcaacgcccacgctgatgatcgcccacaggtattgcaggcggttaccgcgggtcagggccagcatacccttcagatcaccgaaattgcggcgaaaattgttctttcgggcttgtttcataaggccctcctaaaaggttaacaaattattctgtttccaagagagatttcgtactttatcttttaagttgaataaatggcgcccacggccggagtttggtcgcgtttatactccggcctctgcgccccatgatttcaagaattgaataagatgttcctctaacgctgcgctttatctacatcgcgatggccgataccccgtcgggcaccacggccacttgggcctgcagccccattttttgcagggcatagtccacagccgcttgcagattcggttgccaggtcagtttcatatcctccaccatctcccgaggcagatcgctgaccagtatcacctggcagcgggtcaatatcttacacagaatctgatactgccattgatcaggcggcgtccgctccgccggcacctcgcggatacgcgaaagcagttcctctggacttttcgcatcccgcagcgcctcataaaaagcctgcccgccgtgcccgtcgctgcattgggcagccaggatcaccactccgccatccttgcagcactgggctgccgtagtcatccccttgaccgcttgataagcgttctgatccagcggatacccgccgttggaggagatcacgatgtccgcgcggaactttggcagcatcgcatgcctggccgcaaaggcacagccggaaaaatgcgcccgttcgggctcgcccgccaccgcgtggatcacctttttatccgcatccaataccacatttaagataaactgcagtttgcacgccttggccgcccacagcatatcccggtggatggggttgccctccaacaccccggcccgcgccagggggctgtcgataaaggcggcgttgtggttgtagcgcacgctctgcgcgctggcgatgccgggcagcaccgccttgcgcccgccggaaaagccggcgaaaaagtgcggctcaataaacccctcggcgatcaaaagatccgcctgggcggccacgcggtttaccttcagttccccgcccgagggcaggttgcccagggcaaccatctgttcctcgtcaaaggcgttatgcatcacaaatcgttcgttccgggcgatctccgggccaaagcgcgcgcttttttcctcctcggtcatcgcccggtggcagccggtggccaccagtatggtgatttgggcttgcgggttgccctcccgcagccgctttaaaatgcgcggcatggtcaggcggctgggcaagggccgggtatggtcggaggtgatgatcacgatatgctgcttccccgcggccagcgtctttaaatccggccccatcagcgggcagtccagcgctgcgtcgatcagttcgccctcatcccggttaccggtatattttgcagggtggtatacgcccatcaaattttcctgcggcagctgcgcgccgatagtctccttgccataagggatgcggatctccattgtttcccctccaaactgcgttatttcaaattgcccgtttccagccccttggggtgcagcggccaggcctgctcaagcgccccggtaaaaacaggcttgctgtagatcatctgtactttttcatcgctgtccagcccggtggagtatgagcggttgcccaacacattcatggcctcctcaattccccactgcccgcgcaccgcgcctaaaatcgcccgctgcatcgcgctgccctggtccaccgcccggtcaaagatcgagaggaagtcgctgcgggagtgcagcccctcgtcccagggcacggcccaatccacgtggtcgagattcaacgggtccatcccctcgggcacttttttaggccataggctggccgtggccaccccgggcatgttatacttgcgttccatcttggccgcccacttggccttgcgcccgtggggatcccgcatgagcttgagccagtgggtcatctccttaatcgtctcatccaccatctccggtgtgatttttacctcatacaccttcgccgcggcattcgcaaacgtacgggcgatggcctgccgctgccaggccggcatgcgaatcatcctgttaatattgttgtcgctggggtgccagccatcctctttaagcagcgccacgtccagtgcggattcgtaaaagcggtgtcgcgcattggtcatgaccacctcttcctgatccgcccccggccccggaaaacctgaacggtaatagataaaggggtgccccatggcatccagcgcccagtggctggcaaagcccaaaagataggtggtcaaaagcgcgcgctccggcgcctctttggccacgtaggtcagcatctctcggaaaaacgcgccggtcttttccttatgcatccggctgcccagctcccgcatcccctcgttatccttggtgggcagcaggtggtagtaaaatagaatatccgggccttgcgcccccagggtaaaggccatgggatgccgggcgaccagggtcgatgccttggcatcatccagtttaaaaatcgcccgctgcgcgcaggaccagtgtgcaaaaaacgccggcatagtctttttcagctccgtttcccaatctggcggcgcgtcggtaccgcgccgcatatacttaaaaattattatatcatatttgatgtagattcgcatactctgccccagagtcccttaaatcaatgcaaaaacggcatgcgccacttgagcacataccgtttatctctctccaagcccgatccttccgggcgctgatgcaggcctgctgccaggttgacccgcggcacacggcccaatccgcttactgctgctaccttccggtcctgacagggttcacggcggcccgttgcacggggcccggcagcaagcctgcatcaacgcccggcaaaaaccggacttcatcattatacacgcaaaggcgctgcgccgcaagggcttttccgcgcgtccactaccccctggcggcgatatctcgcgccaccaccacgccggtgaccgaggcctgcatcagcccccgggtaatgcccgcgccatctccaatggcgtatagcccctttacctgggtctcaaagttgggcttcacctctactttagaggagtagaactttacctccaccccgtaaagcagggtgtttttggagtagagccccggggccagtttgtcaaaggcccgcagcgcctccacgatggaggtcaagtaccgctggggcagcacaaagcttaagtcccccgcaaccgcggtcttaagcgtaggcacggtggtggatttgcgcaggcgggattcatccgtgcgccggccctgcagcaggtcgcccaggcgctggaccatgatgcctccgccggtgagcatgttccccagctgggcgatatacttgccgtattcgatgggctgatcaaagggcctggtaaagcgggtggataccagcatggcaaagttggtattgccggtcttgcggttatcttctttatagctgtggccgttgaccacggcgatgccgccctcatagtgctcctcgctgaccagtccgcccgggttcatgcaaaaggtgcgcaccttgttctcaaaggtatccgagtagtagaccagcttggcctcgtacagatgtttggtcaaatggtccattacggagtttggcacctctacccgtacgccgatgtccacctcgttgttcatggtgtggatgcccgcagcctttgccgcctcactgagccattgtgcaccgccccggccgggcgcggcgatcacatagggcgcgtataccgcttcccgcgctccatcggcacgctccacattgaccccgcggatggcgccgtcctccacgatcaattcccgcgcagaggtttgctcccaaaatacggtctgggtcttttccatcaggtgcaggtacatgttgcgcagcacctcgaaggccagctccgtacccatatgccgcaccgggcaggggatcagcttgatgttatgcttggatgcctcgtaggcgatctcctctaccttgcggtcgtttaagccatgcacggtatccggcgcaccaaagccagtataaaccgtatcggcgtaatcgatcagggcctgcgcctcatcctcggtcatataatcggtcaggttaccccccacctcgtgggaaagggagagcttgccatccgaaaatgctcccgcgcccgcccaaccgttcatgatcgcgcagaccttacagtttacgcacttgccggtggtgcgcgccgggcagcggcgctcgtcaatggttcggccgttgtccaggatcagcggccgaatcccgggcttgcatttggtcagctccagtgctgtaaagatgccggccggccccgcgccgatgatgatcacgtcaaattgatttcccataattttcccccaatatccatttaccttttccgggcataggtaaggggacgcccttactcacgtccccctcccaaaacctcatgaattctatcacgaaaagatgagcaagtcaaccgttcttttctgccaatatttgttcaaacgttcgccttttgtacccgcccaacgcctagggggaaggcaccttccccgccctgcggcatatactgattacgaccggtttctggccgcgaaaggaggctttcccatgtccggcgcgccccctaaaggcagaaacgcctgtcttccatgcatggtgctactggccataaccctttctatcaacctacgccgaggttttgaccccgttccattttccctggtgctggcggcgctgctgctatcggctccgcccctaagcggctccggcggcgagggttgggaggacgagtagcaaaaacccggatcgcgcccgactaagggcacggtccgggttttatgtttagcggcaattagatgccggccagcgtcttaagatagcggcagttggccgtggcgctctccagcggcgtggtcttgctctgatcctgctcagcaacgatccagatatccgggtcgtctttatacaactcgtacacgccggggaagttgacgatgcccgtgcccagctcggtaaagtcgccctgggcggtgaactctttaaagtgcagcgccacgatgcggtcggcatactttttcacaaattccaccgggtcgtctccgccgcgggtcacccagcccacatccggcaccagtttgaggtaatcagggttcacgtcaaagatgatgttcagccccatcttatcctttaaaaattcccagtggtggttatggtagcaaagggtaatgccgttgtccaggcactccttgccaaagcgctccagcaccttggcctcgcagcggaactcgttttcgtcatcccgcttaaaatccggccagccgttgggaaaaccggagaagaacagcttatcaagccccatggcctttgcaatggtgatagcctcctgcagggaagcgtagttcttttcgatcgccgcatccgaggtgaactcgccgccgcagtgcagcgccgccagctcgagctcgtacttgtccagcatctccttatagaaatccacaaattccgggcgcaggttccgcgcgcccatctccaggccggcaaaacccgcctgtttgacctctctaaagatcagctccttgttttcggagttattggccgggccccaggtgatacattggcatgcaaatttcggcatcggtatttcccccttcaatcgcttttcatagggtcctctcagccagaccctctatacataaattataggctagagtttacgccctgtcaacgttccgattttttacccttttccctgcccagtggcagcagcgcatgggttacccggcccaggatctccacatcccgcgggcggaccatcagcgtttcataagccccgttctcggcaatcagcagcacccagccattcttgcgctccaaccttctaaccagggtacggccatccttaaacgctaccagcgccagctgcccatcctccacaggggcgccttcttgcacctgtaggcggctaaagcgcaccacgcccaggtttttcaggctgtcgtccattaccgttacggggaacggctcgcccttttccagcgcgggctggataaattcgtcccggcccagcaggtaatccaggctcacgccgaaaaagtccgcgatcctggccttgatggcatcgtccggcgtgcgctggccggattcgtactgggagagggtggaggccttcagctccaacgcctcgcacagcgcccgctgggtcagcccctggcggcggcgcagctcccgtatgcggatgcccagtgcccggtccttggccatactcttccctccttaccgcattttaagcccgctaatccttgcgcggctcggccgcctcgctgccgatcagggtggtggcctcgctccaggtttgggccacccgctttttcccctccgcgtccatcagctggaggatctcatcctggtcatactgtccggaagggacgatgcggtagttatacagcccgtcgctccggggggtgcgcgccacataggtgggggtatagcccacctcgccaatggttatcgcgccggtctgcatatccttttgcaggtttacctctaccatcatgccggtgtccttgtactgcgcccgctggtccgagaggaaattacccagggaccataccaccagcgcctcccgggtgctgccgtcgctgttcgtcaccgtgcgccgctcgatgggctggagcatgtgcggatggctgccaaagatgatatcgcatcccagggagaggatctcgtcggcctgctttttctgggtggcgttgggctggcgggtgtattcctccccccagtgcacgcagcagatcaccacgtccgcgccctcttccttggcctttttaatgttccgcttgatcttgcccatgtcgatctggttcagcatccagctccggtcctcttggggaatggtctcctccatgccgttaaaggcatagctgtacgccagtatggccaccttgacccccttcacatccgcgatcaggatcttttccgcatcctcttgggtagcaaaagcgccggtctgcataaagccccggtcggccacgttttgcacggtattgatgatgccgtccttcttcctgtcgcagatatggttgttggccagggtcagcacatctacccccgcgcctttcagcgcgtccagcagggtctcggggctgttaaaggtcgggtatccggtgtagccccgggccgcctcccccgcgcaggtcgtctccaggttggccagggtcaggtcggcccgggagagggtgggcgcaatggtagcaaatacgtcctcaaaggaataggtgccatcctcgtttttagcggatttgatctggttatcgtgggtcatcacatcccccaccacgctgatctggatatccaccggcggctgcggcgtaggctcgggcgttggcgtggcctgcgcctgctccactgtcggctccgggctgggcgtggcctgcgcctgttcgccccgcatcagctgccacataccgccgctggccgcccatacagtcccggcaatcagcgccaggagcagcagcaggatcacaaaaaaacggccctgaggtcttctcttcttttgcgccattggtcttaccccctgttatttcagttcggatgccgccatggcataccctcactttttttgctttatatgccctcccaaggccgggcgcgcacgacgttgcgccgaatgcagatattataacataaatatgtgtttccctgtccatcgccgacaaaaaaagcgcccccatgggaacgctttatcagttataccgcttaccggtcctctcccgggcgctttcggtcgctgataatatcgctgtttaaaagcgagccgcggcgcaccgtcccccgcccgaaccggccttcgatggcgtccagcgcctgctccagttggccccggcgcgcccggtcctcgccgctgtcaaacaggttcagctgctctgccgccccctcgcccaccagccccgccccggtgaccgacatcatgcggatgggcttacccttgggccaggcctcatggagcagctccatagcctcccgggcgatctccccactaaggtccgtagggcgctccaggctgcgctggcgggagatcaccttcaggtcagggtccttgatctgcagctgtaccaccgtgcatttgaccttgtggcggcgcaggcgcctgcccaccgtatcggccagcgccagtatcccggcgcgcacatcctgctcggtctccaggttgtgggcgaacgtgatcccattgccgatggatttggccgcctcctgttcatccggccgcagtacaggcgcatcgtccaggccgttggcgtagcgccacatcgtttgcccggccttgcccaaaagcgcggtcagcttctccatctccgtcccggccaggttacctatggtcttgatgcccaccttttgcagtgtttccgccgcgcgatggccgatgaagatcatatcccgcaccggtaggggaaagagaatgtcccggtaattctcccgggtgatctcggtagtggcgtccggctttttataatcgctgcccagtttggcaaatactttattaaaggaaacgcctaccgatatggtcacgccgatctcctcgcggatgcgccggcgcagctcatcggcaatctggcgtccggtgccaaacaggtgcaggctgcccgtcacatccagccagctctcgtcgatggagaaggcctccacccggtcggtatattggccgtagatctcgttgatctgctttgagatgcggctgtacgcatcgtggtggggcgccaccaacgtcagttccgggcacttgcgcttggcctgccagatggtctccgccgttaccacgccatagcgcttggccagctcgtttttcgccagaatgatgccgtggcggctatccgggtcgccgcacaccgccatgggcacctcccgcaattccgggcggaacaggcactctaccgatgcgtagtatccgttgcaatcgcaatgcaaaatcgtcctgtccgcagccatctttcgccctcccccgttttttctatccttatattatcatcccggcggtccggcgcgcaatctcacctgcgcgctgaaatatcgatgcagtgaacagaaaaagcgcgcagaggcaaacccctgcgcgcctttttgttcacttaatactccgccgtacccactgtgcgggggtagggcagcacatcgcggatattgctcatgcccgttaagtacatgatcatccgctcaaagcccaggccatagcccgcgtgtttgcagccgccgtagcgccgggtgttaatataccaggtataatcctccttgcgcatacccagttcctcaatgcgggaaaccagcacttcctcgcgctcctcgcgctggctgccgccgatcagctcgccaatgcccggcaccaacagatccatggccgccacggtcttgccatcctcgttcatccgcatgtaaaaagccttgatctccttggggtaaccggtcacaaacaccggccgggcaaatacctcctcggaaaggtagcgctcgtgctcagtctgcaggtcacatccccacgccaccggatactggaaattgcggccgctcttttgcagcagctcgatcgcctcggtatagctcacgcggccaaaatcggacccggccacgtttttcagccgctccagcagccccttatccacaaactggttgaaaaaggcgatctcgtcgggcgcctgctccaaaacgtagttgatgatgtactttaccatgtcctcggccagggccatatcgtcgtccaggtcggcaaaggcgatctccggctcgatcatccaaaactccgccgcatgtcggggcgtgttggaattttccgcccggaaggtggggccaaaagtgtacacgctgcgcatggagagcgcaaatggctccacgttgagctggccgctcaccgtcaggttagcctgcttgccgaaaaagtcctggctgtaatccacgtttccctccccgtctttggggatggcgtttaggtccatcgtggtcacctggaacatttcgcccgcgccctcgcagtcgctagccgtgatgatgggggtgtgcacatagacaaagccccgctcctggaagaatttatggatggcgtaagcgcaaagcgagcgcacccggaacaccgccgcaaaggtgttggtgcggggccgtagcggcgccatctgccgcaaaaactcaaaggaatgccgctttttttgcagcggataatccgccgggcagtctccctccacggcaatgcgctccgcctgcacctcatagggctggcgcgccccgggggtcagtaccagcgtcccctctacggtaatggcgctgcccacggagagcttggcgatctgcttaaagttctccagtttttcttccgtaaagacgatctggatggaagaaaaacagcttccatcgttgagctcgataaagcccagggccttggagtcgcgcacggtgcgcacccatccgctcaaggtgatcgtttgcccgtccaatcggctggctgtgttcttcaatgccgccacggtggtcttggtcatagcaaaggtgctcctctctaaacccggggtgctcccccgggatcaatctttgtcggttcctcatttataaattggaagatattgtttttcgtcacttgcaatattatacccttgccccatgcaaagcgcaagcgcccgccgccccatataggcgtgatgaaacatattttcaccccgccctgcgtatgctgtactagttccacgctcaaacacaaggaggttttaagatgcaaacgacggcgctgcccatcttgtcccttatcgctcatccggaataccccacccgctaccgggtcaacgggcgcttcgtgccccctggcgccacggttttccccctgccggaaaacggcgaggcttttatcgaggcgctgcccgccgcgccggtcgagggcaagcgcctggtcgcgcgcagctgcgcctttagcttccgggatggggcgctgatgcctcccggcgctgctgaaggcatggaagtcaccctctggccgggcaacgtggccgaggtctgcttatcgcccatggtgctgccgcctgcgcccgaggacgtgcgcatcctaagccagctgcgccacgattttggcagcggcgattatctcatcaccctgcaatggacgccggcgggcatccatttgagtattgccggtttgcccggcggccataccgtttataaccgccttttgcccggctgcagcgcggaatacaccctcacgcccgccaccttcacccacgaggtgggggacgacctgctttgccagttcaagcggtacgacgggcgcacccagctgctggtgatcacctgcgcgcggggccggtttgccacccttgtggataccccggccgacgagctgacggtagaggacggggaggttcccaacgccgttacctggcgtacgcacagcgataccttccgcggctggcagctttccggctccgtttccgcagcagggggcgtcaagcgcgcacgcgtttcgtcagagcagccctatttgcgggtgcccaccacccgccaggaaactgcacgctgtttttttgatgcgctgcgcctggggttatgggaagaggcccaaaaatacatcaaccctgcgctgcgcacagggttggatcagtccatggtctatgaatttaccggggatttcgattttatcgccgcgcccaagttcggcggcttcacgcccgaggataccttcgccctggcctcacccctgcaggggggcctgcgcaccatgcgctacctgacgctggattgggccagccatgctgacgacgcctcgcgctataagatcgataacatccgcgcccactaggcctgtatgacctgtaccccgtgctgctctaaatacgcgcgcgcatcctcgggcagcacgttctcgcagatcaggccgctaagctccttagcgtcgatcagcttgtgcaaaaatacctcgcctaccttggagtaatcgcaaagcagcaccttgcgccgtgcgtgggccagcatcacacgcttaagctccgcctcctcgatggaaccctccgtggcccctgcctctatggtgaagccccggcaggagataaacgccacatccacctggatattggccagaaacgccatcgccgtgccgcccaccagcgacacggcattttcgcgcagccgcccgccggtgcaaagcacctgtatattgccgcactcgcccagcatctcggcggcgcgcagtccgttggtcaccaccgtaaggccgctacgctgccctaatagcggggccagctgcaacgtcgtggaggaggaatccatcaacaccgtctgtccgtcctgcacaaaggtcaatgccgcccgggcaatgcgctctttcgcctggcgggattgggcctggcgcagcaaaaatggcgcgtcctgtccactgccctccatcagtaccgccccgccatgggtgcgctgcaaaagcccgttgcgttccatgcgctctagatcgcggcggatagtcgcgccgctgacgtcaaacttttccgccagctcctccaccgtggccacgcgccgctcccgcagccagtgcaatatctcctgcattctttcaaccgctaacataccattggctcctttgattatttatgagtaaatccgttcacgattttcatcagctgtgtccaaatgagaaattaagcgccgggatagacattcctaaacatcacgacttataataataaaaaatgccgttaagagcaatagaaattcacgatttttcacaaaagaggtgttaatttatgtccaattttgcagacgcctaccgttacgcgcgggatcgctatgcggatatcggcgtggatacggaggcagccatcgccaaactggatgccgtgcccatctccctgcactgctggcagggggacgacgtagccggttttgagcccaacgacgggggattgaccggcggcatcgctgccaccggcaactaccccggcgcagcccgcacgccagatgaattacgcgcggacctggaacttgccctttcccttctgcccgggccgcataaaatcaacctgcacgccaactaccgtgtgggcgggccggatgtggaccgggacaagatcggcccggagcactttacctactggaccgattgggccagggaaaaaggcctggggttggatttcaaccccacgttttactcgcatccccatagcgccgacgggtataccctggccagccgggatgagggcatccgccgtttctggatcgagcatggcatctgctgccgccgcatcggccgggccatgggcgaggcgaccgggcagcgctgcgtcgtcaacctgtggatcccggatggggaaaaggaatggccggtagatgcgctcgcgccccgcgcacgtttaaaggatagtctggatcagatctatgccgaaaagatccccggggatctggtgctggacgcggtggaatccaaactattcggcctggggagcgaaagctatgtggccggttcgcacgaattttacctttgctactgtatggcccatcccgagctggcgctcacgctggatctgggccacttccatcccaccgagtccatcgccgccaagctgagcgcgctgagcctgttcctaaaccacctgctgctacataccagccgccccgtgcgctgggatagcgaccatgtggtggcctttgacgacagtctgcgggatgctctgcgcgaggtggtgcgcctgcaggcgctagatcgcatcgctttggcgctggattattttgacgcctccatcaaccgcatcgccgcctgggtagtgggtatgcgcaacacccgccgcgcgctgctttgcgccctgctggagccgaccgaaaacctgcgccaaatggaggcccggggcgacctggccgggcgccttgccttgctggaggcgctcaaaggctatcccggcggcatcgtgtttgacgagtacctgcgccggcacgatctgcctgcgggcaatcagttcatggcgccgatctatcgctatgaagcggatgccctgtccagccgcacgtaggttgtactgaaccggaagaattattaatatggaaagaagctgatcaaaatggccttatcttacatgcaaacccgcgaggagatctgcgatatcgcccatcgcctgtggcagctgggctttgtagccgccaacgacggcaacatttccgtcaaattagaggatgacctttacatcaccacccccaccggggtgagtaaatccatggtcaccccggataagctggtgctggtggatgggcagggccaggtgctggaggccagcggcggttaccgcccctcctccgagttccccatgcacctgcgctgctatgccgagcgtgcggacgtgcgcgccgtggtgcacgcccatccacccacggccaccggctttgccatcgcccacattccgctggacagctacaccatgcccgaggcggtgctgaccatcggctctgtacccatcgccccctacggcaccccctccacccaggagataccggaggcgatagccccgtttttgcaggagcacgacgccatcatgctggccaaccacggcgcggtgaccgtgggcgtggacctgatgaacgcctacttccgcatggaaacgctggaattcttcgccaagatcaccctgaccgcgcggctgctgggcggcgagcatgagttgaccgaagatcagcaaaagaccctgatcgccatgcggccccagtttgggctgaaaggccgtcacccgggcatcaaaaagtaccgctaaaattttctacaacgaaggagggaaagccttggctacccgcaacgtactggcctttgactttggcgcttccagcggccgggctattttgggccgctttgacggggataaaatcaccctgcaggagacccaccgctttgccaacgagccggtgcaggcgcagggccgcctgcaatgggatgtgctgcgcctgctgcacgagacccgccagggcctggccaagtcctatgccgcggcgccctacgcctcctttagcatcgatacctggggggtggattacggcctgctggacgcccggggacgcctgcttgaaaacccggtgcactaccgggacgggcgcacggcccacgccatcgaggaagtttgcgcgcgcatccccaggcaggcgctgtacgcccgcaccggcacacagctgatccattttaacaccctgttccagctgcatgtagcgcagcaggagcagccccaactgctggccctggcggaccggctgctgttcatgccggatctgctggcctattttctcaccggggagaagtacagcgagttttccattgcctccacctcccagctgctctcgccgggggcgctgcagtggaataccgggttattagcgcagctgggcctgccatcgcggcttttaggcccgctggtggatgcgggcgcccgattgggcgggctgacggacgaaacctgcgagctgtgcggcataccgccggcggagtatatcgcctgctgcgcccacgataccgcctcggccgtggccgcggtgccccagccccagggcagggcgctgtacatctccagcggcacctggtcgctaatgggggtggaaaggcgcacgccgctgctgaccgccccggcggcccaggccaacgtgaccaacgaagggggctatgggcgctcgatccggctgctgaaaaacatcgccgggctgtggctgctgcaggagtgccgccgccagtggcgcaaggaggggcaggacctctcctttgccgatatggcaaaggccgccctggccgcgccggcctttgcccgcatcatcgatccggacgatccctgctttatggccccgggcaacatgcccgcgcgcatcgcggattattgtagccgccatgggatgacgccaccccagacgatcggcgagaccctgcgctgcgtttacgagagcctggccgcccggtacgccgccactcttgataccctgcaagcgctgacgggggcacgttatccggccatccacatcgtgggcggcggctgtcaggatcgagtgctctctcaatggacggcggacgcctgcggcctgccggtgatctgcgggccggtagaggccacggccaccggcaacctgatggtacagctcatcgccttgggagagctcgaggatctatcccagggccgggagatggtggcccgttcctttgcgccggtcacctacgcgccgcaccccgcgccccagtgggacgaggcgctggcccgccttgcggcgctgcaaccataaataaaataggggggatagatatggattatttggcacgcgtggtgctaaacagccgctgtgcgctgggcgagggcccggtgtgggatgagcgcgcggggctgctgtactttacggatatcaccggcaagaccctgcatcggttcgaccccactaccggagcccacgaagcgatgcgtcccggttttcaggtaggggcttttgccctttgccagggcagcgacgagctggtgttagccggggaaaacggcttttaccgcgccgcatggctggccaaaccgcggcgcatctgcctggtacccgcccggggcgagaaccgccgctttaacgatggcaagtgcgaccctgcgggccgctttctggccggcgtcatgcataacgcgcagtccccggtgggcgtgctgtacagcctggccgggcagacggccaccccgctgctggagggcctgcgctgccccaacggcctttgctggacgcaggatgggcgcaccctctactatgccgattcccccacgcaggagatacgcgcctacgattacgacccatccaccggcgccctttccggcgggcgggtggccgtgcgcatccgtcctgaggaaggcgtgcccgacggcatgaccatcgacagccaaggtaagctgtgggtggcccaatggggcggctggcaggtcggccattacgacccccagaccggcgaaaaactgggcaaggtggatgtgcctgcccactgcacctccagctgcgtctttggcggggcggatttcaaaaccctgtacatcaccaccgcccgccggccggacgagcccgccgcttccccagccggggatattttcgcggtgcagctgccggtggccgggctgccctttacgcggtttacggggtaagcggctttatccaaactcgtggcggctgcccccatcgctgcccagctcttccaaagtgctgatgatcttttcaattttataaaaacattgtgtatcatccaggctgtcgtcccgcacgatagcctgaatgcgttgcagggcgcgatagctggccagttcgatcaggtcggccgggtctacccgcagtttttcgatgatgatggccgccagctcttccagtatatccttatgtaactcttgcatgttgttcacctcccccgcatcgttatgtaaccgaatatacaacctaaaatggttctaggatatacccaaattgggttttataattggtttcagaaacggtgcgaggtgaggacgatgtttgagatcaataatgagctgaaaaacgccaacacgcccagaaccgtgcgttttaccgaaaatctctttaatcagctcagtacggttgcacagcaaaatcacatttcattcaacgccctggtcctccagtgttgcaagtatgccctggatgagctggagaccgatccaaataccggcgataaataatttgcatttacgttgaatatgggaagaaaagggcggagaaacagcatcgtataccttgtatccgccagcgtgtcattcagaacggagacgaagccgaagtgaagaatctcccgcatgatctacttcccctccacaaagccgctccgcctttatcgttggtatgttttatttatccgggcaaaaatatcaccgccgcctgcactcggcatgaccccgtcatttcgagcgcagcgaggaatctcttgacgcctttttggtttcgcacattctccagccctacaggccaaatgccgctcccccgccaacgcgcgagattgttcgctcggccttgcggcctctctctgaatgacaggtggagagaaacgcttgcacacaaatcgagccgctgcttctcaatggcaggctggggaaccacgaatctgtcattccgagcgcagcgaggtatctcttaacaaccgcttggctttgccttatatcccgctgcacgtgacaaatgcgctacccactgctaacgcacgagattcttcgctcggccttgtggcctccctctgaatgacaggtggagagaaacgcttgcacacaaatcgagccgctgcttctcaatggcaggctggggaaccacgaatctgtcattccgagcgcagcgaggtatctcttaacaaccgcttggctttgccttatatcccgctgcacgtgacaaatgccgctcccccgccaacgcgcgagattgttcgctcggccttgcggcctctctctgaatgacaaaacccatactttagcattcatgctatactgtcattcaaaacgacggcgcaattctcctgcattttctgtcggccgtgcctatccgctctaatggcgcagcccttgcaatccctttaaatcaaacacccgccccgggtacccggggcgggtgttatactccattcaacaagcatcgggtttcaggcctcaacaccttttcccagcagctctccaaagcctgccacatagcggtcggctatcccgcgcagagcggcctcgtcgggtttggcataggcatcctgcaccacggtcagcctcgcgccggaggccttagccccctgcgccgcgtgcagcgagtcctcaaagaccatgcagtccgcgatctccacgcccagcttttccgccgccagccagaacaatcccggcccgcgcttatccccctgcacctggcttagatccgtcaacgcatcaaaacaatcatacagcccgtggcggcgcagcgccggctcgtacaaactgcgggcagaggccgtcgccagcgcgaccggtacccccagcccctttaactggcggatatattccccggcaaagggtttaagtgccagcgtgtgcgcataggcctcccgcgccatctcgtcccactcggccatgatggctgcaggtttctcctttaagccaaaccgggcgatggtataatccgctgcctgtgcatagctcataggctggagcgcctgtttataatccgccggcatggggatactccgccgggccagaaaagcctcgtcgatctcgccccaaaggcccatggaatccagtatcgtcccatccaggtcgaagatcgcgcccttaaaatcaaccttcatcggtccctcctactttaacgccgccgccaaaggataaagcctgcgcgccgcggcggcaatatccttttgggcgatgatggccgaaaccaccgccgccccatctacgcccgtatgggcaaagcggggcagcgtggtttcgttgaccccgccgatgatgacgatgggcaggtccaccgccgcgcggatggcctttaattcctccatcgtggtcacgtctgcatcctgcttggtggcagtggcgtacatggcccccacccccaggtaatccgccccgtccgccgcggccttcagggcctcgggcagcgtgccggcggatacgcccacaatcttatccggccccagcatgcgccgcgccaccttgcagggcaggtcgctctggcccaggtgcacccccgccgcatccacggcctgggcaatatccgcccggtcgttgatgatcagcggcacgcctgccgcgtcgcaaatggccttgacccgtagggcttgttgataaaattccaacgaggtgcactccttctcccgcagctgtaccagcgtacagccgccctgtacagcctgggccaccgcctcatccagcgtctttgtactcatcagctcccggtcggtcaccaggtagagcgtataatccacctcaggcttcatcgatcttcaccctctccagcagcgtcttttcatccatgcggccaatcgcgtcgataatccccatatggaagtatccaaaccctttgccgccttccttctccagggccagctcgcccgccagtcccatcagcgcaacgccgcccgccgcacagagcagataatcctcaggccgtaccgcgccgcacaagcccgccaccagggtagtagacatacaacctgtgcccgtcacgccagatagctgggcgcagccgttatccacccgcaataccttctcgccgtccgacgctacgtcggtcgcgcccgtaatggcggtcacgcaattgaacgtccgggccaattcttttgccagctctatccgctcaggcaccccgtcctggtccgccgcgtctacgccccgggtctctgcgcccaggccgcgcaggaatttgatctccgaaaggttgccccgcacgacagcgatcttcagccgctccagcaacctttccgccgtgcggttgcgcagcgcagtcgcccccgcgcccaccgggtccaaaacgatggggatgcccttttcgttggccctgcggccagatgccagcatggcctccaccgtgcgcgcgttcaacgtgccgatgttgagtaccagcgcctgggccgcgcccgtcatctccgccgcctcgccgatatcgtccgccatcaccggcgaagcccccatggccagcgcgatgttggcggagtcgttcaccgttacataattggtaatgtgatgcaccaaaggccgctgagcccgcaccgcctgtgcgatctgcgccagcctttgcacatagatattcgccatctatcttccctcttcctgtcgctgtgtggtctgataaaaatgtcccagcgggcccgcgcccctgcccagcgccaacccgtgggcgatggcgccggtaatatacgacttggccttttccaccgcctgcgccagagcatagccccgcgccagataggccgcaatggccgaggacagggtacagcccgtgccgtgggtatttttcgtgtcgatgcgcgcccgggtaaaggtcgtaaaacactccccatcaaaaagcaggtcttccgccgcgccgtccaggtgaccacctttgagcaatacggcccctggccccaagcctttcaaccttcgcgctgcggtctcccgctgcgcccggctctctgccggcagcccggtcagcgcgcttgcctccgccaggttgggggtgatcagcgtcacaaggggcaacagctccgcctttaaagcctccagcatatccgtcccgtgcagcgtttgtccggcagaggccaccatcaccggatccaaaaccacgggcacggtgcagccccgcagggctttggccaccgtgcgcactgccgccgcactgggcaacaggccgatcttaatggcatccggtggaatatcgtccagcaccgcctcgatctgcgcggccaacacgtcctgcgcgatgtcctggcggcagagaaccgcatgggtattttccgccgccacggtggtgatggcgctcatcccgtagatccccagcgctgcaaaggtcttgagatccgcctggatgcccgcgccgccgctgcagtcgctgcccgcaatgcttaaagccgttacgatcttcgccatcagagcttcacgcaccctgcctcgcccgaaaggatgcggttcatggtcttcatggcgcacatctccccgcacatggtgcaggtgtcctcctgcgccgggcgggaggaatcgtggtattcccgggcctttttgggatcgaccgccagttcatacatcttctcccagttgacctcctggcgtgcgcggctcatggcgttgtcccaatcccgcgcgccggggatgcctttagcgatatccgccgcgtgggctgcgatgcggctggcgatgatgccctcccgcacatcctgcacgtccggcaggcgcaggtgctcggccggggtcacatagcacaggaagtccgccccgctggccgcagcgatggccccgccaatggccgaggtgatatgatcgtaccccggggcgatatcggtaaccaggggtcccaatacatagaagggcgcaccatggcacagccgtttttgcaggatcatgttggcctgaatctcatttagcgccatatgtcccggcccctcgatgatgacctgcacgttcttctcccaggcgcgctttgttaactcgcccaaggtgatcagctcctcgatctgggcggcgtcggtggcgtcggcaatgctgcctgggcggcaggcatcccccaggctgagcgtcacatcatacctggccaggatatccagcaactcgtcgtaatactcaaagaagggattctcgttaccggtgtgtaccatccaggcgaacagaaccgagccgccgcgggagaccacgttggtctgcctggggttgtccaacaccttctgggcggtatgccgggtcagccccgcgtggatggtcacaaagtccacaccgtcctgggcatgcttttccaccacggccagaaaatccttatacgttaaatcgtttacgattttaccggtataccccaccacatcgtacaccggcacggtaccgatcatggccggtgcggcgtcgatcagccgcttgcggaaggcatgggtcttgccaaagttgcttaagtccatgatcgcttcggccccaagctcaatagcggtctgcaccttttgccactccatctcgttatcggccaggtcgcccgatacgcccaggttcacgttgatcttggtgcgcaggccttggcctaccccctgcgcatccaaagctttgtggtttttattggccggtatggcgatggtgcccgcggccacccgcgcgcggatcacttccacatccaggttttccttctcggccaccgccttcatctgttcggtaattatgccctttttggccgcgtccatctgcgtggtgtactgctgcatcacaattcctcctttttaaagcccgcctggggggtgcaaaaaagccgctcacaattctgcggttcgcagatgagcggcaaataatccgtttggctaaggcctaaacaaacgtttgcttccctacgacagttttaactgacaggttcaaagggtcaggctcttacgccttctcaaccaatggtccccccgcaaaattcaattttatatatcttaatcttttttgcgtatcttgtcaattcgcctgcggccctgcgcccgtaaaaatggcgaaaaaatgccggtttttatcttatgggcgcgtaaagaagattgacacgcacggctaaaccctttaaaataaaccccatcataggataaggcccttcaataatatatggggctttgcaccaggcaaggagctaaagagaatgaagacggtaccttttacaaaagcacaactggagaaaatcgtcgcccaatatcctacccccttccatttatacgatgagcagggcatccgcgaaaacgcgcgcaggttgcataaagcctttgcatggaacaagggctataaggagttttttgccgtcaaggccctgcccaacccctttatcttgaaaattttgcgcgaagagggctgtggggtagattgctcctcttataccgagttgatgctggccgaggcctgcggattttccggcggcgagatcatgttctccgccaacgatatgcctgccctggactttcaaaaggttcgtgccatggatggcaccgtcaatctggacgatatcagccatatcgactttttaaaggaaaacggcggcattccccaaaaagtcagctgccggtttaatcccggcggagattttaagctgggtaacaccatcatgggcaaccccggcgaggccaaatacggctttacccgcccgcagctgacccaagggtttaaaaaattgatggccttaggtgtaaaggaatttggcctgcacgcttttctggccagcaacaccacggatgacagctactacccggcgctggcccggttgctctttcaaactgcggtagaactttatgaagagaccggcggccgggtgacctttatcaacctctccggcggcgtaggcatcccctatctgccggatcagccgggcgcggatatcctcaagatcggtgcgggcgtacaaaaggcctatgaagaggtcatcgtcccctcgccgctgcgcgaggtagccatcaataccgagcttggccggttcatgaccgggccccatgggtatctgatctcccgggtgatccacgagaaaaagacccataaggactatttgggcctggatgccagcgcggtcaacctcatgcggccggccatgtacggcgcctatcaccacatcaccgtcatgggcaaggagaacgcgccctgtgatcacaaatatgatgtgaccggctcgctgtgcgagaataacgataagttcgccatcgaccggatgctgcccgaaaccaatatcggcgatctggtggttatccacgataccggcgcccacggttttgccatgggttataactacaacggacgcctgcgctcggccgaggtgctgttgggcgcagacgggcagaccacgctcatccgccgggcggagaccccgcgggattactttgccacctttgattttacccacctgctggatgaggccttgcaaaaggacgagaacgggcggttgtaaaattcgcttatggctttacgggcaagcattaaagcttgcccgttttttataggcgctccagcgtcttttttctattctcctccagcactttatctggaaattttatgtagatacattcctgacagataccctgaatatctagggcgatctcctttaatatgcagtgaccctcgcgccaataagcacaaaaataattgtcgcagcgcatgtcatacgcctccagtttatttacactctttaatcacagtgtaatttcatggtgtatatagcaattataatgggcagtataatatttgtaaataagcgaaacgaggatagggcatgtttgaggtaaagcgcgaagagtttgtgaataaaacctttcggctcaacaaaacgctggttgaagagttggccaaatgcgcttccgaacacaaaatatccatgaacgcgttggtagcacagtgctgccgttacgcgctcgaccatatgatcgatccttccaataaacccgaagcgtaatttttgaatctgatgccagcggcgcgatgcgccgcttttttatttaaaaacccttgaccttgacgctacgtcatcccttacaatcctcttatcaggaggcgaacgaaagatggaatataccgtacgaggcctgtctaagctctcgggcgtcagcgagcggacgctgcgctattacgatagtctgggcctgctatgcccggagcgcttgccaaacggttaccgccggtacggcgcatccgaggtcgcccgcctgcaacagatcctgttttaccggcagatgggcatccctctaaaggagatcgcccggctgctggacgacccgaagtttgaccgggccgccgccctgctctgtcaccgccagacgctatgccgcaagctgacggcgctggaagagttgatcggcaatatcgacaggaccctgcaagaatggaaaggaggaaaaaccatgtccgatcaggaacggttcgcgggtttcggaaaagcggccgtcgaaaaaaatgagcaagcctatggccgtgagatccgccaaaaatatggcgacaaggcggtggatcagagcaacgccgctttgtccaagctcaacaaaacgcagtacgacgctatcatgcaggagggtgaggcgataacggcctctatcgccgcctgtatgccccagggcgcggacgcgcaggagacccaggccgccatcgcgcggcactatgcctacctcaacgcgcactttggcatccactatacctacgagatgtacgcgggcctaggccagatgtacgcctgcgactcacggtttaccgcttattatgagcggttcgcacccgggctagcggcttttatgcagcaggccattgccatcttcgtgcaagaggctggcgcaaaggccaaatagcgagcacttcaaaaggcgctgtagggcgcctttttgcatacaagggttttgtggtataatagcagcgattcaacggcacggatgacgtccccccgtcttgaggcagggcatatggatcaggtaaggacccttacggctgactttacgcatccttctccccctctcaaagcggctgggctagtctttgccgcttaaggcaagcgtagggcgtatagcccaaaataacggcaagcaaagaataggagaattggctatgcatctaacgccaaaccaaaatataatactcatcggcatgccaggctgcggcaagagtaccgtaggcgtgctgctggccaaggcgctggggcgcggctttgtggataccgatctactgctgcaggcccattctgggcggctgctgcagcagatcgtcgatcaggatgggatcgatgcctttttgcgccaggaggagcagaccctgttgaccgtcgctcccggcggtcaggtcgtcgccaccgggggcagcgcggtgtacagcgaaaaagccatggcccaccttaaaaaaggcggcaaagtggtctatctgcgcttgcccttagatgagatccagcggcgggtgcaaaatatcgccacccgaggcatcgccatgggcccagggcagacgcttgcggacctgtaccgcatccgcatccccttgtatgagaaatatgcggatttaacggtggattgcgcaggacaaacgctggagcaaaccgtgcaggcgctgtgcgcagcgctggggatggcctgtgctcaaatgcgcacacaaaactgaacattcggctatattggctgattatatgccttttatttcgccaaaacgcttaaaacaaacaggaatgtgaagtttctttgtcacataattgtgaaagttttgtgaaatgcctctccttctgttgacaggattcgacaaatatcgtatgataagcgtgcaaaggaaaaacgaacgtttgtttcgtttgtttgcaaatgattcccccctcgatgcctggcatccgttgggggagcgcgttcggctctcgggccttacgccttctcgcccctgtccggctcggccggcgcggtgagatttgattttgtccccccttcattggcgtgaaccatcagcatttggctgaggagatcgccttttttttttacacttttgggccatctcgtctagaaaagcccccgcgtttggcgggggcttttgctttacagcctcattgtttttcaaacaggctctggttccgctccgggtaggcttgcaaagcgggcaggccattttccggccggtccagataaaaccaggctgtacaggcccagtcgtcctggcgcagaaagttcatccagctgtccccggggatgtcctcgtcaaacagggaaagggtctgctccggcgcaaaggcgttgcgccaggaaccatcctgcatgttgatcgcggttatcacctggggctggttttgcggcgtaaacagttcttttagcttctcgcgctgccagccgccaatctgctggacctgcacgcggatgcgctggttaaaatatatcgggtccggcacgtgcagccggtagatttggaagcgtccccccgcctcgtcgcacaacaggcacccggtataccggtgggcaaaggggttaagcagccaggcggtagccggatagtcctccgtccccgtacacagccaggagggataatctccgtccccatcgataaaagcctttacctcgccctcgccccaccaggccccgccatagcgcgggtgagtcgccacctgcatggcacagcccaaaaagcggcccgcgccctctacctgcggcaggatcgtcacatcctgccccaccgggggcatggtgcgggaccaataggcgtggaaatagccgattttttcgccctccagcgcctgcttgcggtaattgaccgtataaaagagctggttgatatcctcatccgattcgttgaccagttcaatccgcccccgctttaaaaacggcataggaataaaacagttaaaacacttgccccccggcgaagagaacagctcgttttcaaaggaaaccgcctcgccaaaggcgccgccaaaaaaatctcccaacgggcaggccacagccggggtctttgccccatcccaataggcctccagacgcagcgcccgctgcaaatgcgccggggcgatctcctcccggtttttaaaggtgatccagatatgatccaccacgcccgggccggcagcgtccagcagcgtcacccgctcgcccgcgggcagccggtcatacgcgtggcctttaaagccccggttttcccgggcgccgtcgcccggccggtcggtacggtattcaaaattctggcagcggcggaccgcgtttgacagctcgtaaagcggcataagcttccctcctatttctctttaatattgcatctcgtcctgggtgcgcagcagggtataatcctgctttttaatgccctcgatcaatgcctgagaggagtagatcggatatgggaaggcgatgccgccccggcaagcgccgtaatcccggtgtgcgtccgagccggaaagcgcaggcacatggtgcttgcgcgcccattccagcgccagctcgttgtgattgtgcacatacggggtcccgttatacacctccaccgcgtcgatcagcgtcggatccttgaccgggtggagctgcgcatagtcatcccgatacgggtgggcctggttgatcaaccaacccttttcgtgggcaaagtcgcacatatctttgacggatttttggcagatcatgggataccggtacacgtcctcctcggtcatcccataacagagaaagtcctccatcccctcataggagcgcagctcaaagcccagcaaaacggtcaacgccgtgccctcggccgcctttttagctgcccggtatccggccagcagcatatcggcatactcatcccagcttttgcccggataaaacttggtaaaaaagtccggaaagtagtgatccgtcaacaccaggcactggtagccgcccttcagataaagttccacctggccagccgccggtacgtgcccgcaaaggctggtctcatcggtatgggcatgcagctctaccttatatatattctgtggttccatcgtattcaacctccctatcgtcctatcgattccgaaccagtcccgcgctcagcctgtccagcgcctccatcagcaccggccggggcgaggctacgttcatccgcacatactggctgtagtcctccccaaaaaagctgcccttgttcagccccacgcccgcctgggcgatcagactgtgagggtcctgtacgcccaaccccgcgcagtcgataaacagcagataggtggcctccggcatgcgggtgtgtagaccgctgatggcattgatccgcacgcaagtcctatgcaggttctcatgcaggtattgcagcagctcgtccagcagcgggccacaccggtcaaaggcggcctgcagcgccaccaggccaaaaatgttgttgcccgcgtgtactacgcgcagcgcatcagtaaagcgcttgcgcagcccctcgtccgggatgacggcaaaggccgtgctcaaccccgccaggttaaaggtcttggatgccgaggaaaaaaggatcgcatgctgctccatcccggggactgacagaatcggggtatgccggtaatccggcatggtcaggtccccgtgtatctcgtcggacagcaccaacaccccgtattgctggcacagcttggctagctgccccagctcctccgggcgccagctgcgccccaccgggttatgggggttgcacaggatcatcaccctggcgcccgctttaaaatgccgctccagatcgataaaatccatcttccagctgtcccccaccttttttaaggggttgtgcaccacccgcctatcatgctgggggcctagataaaaggggccgtataccggcggctgtaccacgatctgatccccaggctgggaaaagacctgcacccccaggttgaacccggagaccacattggtcagcatcgccaccgtctccggggcaatggtcaactggtgccgccccgcataccagcggcatatcgcctctttggccggctcctccaaggtatggtacccaaatatctcctgcgaaagccgggcctgcatggcctcaaggatcggcgggaagaccgcaaagtccatatccgccaccgatagcgggatcacatccccgttaccatactcccgggccagatcggcaaatttggctgcgtctgtcccccggcgctcgatcacgcggtcaaaatccagtgccatatcaaaaaccacccttcttcaggcagggcagccgccctgcgctgtcgttcatcactttataatcaaagtatagccctttgccctgcgaaaggcaaagcccctttactgcagctggcgcaggtacagcccgcgggtatattgcccctgcggcatgcgcccggccaggtaatcctccagcgcgcgccggcaggcctgctgatcctccagggtaaagtacagcgtcacaaaatccagcccttgcagctgcgcctgctgatccgccagggataatacatggccgttgagcagctgagaataccgcctttcccgacacagtacggtaaacttttcacccttgcggtcggtcagcgccctgcgtccatcgcaatccccgcaaccgcgcgcgccctgcatcgggcaggcgcgcagcgtcatcagcggcagatgcccataggcgatcacgccgcaggggacatggcgctgcaaacgccggatatcccgcagattcgcctcaaagctgaccgtctgatccgccacgcccaggcgccccgcttcctccagcgccaaactgttcaggatattcagcccatagccgccgtgcacgcgcagccccagctcccgggccatgcgcagcgcgcccaggttctcggcctgcgcgtcggccaatccccgacgcttcagttcttctaaaagcaatgtcgtctgctcttcatgatctggaaacacagccatcgggatctcgccgatcagcttttctcccagggcgtccagcatctccgggtgcgccgccagctcgttaagcggtagaatcagtcgctccgccgcaccgaccagctcttgtgaaagctgcgccgccttttccagccggatgcgcaggcggggcgccccctctccctcccctacccgcgcacagggcgccttttcccaccgcagggggatgatctcccgcaccggcggctgccccagcagcgcttccagctcatctaaagccgccttgcgcaggctattcaatgcggatatgggcaaccgcagccccggttcgatttgcgtgtgcaactcccgcaggtaaaacggggtccctcccgtcttttccagggccaggcgggcctgcgcctcatccagcggacggttgatggctttttgtggcttttcaccttgcacctgtacgcaaacgcgcacaccccgccccatcgcctgcaattccgggctagctccggcgcgcacggtcaagtgcatatccaccggcaccgttttggcctcatgccggtaggtcgcggcgatctgccccagcaccccgcccgcctgctgcacatcctcccgggtgcgcgtgccaaacatcgtaaggtcgcgtttggccgcaaaatagccattggtgaacccgctgcgggagaacacagccttcaagctttcaaggtccggctgttccccactcagcgcctgtttgcaggcgcgggtggcacaggccacatactcgggccgcttcatccgcccctcgatcttgagcgaagccacccccagctgctctaaaagccgcatttgctcgatgagggaaagatccttaagcgaaagggcataccccctttgtccggccttaaaatccagccggcagggctgggcgcatagtccccggttgccgctacgcccccccagcatgccggagagatagcactggcccgaaacgctcatgcacagcgcgccgtgcacaaacacttccacttcaaggccggtccccgcggccaggcggccgatctcttcccggctcagttcacgggccagcaccgcgcgggaaaaccccatttcttcaagcaggcgcaaccccgccgcgttgtgtaccgccatctgggtcgaggcgtgcagcttcagatccgggcagatctgcctggccagacgcgccaccgccagatcctgtacgatcaccgcatccgccccagcccgggcgatctgctccagcgtgcggcacaccccgtccatctccccatcctgcaccagggtgttgagcgtcatatgcacccgcacaccccgggcgtggcagtaggcaatggccctaggtatctcctcatcggtaaagttggctgcgttgcgccgggcattaaaaagctgcgcgccaaaataaacggcgtccgccccgctgcgcaccgccgcctgcagctgctccatcccgcccgccggcgccaatatctccatatgatcctgtccttcccactccgccaggcggcctctttcgtgcatcaaaggccctctgcacggatatactattttatagcttcacgctctcttgtttcatcattagtatagtcaccgggtcccccatgcgtcaaatactaaaaagggggcgctgcccacgatataaaggaggccgccatgctgatcgcctataccgaagatgccgcgccgcaagcccgcgccttgagccggatgggctttacctgcctgcccgccgcccaggccgtgggatacgaggcctttctttatggcgccacggtctacagcggcatctttttgcgtctgcccgaccagccagccgcccgcggcgcgctgcttttgccctgccacaacaaaagcccggagcagctggcgctcatcctgcgccggcgcagctacagcccgctattttaaagtatcggttttgtttccatttcggttttagattgcatttgtccccccttttgctttacaatatataagggtcatttatacttcgcgcaaaggatggtttgatcttttgtaaaaaaggtccagccctcctgattttgtttaccatggagcgggcgcagcttcaggcagtttcacgcctatttcgggcgtttaaataggagaatgaagatggaacgacggatacgcgtaggcaaatttattccgtttgtcgcgctttttttagtgatgatcgtgctgatactgtgcgagtttctcatctggcggcccgcccgccaggccgcctcgctggaggtcgcgccattgacctttgcgggggataccccctataccgccgttagcaacggcatcctatactgggaaaaggggcggctttataagatcgaccccgccgggagagccatgtggaacagcgaggccgccgtgcagggtactctggccgcttccaaccagctgacggctctttataccgagcggctgatgcaggtatacgacgaaaacggcgcccgtctgtttgaacaatcctacgggacggacaagctgatcatggcccggtgcggccaggatacggccgccgcactggtgcaaaccgccgatggcggttaccgcctagacgtttttgaccgggccggcgcccaggtcgaccagatcgccctgcaggatcaaaccgcgcttaagttcgattatgcgcctgacggcaagcaggtctgggtgatcacgctggataccctggccccctcgccgctttccaggctgacgacctataaccccggcaaagccgtcagcggcatggtgaccgcctataaccaagtctgctacgacgcactggtgaccgatgagaactatttgcttattggaaccaataatgtggtgtgctacaataaggatggcgaaaagcagtacgaacgcctggtctatggctggagcgtgacggacgcggcgcagctggataaagcgatgcgcctagcgctgatccctcagcagctggatgcggtcaccaagctggcgcccacccagttgcagctggccactttgcccgaaggcgataagagcctaaagctgccggacgacacccatagcgtctactttgggcgcagcaaggtctatgcttttgccggccgcaacgtgtacacctattcgctttccggccaaagcgaggggaatacgctgctccccatcgatatccaatccgttacgctctcgccggatcgcagcttcgctctggtcagcgacggtgcctcggtctacaaggtaccgctgggttaaacgatttgtgcttttagaaaggaacgcgctttgaatattcttgatatcgcaatcctggtcttactggccatatttgtattgtacggtttttaccggggctttacccgtacggcattgtccctggcctctaccttcctgtcctggttgggggcatttctgttctacccctttctctccagatttttgatgagctcctctttctgggggcagctgtttggctatatgtccgatggggcggcagaaacgctgaccgggtttgagatcctctcccagccggcctccaccgtcacctcctcacagctgacggacatcctctctaccagcgggctaccctcttcggtgaccaccatgctgcgggaaaacgtgctcaaccaggccttttccgggcaggagggcgtagtaaccctggggcaatacttcaacaccacgctaggcaacctactggtcaatgtcatcagctttttgatcatctttttcgccctctcgctgatcttcgcactgatcatcgccatgacgcacgccgtggtcaacctgccggtgctcaagacgctggacggcgtccttggcgggtgcttcggcctggtgcagggcatattgctgatgttcgtgctgttcgctatcgtgccggtcatcctctcggtgatgccgatcagctttgtcaaccaatacctggacaattcattcttcgcctcgctgttttataagagcaactttatcctggatatgctcagcagtatcatttagctgttatcgctccgtctttaagccgcccgccgggcggcttttttgcggtatcaaacgcgcaaaaacacggcttccgcaacatcttatataaaaatacctcactttcatataagatgtcgaaaagtagcatttcttttgttaaaagggtggcgttatagtggcgcgggttgtgctataatcaaacctgtcataatacaacacgcttacattcaatcaggagaataatcatgttaagaaccatattggtagatgacaaccaattatcccttgaaatattacaggatatcagtgtgctttcccagcacgtcgccattctgggcgcgtttcaatccccgctggaggctctgcattttgcccgaaacaatactgtagattttgcctttctggatatcgatatgcccggcctcaacggattggagctggggcgcgagctgcgcaagctctaccccaagatcatcttgatctacgtggccagcgagccgggatattgtgccgaggccatgcgcatgaaggcggatttctatatctgcaagccttatgtttgccgggatatcgccgaggcgattgaacgggctagactgttaagccaccgtctgcgccaacgattgaccgttaggaccttcggacattttgacgtatttgaccgagagcaaccactacacttctcaaacgccaagtccaaagaacttttggccatgtgtatcgaccggtgcggcagtgccgttagcatggaggaggcaatcgaggcactttggccagagcgcccgatcgatgaaaagactaaacgtctgtaccgcaaagccgttattatgcttaagcaggtgctggctcagcacaactccagtgatatttttcacagcgtacggggttcttgcaacattaatcccggcgttttggactgcgattattatgaccatttgaacagcccttctttaagcattaatgcgcaagattacatgttggattacacctgggctgaggagaccgccgccaaaatatatttcgaacagtcataaacgcaggaggtcataaacgccttatgaatttcaaagaattgcttcaagaaattattttagatctagaggtgactttaacccggttaggtgtgccgctctcctcggtcaagcgttatattttacgctttcccaccgatccaagctatgcgcagctaaaacaggccatagcatcccacgattcggagaagatctaccatgcagcacataactttaagggcctgtgtctgaacctaggctttacccctttggccgcccactgccagcagctgtgcgtatacgccaagaaaaaagacctagaggcctgtaatcatacctttaacagcgttcagatatcctattataaaatcattacctcaattgaaacttatatgcagaccgcatccgattaatggacaggaggaacagctatccatgtcgtacgaatgtgactatgacacacgaatagaatccatcgtcgcaaatcaattaatcagtatcggcgtgccgccacatttaaagggctttacctgcgcgatgccatcattctcatggcgcataatcacgagttgttcgccaacgccactacccgcctttatcacgtcatcgcccatcattatgcgatcaacgcctccatggtagagcgctccatgcgcaacgccatccgcatcaccttcgagcgcagcccttctcctgttaaagcggagctgttttcaacacttctggatccggggcgcgaccgtcccaccaatgcgatgttcatcgccaccgtcgcccagcaggcccgctacggcctgtaataagccttgcggcgggcctgggcccgccgcagcgcaacttcttataccatcttcccttgccgcacgtccaacacgcctcgggtggtcagccgtaacgcagggatgaccggcagcgccataaagctcagcgtcataaacggatcgataccgtctgaaacgccaagcgccctggccgccttcttggccagcgccagttcttcatccacctttgtacacgctccatcgctcatcagcccggcgaccggcagcgccagctgtgccagcacatttccgtcccgcagcaccacgatgcctccgccaagttctgccacgcagttgacggcagcagctatatccgcctcattttcccctaccgctacgatattatgtgcatcgtgagcgatgctggtggccaccgcgccggcccgcaggccatatccttttaggaaacccagcccgatatggccggtattgctatgccgctcgaccagtgcgatttttaagatgtcctgatttaggtcgatgtccctggcacaacccgcgtccagcgtggtaatctctccacccatcatcccaattacgcccagcggcccactgtgcgcaaaatcttccgcagacagccgcttcaaatgaaaggtgtcccaggcgtgctgctccagccccggcgagaccgccggcggcgtaaattcgcgcgccacgccatcttgcgcccacagttggcccttgatccataccctttcaactttgagggactcaaaatcatcaatcattaccagatccgcccggtagcccggggcgatagcgccccggtcgttcaggccaaaatactgcgccgcattaaagctggccgctttcacggcggcaaccgggtccgcccccagcgcaatggcgcggcgcaggatgtggtcgatatgtccccggtcacacagctcgtttacatggcaatcgtcggtacaaaacatgcaccgctgcgcgtattgctggcaaagcaggggcgataaagcctccaggttgcgcgcagccgtcccttcgcggatcatgataaactgcccacgcctgagcttttgcatcgcgtcctccaggtcatggcactcatgatctgaatagatgcccgccgccacataggcgtttagcgcgtgtggtgccagatccggcgcatggccatcgatccgcatcctgtgggcctgcgcgtcaactaccttctcaagcgtccgtgcttttccctccaagatgccgggataatccatcatctcgcccagcccctgtaccctgggatgggcgtaaaacggctcgagttccccggcatccagcacggcgccggcttcatccagcggcgtggccggcacgcaggagggcagcatgaaccgtacatccaccggcagcccctgtgtggcctccagcatgtactggatccccgctattcccatcacattggcgatctcgtggggatcggcaatcaccgtggtagtaccatggggtaaaaccgcccccgcaaaggcaccgggcagcaaaagcgaactttccaggtgcacgtgcgcgtccaaaaaccctggcaggatgatcttttccgatgcgtcgatctcctgccgtccgctataccggcctattcccacgatccgcccctgcgccagggcgatatccgcccggcagatctcgttagaaaatacgttgacataccgtgcatttttaaataccaggtccgccttttcccgtccggctgctacagacaggatgcgctgtttttctcttagccttgaaccggccttttccgtacaggtttccgccatcacgcgccacccctttcgcaacagtttattttgggccagtataacggaaatcgtctgttttgtccattccattgcgccttttgctacgcttttattgcaggcaggtgcttgaatatgcttttccacttttgctatactactcttaacgcacagcccggcgcgtccgggtagaaggggggacaaagaatgaagactattaaagacaaacagattctcgtcgcggcggactttgctgggtttccgcttaaggaggccgtggtcgagcacctcaagggtaagggttggacggtcaccgatatcggcgtgcgcgcggctgatgaagaaaatccggagatgttccaccgcatcggcctaaaggtaggcgccaagatcgccgagggcgagtttgagcgcgcgctggtcttctgcggtacgggtatgggcatccatattgccgccagcaagtgcccaggcgtgttttccggcgttgtggagagcgtgcccgcagccctgcgcgccatcacgggcaatggggtaaacgtattggctatgggcgctttctacgtcgcccctcaaatgggtaaggagatcgccgacgcttacctcagccacaacctgggggatacttacgagtggtggcctaacttttacgagttccacaagcttgcttgtgatgagctgaatgccttttcctatgaggaatttaaaaagaatgactttgaactcgaacacctgggagaggtgcctttagcgttgatggataagccggactaagtggaaagcgcgtcccatccagcgttagaccgatgccaaaacgcccatgcaggtaattgcacgggcgtttttcacattttgcattggaaagcgtcgctttacgtctagggtgcgagaagtaaactgatagcgcccgaaatcgggtaaaagccgttctctaagaataaaagaacggctttaattttgtcctaatcatttttatctctttcggctatcacttcacatccgcccatctttattccgttgccacccattgatgacgccatgccagcgcagccatgccatgactgcaaggtatgcagccgcgcacagccagccaaaagaccaggcggtcagccttttggcggtcatgacgcgatctccttcccgcccgcatcttcgcctgagggttgctctgccttcttctgtgcgcattgacaaaatagatacccattaaaaatgcggacaacaaaacgctctccacaaagtgaagagcgtgatttgcatgcaggtctagcctgctggcgtgcctggagggattcgaacccccgaccttttggttcgtagccaaacactctatccggctgagctacaggcacatgtccaagtgcctatttattatataaaatacatcatcgtttgtcaactggaaacccgaagaaaaaatcgtatttttgataggcaaggtatgaagtatcattatcgatcccgcaactactagaacccccggggcatttgcaagtcccaacccgtttatacccgcgcggtggcacacttccacgatagccgccatacctccaccgatcccatggcgaaacgctggaagataactttctgcagcccgttatgatcgacgccataaacatctataaattttggggctgaatgatcggtaaaaagccggcggaccgccggattttctagtataatcatattagcttggtttctgtccgcggactgcctggggacacataggccaacgctgcctaccaaaactgctcagaagaacagctcaacaaccctgaaagcgaggttgaaatatggatcagcaaactttaaatatcggcaccgtcggcaccagtgcgatcatgcagcagatgcaagaggccatcagacgtacgcccggggttaccagccgagtggtcttttcccgggatgcggagcggggcaaagcctttgccgcggctatgggcgtacaggctagctgctgcgactacgaagaaatgctgaatcgcagcgatgtggacgcggtctatatcgcctcacccaatcgcttccacgccgggcagacgctgcaggcgctgcggcacggcaagcacgtcatcgtcgaaaagccggccgccctcagtgcggcggatgtccaaagctatatccaggccgcgcgtcaaaacggcgtatttttctttgaagcgatcaccacgatccatatgcccaattatctatgctgcaaggcattgcttccacagctggggacgatccgccgcgccaagatctgccacgcgcgttactcttctaagtacgacgcctacctgcgcggagagaaccctaatatcttcaaccccgagatgcaggccggcgcgctcaacgatatggggatctattgcatccacgtagcggtggatctgttcggcgcgcccagtaaggtaagctatcaggcggaatacggccccaacgggatcgacctggcaggcaagttgtgcctggaataccctacctttatctgcgagatcgaaacggcgaagaatgcagatctgcaaacgggatgttggatcgagggtgaacagggctggatcgaggcgccggggcggctaagcgtctttccccctttccgggcgctgatcaacgggcaggaacaggtgatcgatcggcaacccgaaggagaacgcatggtttttgaattatcccgcttccgcgatgcgatctttcagcgggatgaggcgttttttatacaaatggcaagccaaagcgccattgctgccggcatactggaagccgcgcacgcgaccgacggtttaaaccgttaaaataaggccggcaggaaataaccccgccggccttatgtaaaaaccgatcaactccctatctccaggcaaacgtacaggcagaccagaagcgcgatatgcgcggggtaaaaaatatagaaaaagtagcgccatcccctaccgcgctgcccattgtaggcgcttagcagcggcagggcgcacagcgcataagccaacaagatcatcgtttccatcagggcatagccgttataaccgtaagcaaaaaaatccaccgctaatacacccatcacgtactgcaaaacgatgaccgcccccagcgcaagcagcctttgccgtggattctcacaaaaatagcagataaataccgcggcgacgccatacgccccataatccgtgcccaatgcccctgcggtacccgcacacagcaatacaaacagtgcccctgcgccccttttgccctgccgtgtaagggcatcaaagccaaaacaagccaacacccccaatagcagggtaaacattacattactcagtccccaatgcacctgcaacggctccccttggatgatatcgagcaatagctgaaagggcagttcggacagcagcgcaaaggcaaaaaggttgcgcaggtaccgcctcctatgccaggtatagcggcaggattccccacagaagtaggcgaagatgtaaaaggaaatgctggtagcgccgcaaaagagcagcagcaaaagctgtccgccatcagcatctacatggaaaaacgcctgcagggcgcctaccagctgcggttggaaaaccttgtacgtatgatccgccagcatggcgaaagtggcacttgctttgagcccagcggccgtaaaaccccgctttttatccaatactttctccttatcttaggcaaacttatccgtatggcaaagccgcaccggcccgtttggggcgatgcggcttttatcaggcgcatagcgccgcgctattccacattccggtgccgggcgaccatctcctgcgcgctgacgcccagctcctggcgcagttgcatcaccaggatatcgtagagcaaaaacagcgtctgctcaaacaggttgcccatcaactgctccgagggcacaaaatccccctttgccttataggccgcggccggtacccgggtcacgatatccgcaatgcctagcagatagccctctcctgccggcgtgatcagcgccaaatccgcccccgcatttttagcctgctgggcgatatagttctcgtgccccacatcggccgagccgcaggcgcacaccatcaggtctcccgggccgatagcgggggtgatatcgtcccagatccaataggccgcctttcccaggtgcatcagccgcatggcaaatgcgcgggtggccagcccctcacgcccggcgcccagcaaaaatacccgcggcgcggacttgatggcctccagcagcgggcgcacatccgcctcctgcatgcgggcaaacaccgtttccagctcgcccaacaccatattggtcagctctttaaacatcattggctccccccattttctccgccgcttattttacgggttttaatacctccatccccatacgctgggccagcggcgccggcagcttgaccgaaccatccgccagctggcactgctctacaatggccggcagcacccggctggtggccaggcccgaggcatttagggtatgcacaaactcgggcttgccgcccggccgcctaaagcgcatgccgccccggcgggcctgataatcgttggaattggaggccgagcttacctctttataaatacccatgctggggatccacacctcaatatcgtacgtgcgggccatggatgcgcttacatctccggccgccagtttagaaacctgatagtgcaggcccaagccctgcaccaggcgctctgccttgcccaccagctcctcaaaggccttggccgaatcctccgggcgggtgaactgcaccatctccactttattgaactggtggccgcgaatcatgccccgctcctccgagcggtagctgcccgcctcccgacgatagcagggcgtgtaggagaagtactttttgggcagctccgcctcgtccagaatctcatcccggtgcaggctgaccagcgccgtctccgccgtgggcagcagaaactgccgggcctcgccgtctttttccagccagaacacgtcctcctcaaatttggggaactggccggcggtatagccgcaggcataggtcaaaagatggggcaccatcatcatctggtagccatctttgatgtgctcgtcgataaaatagttgagcagggcccactccagccgcgcgcccaacccggtatagatccagaacccattgccgcccagcttggcgccccgggcataatcgatcaaccccaaagactcgcatagggtcacgtgatccttgggttcaaagtcaaatgcaggcttctcgccaaactggcgcagcaccgcgttattctccttgcccccggccaccacatcctcgtccggaatgttgggcagcccctgcaaaaagccctggattttgccgtccagcgctttgagctgcgcatcgttttcgtcgatctccccgccgatctgcttcatctgggcgaagatgggctgcacgtcctcccccgcttttttgagtttgggaatctcggaggaaaccttgttacgctgggccttgagctggtcgtttttagcgatcagcgagcgccgctgcgcgtcccagtccagcagttcgtcaaagctcacctcgtccatgcgcttgagcagcgcgttgcgcacgccctgcgcgtcgctgcggatacggtttaaatccaacatatcgctcatcctttcagcattttacattactttttaaattaaaaaaccccgcctcatacatgagacggggtcatccgtggtgccactcaaattcgccggccaaaaatggccagcctcaatagcctgtaacggggctgatccgccgggtttgagggccaaagtgcccctgctcccaaagctccagggtggaaagccccactgccgcgccccggctcgcacccaccgccggctctctttccgcgtcaaaaaaggcccatgtccctttcatcacctgtatccgcggctattatcgccgctatgcacttacattatacacgccacgcgctaaaatgcaagggctactgcagctccagcttcatatcgccgaacttgatccaccccagtttgcgcatcccctcggagatcagcagcgtcagcgccgctggcaggataaagtgcagcagcaggatgttcagggtaagcagtaccgggtccatggtgggggacatggtgatccaggtggagacctggcccaccaggccgctggtgcccatacccgcgcctgcggggttattggtcatccccatcaggcaggtggcgatcgggccggtgatggccgaagccagcgtcggcggcagccagatcagcggacggcgcacgatgttgggtacctgcagcatggaggtacccaggccctgggctaccagaccgccccagccattctcgcggaagctggccaccgcaaagccgatcatctgcgcgcagcagcccgccgtagcggcgcccgcagccagcccctccaggcccagggcgatggcgatggccgcgctggagatcggggcggtgaggatcatccccatcaccaccgagatgacaatacccatgggcaggggctggagcacggtcatatcgttgataaaggtgcccatcgccgccatagccccgccgatatatggcccggtaacgatgcccaccaggccgccggagatgatggcgctaagcggaaccagcagaatatcaaatttggtgcgcccggccaccaggttgccgatctccgcgcccaccagcgccgccagataagcgcccaaaggtccgccggtcatggttgcctgggtaccggcgactagaacctcagcgcccgcactgtagcccaccgcgcccactaccgccgcggagaacaccgccagtggctttaccttcatccccgtggctaccgcaacgccgatggccgcgcccaccaccgggccggatttggccaccgtagccagctggttgagcacatccagtcccgggatcttggccagctgctctaaaatcagccccacgatcagcgtcgcgaacaagcccatcgccatggaacccagcgcatcgataaaccagcgcctggcccaacgtttgatgatgcctccattatccttttttgcctttgccatacaccttaccctctcttttggttaaatctttttcatcataacggagttattccgcattgtcaattcatctgtcttgtcatatgccttgattttcgcgctttgttctatccttcaaaatgttcgacaggcaaaagtctatccgtgtatccaggaaacgatggtatgttagcgctagtacgcttagaggatcagcataggattacctacggcatttacacctgcacgtctgcccggctgccacacctgtaaattccataaaccatcattttatgaagccgagtgcttctactttttaggaagcggcaagttattcgttccgcagtgcctgtgggttttgacggtaaaaaaacaaattgtatctatcgatttacgccaagcagatgtggtaaaatatattcgcctatcgatatgattccacagacaggagaaagatatggaaacgctatatcttctggccatttttttcgagatggttattgttaatttttatacattaaactattgctcaaccgccaaaatacggcagggaattttataaacggtctgctttttcttagttttttctggtttataagttgtgtgctgctcaattatgtattggtagtgcacaccagttcatggttagagttcgtgctcatggtcatgctgggtacgatcatttttagcagctatcacctatttaacgatttggttcatgcccgccaaaatgccgagcagcttcgccagcaaaaccgtaccaatccactaaccggtttaccaaaccgcatccatttttatgaggatatgcaggcgctgatcgatcaaaagcatccttttagtttaatttatatcgatttagaccggtttaagagcattaacgaccgatttgggcattccgcgggggatcgctatttgattaacttttcccttgcactcaaacggaggtgcgccggtcttggaaaagtgtaccacatgtcaggcgacgagtttacactgttatgcgacctagtccatactgaacggctacgcatacgtttagcgcaagacgcctttgcctcagatgttggaaaaccggaatttttgggtttcagcttcggcatcgcctcctatccggaaaacgggcagcaattagatgagctgatcgtcctggccgaccacagcatgtatacgcataaatcccgcctgagccagataaagggccgttaggaggaaaaggcatgaaacagccgcatatcgtttccgtgcgccagcaaccggccatagcggataccgcgattcgctattttcaggataaatgggccaatccgaagagcctaatggtctatgaggactgtatccgtcactgtatcggcgcccaagtcccgctgccccaatggtacctgctattcatggaggatgcggtcatcggctgcgcagggctgatcaccaacgactttatcagccggatggacctttatccctggctctgcgccctatatatcgaaccggcctatcggggccgcgcctatggcgcccttatgctggcgcgtgccaaaaccgacgcgcgcaccgccggatatgaaacgctctatctgtgtaccgatcacaccggctattacgagcgctatggcttttcctatctcggccagggctaccatccctggggagaaagctcgcggatctacgctacgccgctataaccttagaaaagaggaaccgaaccgattatggcggaatatcatattctcccctgccagagagccctgcacgagctgggccggcgcgtgccctatcattgggacctgaacctataccgcggctgcgaacacggctgccgctactgttacgccatgtattcccaccgctatctggatacggaggattactttggccatatctgcgccaagactgatattctggaggccctggagcgggagctgtcctcgcccagctggaagcgggaggtcgtcaacatcggcggggtgacagacagttaccagcccgctgaagcccattaccgcttgatgcccgaggtgttgcggctgctcatccgctacaagacgccggcaatcatctccaccaaaagcgagctggtcctgcgggattacgacctgatcgatcagctctcccgcatcacctatgtcaacgtggccgccaccgtcaccaccatggatgaatccgtccgcagccttttggagtccggcgcggtgccctcactccggcgctttgagatgctgacacagttccgcaaaaccaacgcctccaccggcctgcacgtgatgcccatcatcccctacctgacggacagctatgaaaatatcgacgcgctgttcgccgctgcgcgcgaaagccgggtgcactactgccttccgggcaccctttacctgcgtgggcagacgcggaaagtgtttttccgctttatcgatcagcactatccccatctctcggcgccgctgcacgatttgtacaagaccggcggcgcgcctaagggttataaagacgcgctttaccaaatggtaggcgagcgtcgggcgcattatggccttacgggcagttacgccaagcccatgaaggaaaaaatggcgcaggccctgaaagagaacgcgcaggtggcttttaatttagggtctcaaaattgacaaaaagcgccaatctggttataataaatgcgtctgttaaggccgcataaagatcatagggacaagtccgatggctttatgcgctttcccttttcagcaggttttgggctatatcttcttcgtactttaggtaacttaaaaggcggaggctgggatatggcttttccttttttactgttgcagaaaaccgtactttttgcccgccggcggatgggatgaccgccgcctctgcggccgcttttgctttggccctcgaccggacaagctgggaagaacaggcgcgcgttgcctgatgacataaacattttttatctggaggggttattatggagaagctctttaaactcaaagagcacggtaccaatgtacgtaccgaaatcacggccggtattaccacgtttctggccatggcctacatcctgatcgtcaacccgttgatgctttcgggcgcggacgcaggcgtagcgctgatggactttaacgccgtattcctggccacggcgatctctgctgcgatcgcaacgctgtgcatggcctttttggccaactacccggtggcgctggcctccggcatgggcttaaacgcctacttcacctattcggtatgcttggggatgaacgtgccctggcaggtagcgttaacggccgtattggttgaaggtatcattttcattctgctttctctgtttaaattccgcgagacgctggtcaacaccatccccgccaacctcaagctgggtattacggcgggtatcggcctgtttatcaccttggtgggcctgaagggcgcaggcatcgttatcgccagcgagagcacgctggtggacttgggccgggtggtatcgcccgagtttgccctggcgatgatcggcctgctggtgatcggcgcgctgcatcatcacaacgtcaagggctccattttgctgggcatcctcatcacctgggtgctgggcatgatcgcccagggcatcggttggtatcagggtaactccctgctgccggatttctccaattggacgctgctgccggtggtgcagcagtccaccttcttccagtttgactttgcctgggtgggcgagcatctgctggactttgccgttatcgtcttctccttcctgtttgtcgacctgttcgacaccgtcggcaccctggtaggcgttgccagcaagggcaacctgctggataaggacggcaagctgccccgcgccggccgcgcgctgatgagcgacgcgatcggtacggttgtgggcgcgtgcctgggcacctccacggtcaccagctatgtcgaatccagcgctggcgtggccgagggcggccgcaccggtttgaccgcgctgaccactgcggtgctgttcatcgtggcgatcttcttctaccccatctttacggcgatccccggctttgctaccgcgcctgcgctggtattcgtcggtctgctgatgatgggctcggtcaagaaaatggagtttgagggcgatatcgccgatacgctgggcggtttcgtggccatcatcatgatgcccttcacctactccatcgccaacggcatcatgttcggtatgctgacctgggttatcctcaaactgctcaccggcaaggtgcgcgatatccatcccgtgatgtgggtgtgctttgcgctgtttgcgctgcgcatcatcaccatggcgatctaattaaaacaaacggttttgtaaaagggggcgcgcagcttgcagaaagggtactgccaagcggctgcgcccgctccttttaagaaagggtgcttgaataatgggtatgcgtcacgaaatgacgattgcggggtgcaagcgcgcactaccgctttgtaaggtaaacgaccagctgtatatcgcagcctttatcatgtttggggatgtggagatcaccaaagcctgtgcccgggagctattaaaactcgctccagcgcatgatatcatgatcaccgcggaggccaaggggatccccctgctctatgagatggcggcacaggccggcgaaaacacctatgtcgtggcgcgcaaggcacccaaactctacatgcaagacgtggtttccacccacgtcaactccatcactactgctaaagagcaaacgctatacctgggcggagaggacgccgccctgctgcgcgggaagcgcgttttgatcgtggatgacgtgatcagcacgggcgattccatccgttccatcgaggctttggtcacccaggtgggcggcaacgtggtgggccgcatggcggtactggccgagggcgatgcccaggagcgcgcggacatccggtatctggaaaagctgccggtctttaacgcggacggttccatcaaaggctagttttgcacaaagccaaacccctccttgccttttcaggcaggaggggttatttttatattagtactgggaaaggatggagcagctatggaaggcgttgcacgttacaaggtcaagctggctccgcactgcaaaggttgggccgcggagtaccgggccgtaaaggcgctgctcacgcccctgctgggcgaaaatctgttggatatccagcacgtgggcagtacggccatcgcggggatcgatgccaagccgatcctggatgtagccgtgcaggtccaatcgcttgccagcatcgatcaggatgcgatgcttagggccgggtacgaccctcgcggcgaaagcggcgtacccgggcggtttctattcgtgcaccggggcgatggaccgctcagcttatctctggaacacatccactgctatgcggccggccacccggcctttgacgcacacgtcgcctttcacgactatctcaatacccatccgcaagcggcgcagcagtattgtcagctcaagcgccaactagccgcgcaatacccggacgaccgggaccgttataccgccggcaaggcggattttatccaagctatcttgaagcttgcaggccaaaaggcccggtaaagaacaaccgcgccctaaaaagatataaaaaagagctgccccgcgtccaagggcagcccttattctttaaaatctcttattccgccgtgtagggcagcagcgccacgatgcgcgcgcgcttgatggcgattgccagctggcgctgatgcttggcgcagttgccggtcatccggcggggtagaatcttgccgcgctcactgacatagttgcgcagggaagaaacgtccttataatcgatatgctgtaccttgtctacacagaacttgcagaccttacgccgcggacggcggccgccgcgcggcctcctctcgccacgatccatagccataatgcattcactcctttaaaatcaacgatacttgggatttagaacggaagttcgtcatcctcgatattgtgcagatccgccggggccgcaggcgcctgggcgccaaaaccggaatctccccggtcctgataacggccgtccccgccgccattaccgccctgggtggtcaaaaactccacctcgtcggctacgacttcggtaacatagcgccgcgtgccatcctgcgcatcataactgcgcgtctggatggtgccgcaaacggccactttactgcccttatgcaggtagcgcccgcaggactccgcctgcccccgccacaccacgatgggaataaagtctgcctcgcgctcgccgttctggttcgcaaaacgccggttgatggcaattgtgaacgagcacacggctacgccgctggtcgtggcgcgcagctccggatcgcgggtcaggttccccaccaaaatcgctcgattcatgccttgtccaccttccttattcgcctacccgggtaaccaggtaacgcatgatgttctcagagatctggaaattacgctccagctccgaggggaactccggcgcagcttccatgtgcaaaagcacatagtagccctcgttcaaatcgttgatctcataggccaaacgccgtttgccccattcatcaatatccgtcaccttcgcgccattgtcggcaatgagcttgttaaagcgttcgatcaccgctttggtggcttcttcctccagcgtcggatcaatgatgtagagcacttcatactgattcatgcctttcacctcctcttggacttaaggccctgcccatcttggggtagagcaaggacgctggaatattatatcacagcgtccctgaaaatgcaaatttaaccgctgcctggccccaggtttaatccccctcaggcaaacaggcttttctccccgccctgccagtacgggtcgatctgggagagcgccagcatatccgcatcggaaatcgtgaagttctcaatcgccagattggccagcatgtgcttctcgctgcccgtgcggccgataacgatatctccatactgcatggcaaaacgcaggcacagctgctggggcgttacgccgtattttttggcataggttttaacggtgacccactcaggcagggctaccttgccgcgtagcggcgcgccgcccaacgggctccatgccgaaacggcgatgccatgctctttgcagtaacgcaccgtagaggccgccacatggccgatatgaagcctgatctggttgagcatgggcttgatctcacagcgatcccaaatgcgctcaatatccgcgtaggagaagttggacaggccgatcgcccgcaccttctgggccttgtacccctcgctcatcgcatgccaggcggcgaggttgccttcggcccaatccgggctatcctgctcctcccagggccagggcgcgtggatgatgtacagatccagatagtccatccccagccgctccaggctttgctccagcgtagctttggcgatctcataggccttgaactcgccgggcagcttactggtgataaaaaattcctcgcgcgcgacgccgctgtcgcgtatggcacgccccagctcaatttcggtatcatagctctctgcggtatcaaagtggcggaatccacactcaatcgcctgtcgaaaagcgcgatacccccgctcgccctgtagcgtccaggtaccaaagccaatggcgggaatgctcacgccgttattaagcaaaacgtttttcaatgcttgttcctccttatgcggtacggcctcagccttaagcgtatattcctaatcctccagcttcagctcccggatggtgaattcatggaaagtggcctcgccggtgccgtaagtgaacagcgccgggtacatgcccatgccgtggatctcaccccgggggatatacgccatatgcgaaagatgcgcgatgttaaaggagggcggcagcttggtccactgctccccatccgggctgatccacaggctgaccacctgatggcggacggtcagctttaaatacgcctgatcccacagatattccacgccgctgaaatgccgctgcaaattggcgtggccgcagttgaacacccaggtaaacccatccttcagggcaaaccccaccgcgtgcgaggggctgtaatacatggagatgccgcaacccgcgccgttgcccaccgtcacgcgggtgatcacctcgaagttctcatataaggcgttataggccagcaccccgtccgaatcgtgcagggaggtgccgctgccctgcatcacgatgccatcttctacctcacggatgcgctctttgacatgcccggtataataccactggcagggcagatcttcgctgggaaactgtatgtgggtgggatagccatggggcacagccttaccgcccttgggcgcgggcaataccttatccgccccgctccattccgggatgcgataccagccgtcttccgtccattccaccggctccatcagcatcatgcggccctgattgaagcggttgttgaggaaggcgtgatacatcatataccagctgccatccggcgcctccaccagggtaccgtggcctttgctgatccaccgctcgtgccgcgagtgcgtgcggattatgggattatagggcgaaggctcccaggggccgtctgcatgtttagaacgataggaaaataccccgtggctggtaggcgggcccatggtaccgccggcggcgatggtcagatagatccatccatccttgagggtaaagcgggggccctcggtatatacgccctggatctcccaatcgtccgggaacacctcatcggccagcacgcgcttgcccgggccggcaaagtgcagcccatcctgcgtcaagggaaagcacacattttcagacatgtacagccagcgccgcccctcaaaatccaccacatggccggggtcgatcagctcgtgcccgcccaggatattaaaggccgggcccacgtaaaaggggccgtcccagtggccgctcttaatgtcctgcgtggtcagcaccatcacgctggaggccttgtaatccgcctcatcccggcggaaagggtcgatattgtagatatagtaggtatcgccatacttgcagatatccgccgcgccgcccaccgaatagggcagttcataaagcggctcccaatgcagcaggtccatggagtgccacaccatgggctgatagcagttgaccaggtagtagtcctccccatccttgagtatggccggatccgggtaatcgccgtgcagaatcgggttgcggtaagtgccatcgcccaagtccgcgcaataggtcctcttttccatcattgaattgctccccctttttattataaccgccctagcaggcagtacgtctatcctcaacccatcaattcgtgtgccaggcgcatgttgcccggcgcatccacgttaaagggacaacgggtagcacaaccgccgcaggccacgcactccccgccgttgtgcgccagggcgcggtaagcctctctcgcgttatggtccccctcctggaagcggtgcagcagcctggtgatggccgcgatatccagctgcgccgcgcagggcaggcaatggttacagtacatgcaaatcccttcggcgttccagtgggcgctttgcatcaaaagggtatagtccctctgggcctctgtggcattcacataggccgcggcggcctccacctccgctaccgagcggcagcccgcggctaccgaaaccacacccggccgggagagcgcgtaggcgatgcactgttccggcgtccaaccctgtttgaacatggccccagccgcataggctttcatgaccacaatgccgatatcctgcgcctcgcactggcggtaaaaggccgtgcgcgccgatgcggcggcggttgcgtgctgcgccgtctcctgctggcgcccctcgtcaaacatttcctctagcgtcgcctcctcgggcatcaggtcaaacagcgggttgatgctgaacagcgtcgcgtcaaagatccccgcgttggccaggtaggccgctactttgggcgaatggctggaaaagcccagcatccgcgccttgcccgccttaaggtatttctgtgccaggcccaaaaagccatccgggtccaggcaggttttcgcatcctccagctcgtcgatattgtgcagcatcaggatatcgatatagtcggtatccagccgcgtcaaaagctcgtcaaagtattgctcgcacagccccagttcccgcgtgcggaaggcctgcccctccttttgcgtgttgcccaggtgcccggcgatcatcaccttatcgcggcggcccttcagcgcggcgccgatgttgtcgcgcacatagtcctcgctcataaacaggtcgatatagttcatctcatggtcgatggcggcgctcaccacgtcgatacaggtcgccctgtccacctgcagcaggtgctccgcccccagtgaaaccacgcttaccggcgtattggtcttgggaaaattgcgataaatcatgccccagcccccctttttttaattgtatgtaggttgcagaaatgaatcgcgcactgtgcgcttattatcagtataccgcaactgcgggcaaaatttaagcctgtttataaagttccctccataatttggaaaagcctgaccaaaaatgctgctctttcgggatgcgtatgttataataaaataaataagcgatatgaaggagggcgtttccattgaaacgagtaaaggctgccatcatcggttcgggcatgatcagcggtatctacatgcagaaccttacccaaacttttaacgacgtagtggagcttgtgggctgctcggacctgatcccggaaaaggccgaaaagcgcgctcaggagtacggcatcaaggtgctgaccaatgaggagatctttaacgaccccgagatcgagatcgtactgaacctgacgtatatgcgcgcccattatccggtgaccgtccaggccctggaagccggcaagcacgtctataccgaaaagtgcatgagcctgaaccgcgacctggccaaaaaggtgtacgacctggccaagcgcaaggggttgtacgtcaccggcgcgccggataccttccttggcgcagggctgcagaccgcccgcaaactggtggataacggcaccatcggcaagcccattgcggcccgtgccatctgcgtgcgcggcttccccttcttcccggagtacatggattctaccgatcgggagtattccatggcggcgggggccggcatcctgcacgatatgggcggctattatatgacggccctggtcaacctgttgggccccgtcaagcgcgtggctggcaacttctccatcaccaaagatcagtttacctataaaaacccggataacccgcgctatggccacacggtcaaaccccaggcgccccagaccatctcggccactttggagtttgaaagcggcgtggtgggcaacttcctggtgaccagcgtaggcccccagggcgagatcccgcaggtggagatcatcggtaccgaaggcgtgctgtactgtggtgacccgaacatgtaccacggccccatcggtttgctgcgcgagggcgcatggaacaaccccacctatgaggttccgttgatgttccccttctcggaggacagccgcggtatcgccgtggcggatctggccaaggccatccagaacggccgcaagccccgcgcgcatatggatctgccctatcatgtgctggacgtgctggacggcatggtggattctgcccgcagcggccagtattacgaggtaccctctacgcttgagcggccccggccctttgctggcggcaccaaggcgggcatttatcagtttgacgactgatttgtgccgcaaaacaaaatatgctaaaatagggccggcgttcaatgcgccggccctatttttacgcaaggcaaggagtggtgatcccatggccacaaaaaaggtcaaaaccaatgcgatccgtctattggaagcggcaaaagtcccttttgaggtgctgacctatccggtggatgaaagcgatttgagcggcgtaaccgctgcgcagaagatggggttggaccccgatacggtctttaaaacattggtgctgcgcggagagcgcaccggcatcctggtgtgcatcatcccggtggcgcagaccgtagacctcaaggcgctggccgccgcctgcggcgataaaaaggtcgagatggtgcacatgcgcgagatacagggactcaccggatatatccgcgggggatgttcccccgtggggatgaaaaagaattatcccacctatttggatagccgcgcacttacgcacccggccatctccgtaagcggcggcgcacggggcgtacagctgcgcctggccccgggagcccttaccggctacctgaagtgtgagaccggcagcttttgtttacccggcgctgattgcaaataatataaaagtatgtatataatactgtaaataatatctgacaggatcaaaggagtacatttctgcttatggcggtaaccgttaaagaaattgcaaggctggccggcgtttcccgcggcacggtagaccgggcgctgtataaccgcggccgcgtcaaacccgaggtggcggaacgcatccgccgcatcgccaaggagcaggggtatgagcccaaccgcatcggccgggcgctggcgctgaccaaaaagcccattaagatcggcgtcatcgtacaatccgcccaaacctcgtttatccgcatgctgatagaggggacgcaaaaggcggccgaagaggtaggcaacctgggcgccgaggtactgcttcgcgagatcgataccatggacgctcagcggcagatcgaaatggtggacgagctggtggaagcgggcatcaagggcctggccctgctcccggtggacgataaccttttgcgccgcaggctcaacgatttgatctcccagggcataccggtggtgacctttaacgcggatatcagcggcactaagcggctgtgctttatcggccaggacgaccggcgctccagccataccgccgctgggctaatgcaggtgttgctgggcggccggggcaaagtgctggtgatgaccgggcacctttccaacctcagccacagccggcgcgccgcctattttatggaggagctggggcgcatcgcgccggacatccgttttttggacctggcgctgacccaggatgacgacgccgtagcccaccaggcggtgctggatgcggtagcgcagcatccagaccttgcgggcatctttatcgcctccaacgggcaatccggcgtgtgccaggccctgcgggagctgcacctggccggccaggtaaaggttgtgtgctatgataacacgccggaaaaccgcgaaaacctgcgcaagggcgctttggactttctgctggatcaaaactcctttgagcagggctaccagccggtgatgacgctgttccaatacctgtttaccggtaaaaagcccctggaggaatatttctttaccgatgtaatcatcaagacccgttataatatctaacaaaaaatgtagaatgccgggacaaatatttgccccggccttctttttattctttaccgccgtttcattagcgctacgcccaggccgactacggcggcggtggccgccatcatcgtcccctgccataaccaaagcgtgcggggcggcaattccagcaccggcgcaaactcctccttgagtttttgtcccagctgcccggccgcgtccagcagcggacggctttgaggccgcgcttccggcgccatgggcagatccaggctgatgagggcccgcccctcaaaggtcatgatctgcagctcgtccttttcatagatctcgcccactggccgcccctcgttggccagcactgtcagcactccggctaccagccccagcgggaaggtcttcccatcgctggcgatgtggtagccctcctcaatcttggccaatgggtaaaagcccagcttatccccctcgctcaggcacaacgcatcccgcacctcctgcgcctctacagcgccctccaggccccggagcttcaattcgccctccagccggtccagcggcagcacgccgatatcggccaatgcctgatcgctgcccttaaagagcacatagaccatatccccggcctcctgctccaccatcagctgatgatagcgggagagacggtaacccgtctttttcatctgcccgatggcgatgggcaccgcgccggccgccacagccgatacaatgataaacggcgccagtttcccgcgccgtgtcttttgtctgcgcatacttgtttcactccttattgctatttcagtgaagctagtttgtgcagtgctgcccgatattataaaaatattttatatacgcgccatttttatatcgttttatcgttctccccattcaggcccgctccgcctgccgatatggcatcgatctcctggctaaaccaggcccagggcaagcactttggaaccgcgctggcaaaaaccatgttttctttttttgtgggatgctccagatgcagttcccgcgcccaaagcgcaatctgctctccgggcttgctgtagggccggccatagcgctgatcgccccaaagcgggtgccccgcatgggcgaactgtacccggatttggtgagaacgaccggtctccaggcggatagcgaccagactgaacccatccctctcggccagaacgcgatagcgcagccgcgcatgtttggcgcccggcgtatcgctcgccaccaccgagacctggtttttagccgtatttttaagcaggtaatcttccagtgtcccctccggcgccatctggccccgaaccacggcccaatagacccggcccagcgcgtggcggcgcacctggtcgctcagccgcgcggccgccttagaggtgcgcgcaaagacgatcagtccccccaccggccggtccagccggtgcaccagccccaggtagaccgcccccggcttttgatagcgcgccttgacgtacgccttcatctcgcttagcaggtcgctatcgccactggcatccgcctgcaccggcacattgggggatttatccaccaccagcaggtgattatcctcatagaccacccggctcatcggtcggcctcccagcggcccgtggtgccgcagggcagtaacatattctggtccttgaccggcaggccgatctcatcggcgctcaccttaccgccaaatttgggcacgatggcgcgctgcatcagatcgtacagcaccatggactggaggccggtggtgtaggagttgatgaggaaaaagaccggcgtatctgagagcaccttgacgcattcgcagatcaacccgtagacctcgttttccagcttccatacctcgccccctggcccgcggccgtaggagggcggatccatcaagatcccctcatactggcgaccccggcgctgctcgcgctgcacaaacttcaggcagtcgtccacgatccagcgcacgggtctatcccccaagccggaaagctgcaggttctccttaccggcggccaccatatttttggccgcgtccacgtgtactacctgggccccggccgccgccagcgccaccgtggccccgccggtatagccgaacaggttcaatacccgcaccgggcggcccgcaccggccacctttttagccatccaatcccaattcacggcctgctcggggaaaaggccggtgtgtttaaagcccatagtcttgacccggaagctgagcgccccatagcccacctgccagctctcgggcaggcggttgcggtaggtccactgtccgccgccggtggcgctgcgggtataaaaggcgtccgccttttcccattcctttatcgaaagcgttttgggccagatcacctggggatccggccggcgcaagatatatttgccccaacgctccagcttctctccgtccccggtatccagcacctgataatcctgccaattggttgccaacagcattttatatgcgttcctttcttttacgagacgggcctcgtccccgcgcacgtcccgctcggatatgaatcttttttcattattatagcagagtccatcccgggcgcaaagggcacggggcgggctttttcgcagcatttagaacagtttgttcaatatcgcagggaaaccttcgttttgcggtaagatgcgcttatggaagttccatcccaaatccaatcttaaaagaaggaattcgtatgaaatcattgctagaagctttatatgccggcgaaatcactccctggcaatcaaactcatccaaaaccgataagcgccaagccctacttaagcagatcgaaaacgaagagcattacttcagcgaaaagatgtcttcggacgattataaacgttttcaatctttagaggacctgcttacgcttgcagaccatttggagtcggccgatgtatacgcccgcggcttttcactaggcgcgctgctgatgcaagaaatcctggcactgcgcgaaaggctgatgcaatgaagcccatacaatggcaaaccccctgcccaaaatcgcgcagggggttttgccttgtcactgctatttacagcacctttgccgtcatcttcacggggatgccgttgatgttccattcccgcgtcacgccgccctgggatttgccctgctgcagcgcatcgcacagtacatcggctgcgagctgatcgccaaacttggccagcaccgcgtcgatcttttcatcgcccgcgatatccagggcgatgtggtcggtcacctcaaagccggcctctcgccgctgggtctgggccttggagatcatctcacgcaccaggccctcctcgatgaggtcctctgtcaggttggtatccagcgccacggtaaactcgccctgggcctgagccacataaccgggcttgttggcggtgtcgatgagcagatcctctttcgccagggatacattctgcccgttcacttccaactccagcgccctgcctgcgtttaattcctccatcgcagcattgccgtctacctgctgcaacgctttgccgatggcgcccaccagtttgccgtatttggggcccaccgtgcgcaactgcggcttaaaggtgtaggtggtaaattcccgcgcatcggatacaaacgctacctttttcacattcagctcatcagccatcagcgccgcatactccgcatccagcttctggggcgccatcacgtacatggcgctaagcggctggcggttcttgagggcggcggtattacgggccgagcggcccagcgccaccagctccatcacctcctgcatctgctgttccaaatgctcgtctaccgggcagacggccttcgggaagtcgcacagatgcacgctctcgggcgcgctctcgtcaaaagaacgcaccaggttttgatacatgctctccgccataaagggcacatagggcgcggccagcttgctaaattcaaccagcacggtgtatagcgtcataaacgcggcctgtttatcctccgtcatccccttgccccagaagcgctcacggcagcgacgcacgtaccagttggaaaggtcgtctacaaatccctcgagcatgcgcgcggtctcggtgatgtggtactcctctagtcccttatccacagccgtaatcaggctggacaggcgcgagaggatccagcgatccattacattcagcttgcagtccgcaagttttaagccggtggggtcaaactggtcgatccccgcatacagggcaaagaaggcgtaggtattccacagggtacccataaagcggcgctgcgcctcgctgaccgcttcctcataaaagcggctgggcagccagggggcactgttggtaaagaagtaccagcgcaccgcatcggcgccctgcttatccagcaccgtccaggggtctaccacattgcccttgtgcttggacatcttaagcccgtctttatcgttgacgtggcccagcacgatgcagtttttgaacacctcatggtcaaacaccgccgtggaaatggccagcagcacatagaaccagccgcgggtctgatccaccgcctcggtgatgtaatccgccggatagcgctgcttaaatttatcctgattttcaaagggatagtgccactgggcaaagggcatggatcccgaatcataccagcagtcgatcacttcaggcacgcgggtcatgggcttgccacacttttcgcagcggatgtgcacccggtcgatatagggcttgtgcagctcgatatcctccggcacgtcctccacagccttttcccgcagctcagcaatcgaaccgatggccgtggtatggccgcactcacactcccaaatgggcagcggcgttccccaataccgctcacggctaaggccccagtcgatcacattctccaggaagttccccatccggccctctttaatgttttccggcatccagttgaccgagcggttgatctccatcagtcggtcgcgcaccgccgtcatcttgacaaaccagctggagcgcgcgtagtacagcagcggcgtatcgcaccgccagcagaaggggtagctgtgctcaaactccagcgcgcggaagagcttgccctcggcctttaacctttcgatgatgaccgggtccgcatctttgacgaacatgccggtaaattcctcacagccttccacaaacttaccctgggcgtccaccatctgcacaaagggcaggttattatcccggcccacgcgggcgtcgtcctcaccaaaagcaggggcggtatgcaccacgcccgtaccatcgctcaaggtgacgtagtcgtccgccactacaaaccaggcggaaccctccttcactttggcgtaggggaataggggctgatagcgcatccccttgagatcctcgcccttggcgtatacttccacctcttcggcgccttcgcccagcacagaggggaccaacgcctgggccataatcaggtactcgccctcaaattttacctttacataggtttcatgggggttgacgcacagcgccacgttgctgggcagggtccagggcgtggtcgtccaggccaggatataggtattctcttcgccttccaccttaaatttgacaaagacggaggtctcctttacatccttgtagccctgggccacctcgtggctggaaagcgccgtgccgcagcgcgggcagtagggcaccacccggtggcccttatagagcagccccttgtcccacagggtcttgagcgaccaccactccgactcgatatagttgttatcgtaggtgacgtacgggtcctccatatcggcccagtagcccacccggtcgctcatcttttcccactcggacttatatttccaaacgctctttttgcactcctcaataaagggctctacgccatattcctcgatctgcggcttgccgtccaggcccagcagcttttccacttccagctccaccggcaggccatgggtatcccagcccgccttgcgcagcacatcgtaccccttcatggtcttataccgcagcacgatatccttcatcactcgagtgatgatgtggccgatatgcggacgaccgttggccgtcggcggcccatcgtaaaaggtaaaggtctgtgcgccctcgtgcagcttcatgctctttttgaagatatcgttcttcttccaaaagtccagcacttcgccttcgcgggcattaaagttcaggtctgtcgaaacttttttcaacatcgcttcacgcttcctcctatcttaaaatcctcatcatgatccatttaacccataaaaaaacagcttccatcccctatgggacgaaaactgattcgcggtaccacccaatttggcgcttgtaaaacgcccgcctcaaaaccgcattgccaaaaccgcaatacgggcgcccctgtcacgggaggcccccgtccggaactacttgcgcaaaaagcgcgttggccccggccgctccggagtgatgtcgcatctaccctttggtggccgggctcgcaccctccccggctcgcttggcacgaaggataaacgccggtctccatcgccgcgtttaccttatgatcaatctattatagcgccttgccgaaattttgtaaagggtccccaagccgcttcacccttccatttttacgcaaaaatcggcgatcgcttcaggcgcaatcgcgctgacctggccctttaagggccccagcccctctttgccctgtttgcgcatggccttatccacctgcctgacgataaagcgctccatccgccccagcttgtcaaaatcaaacgcgccgcccaggttaacggccaccttcgtatgtcccagcaatcgctggccaaaggcttccatcatctggcgttgcaccatatcttcttctacccccatgcaggataaaaacaaccccagcggcttttgggccagcgcctcgccaaacttttcgcaaaagcccttgagcgccttttgcgccatccccatgtaaatagagccgcccaggatgtaccgatccgcctccggcaaagcggcaggcattccctcgcccaaatccagcagctgcacctccccggatagttgccgggcgatctgccgggcgcaatatgcggccgcgccatgccgggtcgtataaataatgcacgtcttcacgctttaaagccctcctgtactcgcgcttctattgtttcgagattctccgtcagccgcttcatcccttggtgcagcgcagcgatctcctcctggctcatgcccgcatacagcgtttccagcagttcgtcctccgccgcctcccgccccttaaagtaagtgtagcagtgcggcgtcatcaccatgcgcagggcgcgggcgtcgcgcccatcccggcggagctccaaaaaaccctttttctccaacagcaccgccagttttttaacattctgccgggtgcaccccatcagctccgccagcgcgcttaaggtgggcggctcacggaactgcgaggccatcgccaccaaaaaccactgcttcatcgtcacctgggggtcaaattgatcgcccgccatctgcaggcggttggccagcacgaacaagctgccaaagatgaacttcttttcgttttcctgtttcatcgtcattccccatatagtaactggttacgtattatcatagcatatgggctcttccaggtcaaatccgcttttatatccggaaaagagggacgcaacatgtgctataatagcgctgaagcacaaattacgataaataatgacgaggagtatccccaatatgcgagaaaatgaagctttgcaggcgatgaccaaggaagagctgatctccctgatcacgctctattccaaaaactggctggccatggacggcgtttggttccagtccatcgagcaaaaatatggcatggacgaggcgatggcccacgatgcgcaggcttgggagcgatttacggttatcgaggcgcgacggatcaagcagtttttaaacctgcccgaacacgcagggctggaggggctgtcccgcgccctttccttacgcttttacgccaacatcaatcaggatgagatccgtatccagggcaataccctgctttaccgcacgctggaatgccgggtacaaaacgcccgcaagcgcaaaaacatggtgctgcacccttgcaagccggtagggcagatcgagtacgcggggttcgcccgcacgatcgacgagcggatcacctgccagtgcgtcagctgttatccggactcctgcgacgatacctgcgcctgctcctggctgtttacgctgaatgaggcacaatagcgctacaaaaaaccaaatgcccggatgctaagatccgggcatttggtttatgacaaacttttaattaatcctcaaaatccgtatgcggcgtgctccactctccctttgcgccaaaggtataacactcaaaggcatcgccgctgttgatgccgaaaaagccgcccacatcgtgcatggcctcaaggtcgatcaggcagatgccctcgatccccgcctggcgctcctccagccaggtaaagatatagaggttctcgcggatctttacataatccgccggggtggcgctggtccatccgtttaacccgccgatcatggtataggcgtagtactgcggcgtcaggtaaacgtgtttgaccatcatctcattttcccgatacgtccagcggatggccttgcctaccagatcgtgggtaaagccgtgcaagggcgccttgccatcgcccacccccgcgatccgcccaaaatagaaggtatggccgacctcccgggcctcgtatccattgccgatcctcgccgcgcacagcgtgaccagccccgtgtcaaaatccagcaccagcgtacgcccctccagggtcccttccaccgcgtggtgtacaaaatagacgttttgcgcgccaacatgggcttgataaaactcgcgcccctctccgcctgcgccatcttgccaggccaaagcgtgcgcatcctcaaacctatagtgcaaggcctcccgtccctcaaagttcaacgttaccgctttccctgccagcgcgccggtatacaccggcatgtactgtccgcccgccaggccgcctgtggcgtactgctccaccgaagaggcgtttctgatgcgccgcacctcctcctggctgagcgatttccagcgccgtgcgattcgttccatctccatccccccaataaatatttagcttgctaatatcaagtttaccagaggtgaaggcctctgcgcaaggcaaactggttcagcgcatcatctcatccaaaaacgacgtgcccgcaaggccatcttctttaacgcccagggcctgcagcacggtctgggcaatatccgcaaagctggcgcgcgtacccaggtccacgccgcccttgagcgccggtccccatgtgagaagcggcgtgtactcgcgggagtgatcggtggacggcgtcgaagggtcgcagccatggtccgccgtgatcatcaaaacatcctcctgccccatcccttccatgatggcgggcagcgcctggtcaaacgcttccagtgccctggcgtagccctgcacatcgttccggtgtccataaagcatgtcaaagtccaccaggttgacaaagcaaaggccataaaacggcgtccgcgtcagctccaaggtacgagcgatcccctcggcattcccggcagtgggcagcgcgcgcgtcaccccacgcccgccaaatatatccttgatcttgcccacggcgatcacctcccgtccggcggcatgcagcaggtccagcagggtatctctaggcggcagcagcgaaaaatcgtggcggcggggcgtgcgggtaaagtgcggcgcctgtccggtaaaggggcgggcgatcacgcggcccaccgcgtaaggcccctgcaggatgtcccgagccatacggcaatagcggtaaagctcctccggcgaaaccaggctttcgtgcgcggcgatttgaaacacgctatcggccgaagtgtagacgatcagcttaccggtcgccaaatgctcctgtccatagtcggcgataacttgcgtgccggaataagggcggttgcatagcacgccccggccggtccgctgctcaaaggcgcgaatcacctcctgcggaaagccctggggaaaggtcggcatggctttgggggagatcaccccggcgatctcccaatgtccggtggtggtatccttgccgcgggagcgttcggccatccgggcatagttcccgatcggctgaggaacgctcaacccttccggggcgccctcaatattaaaaagccccaattggcgcaggttgggcgtcgaaaacccctgcgcgccggcaactgcgcgcagggtattgctccccgcgtctccaaactccgctgcatccggcagcgcgccgatccccaaactatctaaaacaattagaaacacgcgtttagccatgttgcgctttcctccagtccatcatcttacgtttattctatcccccctgccgccaaaataaaagggggagagactttattcgtctctccccgcgctttgtacttttactgtttcctccaattcaaagactcttgttacgcttctactgctttcaaagcgtctaagtcgcctctactttggatgtatgcgattgtcatcacttttccctgtgatgttctcacggagtccccaaagctttgcccttggccctttcttacgatatagccggctctttcctttctccttcgcccctctcgccggggcgccagcctagcggccgtctgtttactctttttaacgctgccggtatataagccattgtgggttctaccttacgggcctattataagcggttacaaactctcccgcccgcaggatagccgtgttcacctatcccgcttttgcgctctgcccgctctagcttttttaaggccgtcccggactcacgctcgctttgcgtttagcaggccggaatacgattccgcccagctaatcgctgccactgctgatcttcgtacaacggaatcgccccctttcaagaatttgcggattcttacacgccatccgcctcttattcttatttcctttccctttcgtcagtttcattttagcactccgaacaaaattcgtcaagtatttgtttaaatattttcatttatcatttttaatcatttgcctgccacattcagttcgcccagccataccgttgggctaccaaaacagctgccgccaggtaggtcaaaatacaggtcatcccccaccttgacgatctcccttagcacctggtaaaaattacccgagagggtcacctgctccaccggctgggcccgctggccattttcaagcaaaaaaccccgggcggagagggaaaaatccccgctgaccgcgttggccccggcgtgcaggccctccagcgccgtaacgtagaaggcttttttctgggccgccagcgccgtctccgtatgcaccggcccaggggccagataaaatatcgtaggggccacgccgatccgcccggcatagcccgcccggctggcgttacccgtactctcgatcccggccttggacgccgtccttcggttgtgcagcagggtctgcagcacgccttcgcgtatcaccagcttttccctgcccggcacgccctcatcgtcaaagggggccgcgcccagcacctgcggcatcagcgggttatcgatcaggctgaccgcaggggaagccaccgcttccccctcctttcccgccagaagcgagaggcccttttgcgccgcatccgcactaaagcagcccgcaaaggtcgccagaaagtcgcacatgacctgtggtttaaagatcacttcataccggccggtgcgcagcggccccgcccccagcgcatccactgcgtcctttaccgcttcctgcgccaggccgtccgcatccagctgcgcccactggtccgcgccccggtaggcaaatccgcttttgcgttcctgcccctgggccgctacaggctcgagcatagccatcgtcaaccccgaggcaaactgtacgtccagccccagggagttgaccaggcgcacgctgccgcggccggtctgcactttgcaatgctgcacgctttgcacccgttcatccagcgccttggccttgcgctcaaggctttgggccagctcgatcttctggctagcagtgatcgcctgcagcccttggccctgctctggccaatgggcataggccgccccgcccggctggaaggtctcctctccgtccgcctgtttgagctgtgcgctctccatcgcgtgtgtcaccagttcttcggcggcgcgctcatccagcgcctctgtaaagctggtgcccatattcccccgccatttggcgcgaaaacccaccccggcggttttggagatatcggtggattccacctccccttcaaacacggttaccgcaaatttttccccatcggtataatatagttcgaattcttccagccccgccgccctggcctgctgaaagacccggtctttaaaagcgtcaaacgtcatcttcaatccctcctatctgccgcccacggtgatggacgaaacccggatcatcggctggcccacgttggtgggtacgctgcccgatagcgagccgcacatgccctggcccagggccagcgcgccgcccaccttatcgatcttcatcagcacctccgcgcccttgccgattagcgtggcgccccgcacggcatcctgtatcctgccgtttttgacccagtatccctcctgcacggcgaagttgaagtcccccgtcaccgggttgactgaaccgccgcccatctttttagcgtacaggcctttatcgatcgaggcgataatctcctcatccgtgctctcccccggggcgataaaggtattggacatgcgcgaagtcggcgcgaaccggtaggattggcgccgcccacagcctgtgggctccatccccatgcgccggccgcccagccggtccactagataatttttaaggataccgttttcgatcagcaccacccgctgggttgggttgccctcgtcgtccatagctgccgagccccactctcccggcagggtgccgtcgtcaatggcggtaacacagggtgcggcgataggtttgccccgcatgccgcaaaacacggacgcgcccttggccacgctggtggcttccagtgagtggccgcaggcttcgtgaaagatcaccccgccaaagccggaatcgatcgcaacggggaagcggcccgccgggcactcccgcgcgtgcagcatggtaacggctgtgcgcgctgccgtttgcgccgccatagccggatcgatccgcgtgcgaaacgcctcaaagcccatagccgcccccgggccttcaaaccccgtctggttctgctgcccatccgaggccaccgcctgcactgccaggcgcacccgcacccgccggtcctgggcaaacactcctgcggtattgcatacccaaatccgctggtccacatcgctatagccgcaggatacctgcacgatctcgggcgaaatatcccgtgccgcccggtccgcttcccgcacgagtgcggccttttccgcccccgctacccttccgggcagcagctgcgcccaaattgcccggccatctcccttaacctggaaggcgatctcctccgggctccccgcctgggcgtccagcgctgcggctgcctgttccgcagcccgggcaagcccagagcggctcacatcattggtataggcataggctgccgtaacgccccgcatcacccgcacgcccgcgccaaatatacggccgttctgcgcgttttccatcttcccgccgaccatgctcaacgccgtgctctccgtatcctccataaacacttcggcaaaatctgctccgcccttttgcgcgatctgcagcgcacccagggccgcatcccgatccagcattttccttcctccttgtggtttaatctcttttaaggctacccggttcgctgaacctgcaaaccgtttttccattcattccctatttttatcataccactttctccctctcttgtcccctgccctagcggtatgctatgataaaggcggcgcccggcgcgccgcaatgattgatgctgaagcgaggcaaatatgttgaaaaaaacgatttcactgctattggttttggggctgcttaccgccctgcccgggtgtagccttttagggcagggcgatgcgcccgccgccacctcgggggcggatctgctagtcgacgacccggaggcggacttctcctcggatacccgcaaagcccaggcctttaccgagcctgcgggttatgccaccctgaatgccgatgaaaaaaagctgtacgaccggctgatgtttgagattcaggccttagagccggtgaccaacctgaacggtgacgcccagcaggacgaggtcaataaggtctttgagtatattctctacgaccatccggagtttttctacctgtatcccaagctcaacctgcagaccaacggcacgtctgtacagaagatcacttatacctattatatgaccgccgatgaggtggcccaggcccaggacgtgatcgaccagatggtgcgccccattatcgacgagctgccctccatcgggagcgatgccgagcagctgcgctacatccacgataatgtgatcggcatcgcccgttattatacggattatgacgtaaacaagccttatgaccccaacggggccatgaaggataacgaggtctaccgggattgttccaacatctatggcgcgctggtgcggggcgaagcagtctgttccggatacgcgcgcgcctttcagtacatcgccaacctggccggcttttactgcatccgggtgatcgggtatgccgataacgtgggccacgaatggaacctggtaaagatggacgaccagatctattatatcgacccgacctatgacgaccccgggtatgctgacgatggcggcggcacctccgccggtacgccgcgggagaactattttatgatcagtgaagataccctgttggaggatcataccctgccgtataaaaccaaatatggttatcccatcccaggcaacaccaacggctaaacgcaaaggaggcaacaccctatgaaagcagcagaattgttcgatcttaagggcaagcgtgccatcattaccggcgcatcccgcggtattggccgggcggtggcggaaagttaccacgaattgggtgcgtcggttgccctgctggcccgctccagcgcggtattggatgcggcgcaggcattgcatacgccctgtgcgcccgcctatggctttcaggtggacctacaggatcgcgctgcgcgcgaacaggtctttgaagaggctgtagccgcgctgggcggcgtcgatatcctcatcaacaatgccgggatgtgtgaagatttcgctgcggctgattaccctctcgacgcctgggaccgtatcttggagctcaacctgacaagcgccctgcacctttcccagttggcggcaaagcggatgatccctcagcgcagcggtaagatcatcaacctgtgctccctgcacagctacctgggcaagcgccagatcgaggggtacgccgcctccaagggcgcgctcaagctgctcacccaatccctggcgcacgaatgggcgccctatgggatctgtgtcaatggcgtagcccccggctttatcgagaccgagatcagctccggactgcgccaggacccggtggagtatcccaaaactctggatcgccttcccatgggccgctggggcacgccagaagagctgcgtggcgcctttatctttctgggcagcgccgcctcagactatgtgaccgggcatattctggccgtagatggcgggattctggcggtgtagcgcgtatatgctccctctctaaccgcaaaaaagcacaggctaaaagcctgtgcttttctttttcccaaccaaaggatgttttatagtcaaacctatcttcgtcttcgccattttaaaagcaaggcggagttgacaatgaccagcaccgacccggcgttatgcaccaacgcgcccaccacggggttcagcacccccgtaatagccaacgcaatagctagaaaattaagcgccatggaaaatgccaggttgcatttaatggtgaccatcattcgcttggacagcgccagcagatggggcaattcccttatttcgtcatccaccagcgcgatgtccgccgcgtcaacggcgatatcactgcctatcccacccatagcaatgcccacatccgcctttttcagcgccggcgcgtcgttaatgccatcgccgatcatacaaacgggctggccctgcgcctgactatgcgcgatccagttgagcttatcctccggcaggcagccggcgtgcacttgtgcaatacccgcctgcgcggcgatcgccccggccgcacgagcatggtcgcccgtgagcagcacgggcatgatccccagcctggagatctgcccgatcatttccggactatccgcccgaagcgtatcggccagggccagaaaacctgccgcctcgccgtctaccgctacatagatcacggtacagccttcctccaggtaatgcctcgcctctttttctgccgccgagagaatgataccgttgtcctgcaagagtgcagcattgcccgctaataccatccgcgcgccaacctttgcagctactccgcggccggggatcatctgaaagcgctctggcgttagtagcgcacctttgccctggctttgatacccctgtaccaccgccttgcccagcggatgttctgagcgccgctctgccgaggcagccagcgcatacagctccgcttcttccaagcggggcgtcatacattttaccgccgtcacctgtgccttcccataggtcagcgttccagtcttatcgaatgcgacctgtgtaacgctggccagccgctccagtgcgtctccctcacgcaccaggaagccgtgccgggtcgcattgccaatggccgccatgatcgcagtcggcgttgccagcaccagcgcgcaagggcaaaacaccaccaggatcgttaccgcccggatgatctgtcctgtaaagatccaggtcagcgccgccgcgcttagcgcgatgacgacgatccacgtagcccagcggtccgctagtcctacgattttggccttgccggcatccgctgactgtaccaggcgaatcatgcgttggatagaactatcctcgcccaccctggtcgcccgcatatcaaaagagccaaattgattgacggtgccgctggcgacctcatcgcctgccgctttatccaccggtaaggattcccccgtcatcatcgcctgattaatcgaggtctgccccgtcaaaatcacgccgtctaccggtatgctctccccgggcagtacgcgcaagatatcccctacctttacctcctctgcagggatcatgcgttcgccctcctccataagcaccctggccgactgggggcttagttttaccagccgctcgataccggctcgcgccctcgccaccgtcatctcttccagcagcgcgcctagctgcatgataaaggccacctctcccgccgcaaaattttcaccgataatgacagaggcgatcaacgcgatagagaccagcacatccgccctaatatcaaaagccgtcaccaagccgatcaatgcctctaaaacaatcggcacgccgcataatacaatcgcaatccacgccgcgtcaaagggcaacgggagcaggtcaaatatgctgatcagcagcgctattcccgatagagcaaggcatacgatgtcctttttaaatccgccccatgccaaaagtctttccagcctttccatatacgacctccctttatacccataggggtatatgcacaatatacctataggggtatgggattgtcaaggggcaaaaaacaaccagcggccggaaaagcagccgctggtgtcaatcgtaaaggctaacccatatttgaaaaccgctctacagccttggtaaagctttcaatggtcttatccgcgtcgccatgttcgatcccatcgcgcacacaatgctgaatgtgcccttccagcaccacctgacccaccctgtgtagcgctgatttggccgcgttgatctgcgaaagcacgtcttcacaaggcacatcctgatccaccatccggtcgatcgcctggacctggccgatgatctttttcagcctgcggtgcaggttgtccgcatccatacactgtctcatctcacacctccaaataccgctaggggtatagggttattgtacggaggggcggcgcgccttgtcaagcgtactgtcgctttagataaaatgtttattccctcattacgccccatatcgctccagatacggtttaaatccctcctccggcgtcatcccctcggaagggtaatactcaagcccaacaaatccagcatacccggcctgccgtatcgcgtcgagcaccgcggtataatttagttcaccgccgtccaactcatgccttccgggtacgcctgccgcgtggaagtggccgatgcgccccagcatgcgcccgatgcgagaaagcacattgccctccatgatctgctggtggtaaatatcatacagcattttgatgtggggctgatccacctcgtttagaatatcatacgcctcgtctgaggaccacaggtaagccttaggatgatctacagcggtattgagcggctccagcactaaggtcttgcccgcgtctgccaggataggggcggcggccttgagcgcggaaacgatgttgtcgtgctgatagccccgcgaaagcccgcaggccgcatcccccggcccggcgatcagggtcttacagcccacccggtcggccacggcgatcgcctcgcgtatgccgccggcaaaggccgcgctatcctgcggcgtcaccattttagagcagcccgcactcatggcggcgatctgtatgccggtctgcgccagcgcccggcccaccgcctccatatcctgttcccgccagctccacatgtcgatcgctttgaccccggccaccgcacaggcatagatgctctccacaaagtcacgccctgcatacacggaattgacgcaaatggaaatcctcaacttcatatcccccttcttaaaaatgcggatgcgaaaagggtacggtccatcataaagtcgatatgtaagcttctgccgggtattttttcgcagccgcttttgtttattatctgtggtttggtcgcccgttctttcgtaaagatgtgtgcacaatctgattttttatattgtacgcctgggcgggcgcgcatagcagtagtatcgaaaaaagggcgcgaaaattcgcgccctcacatcagtccttcgtccaatggcagtccagaaagtccataaaaaatgcccaatcatggggcgtcatgtcgtgctcgcccgcgcgcaggtggtagcccaccgcgtttttgtggcagggctgatcaatacccggtatctgcctttgctccagccctctaaggccgtatagcgcataggcggcgcccgcctcgtaagcaccccggtactctgcctccgggtcggcccagctatcctcgctggcgctggaaacatacagcaaccgcggggcgatcagcgagagcagcatatgctgatcaaagggcatctcatcctcgcgctcattataggccttataattcttacagaaccagtaagggaaggtggtgttgatctccttgacgtgctcgccctgtttaccccgtgtgatggccgcgcctgtacagccggattcgttggaatctacgcaggcaaagcgggtatcgttggccgcgcaccacagcgccgccttcccgccgcgggaaaggcccgccacggcaatgcgcgctgggtctacctcaggcagggtctgcaggtaatccatcacccggctggcggcaaaggcccaggcagcaatagcgccccaggcgtttgccgggcggtccttctcttccccctcaaagcttttgaggatgccctcaaagtacccgtcctcccggtccagcgctatatcctgggtgtaaaagcccgccgtagcataaccccgggccaatatctcctccaccggccaggagggaatttcatgcaaatgctccacgtccatcggccgccccagcacgcggatgcagatcatcagcgccagcggcagcggcctggctaccccatggggaagaaataccacaaagcggaagcggaaatcctcccgcgccgtatgcagtgtcgcctctaccatgcgccgggtggcgatccctttaaaatcttcctgtccgatctgttcaaatctgatcttgtattggtccggcccgggtgcaaagccgtacacctggtcgctgagcagggtcaaaatttcctgcctgcgcccctcctcccacgcctttcggaaaggttcgccctcaaagagcggcggcagtgctgtttcgtacatgccttttcccccttttcgcggtcgctcccgcgtttatctatgcccttattatagcaggaatttggggagaataaagcaaaagcgtccaaaaattgggcacttttgcacatttttatgtgtctaccgttctttcgtcagttcggccaagatctcccgcgcgctgggcgggcagcccatcacgcaccgctcgtatcctttacagcacgcgccgatgccgatgcccgctcccgctttgccccggttgccctggccaatgtgcaccttacccttgagcctgcccagctggcccgcctcatccatgcgctgcaaggcgtggatcaagctgccatagcaggccgagcaggcctgggacgcctctacatgggccgctaggtgggctacccgccgggttgcctgcggggttatcgctccgccctcggcccgattcagctcgatcacggtatctccgccaatctgcgtgttgccagcgcccagcctttccgcgatgccgatataaggcacctcgcttaattccaggccgatcagctcggccgcataggcgtccatcttgaccggatcccaggccagcatggcgcggttcatctgcaccggcgtcccgccctcttcaaaggtcaggtcgccgcacagtccgtctactaccgtcagctgcgggggcagggccttagccagtgcaccgatgggcccgtgcagccccgcctggtggaagcgccgcttctcccggtctgggatgcagcccttcatattcttcagcgcgcaggttagcgccgtttggcaatgggcttttaacaccggcatgttaatgagaaaatccgcctcagctgcccgccggcagagcgtcagcgtctcgccgcccaccttgcgggtaacggtcgcgtcccgctttaggtcgtataatcccaggccgtatttttgcgctaacgttcgataaccgcagatgtcaaaagcccgcccggtatcgtcccctacccaggatccttcaatgatatcgatattcttaaacccgtattccagtagatattccacgatcccagcggctaattccggcgaagtggtcgccccggtcgacgagggcttggccactaccaggttgggctttagggcaatgtgcatgccgcttttaagctgtgcctgtacatccgccgcagccatcagctccccggccatccgctttaaatcgcttccataggtcaccagtatctgatccttccgcatcaaaccaaccccctttgaggtctattataacggcgtaccggcgcccttggcaacttcccttttacccgcgcctggtttatactatagaaagaagtaccattttggatcataacggaggaagcgaagctcatggacgacctctttaccagcaatacccagcaaagtgcgccgttggccgaccggatgcgcccccgtacgctggacgaatttatcggccagcagcacatcatcggccccgggcggctattgcgtcgcgctatcgaagcggaccgactgaccagtagcatctttttcggccctccgggctgcggtaagactacgctggcctccatcatcgccaacaataccaatggcgcttttgtcaagttgaacgccgtaacctccggcgtagcggatgtccgcgaggtgatcaaggcggcggaaaaccgcctgaagctatacggcaagcgcacttacctgctgctggatgagtgccaccgctggaacaaggcgcagagcgattccatcttgcccgcggtagaaaagggcatcattctgtttatcggctctaccaccgagaaccccgccattgccatgacgccggctatcgtcagccggtgccgcatcttccagtttcaggcgttgggggaggatgatatcctgctggccatgcgccgggcgctggaagaccaggagcggggctttgggatgatggacgtgcagatggacgaggaggccttccaacatattgccgatgtggccaacggcgatgtgcgcagcgccctaaacgcgctggagctagcggtactcaccacccggccggatgcagacggcgttatccatatcgacctaaagacggccgaagaatccatccagtgccgggtgctcaacatcgacgaatcgcaatattacgacatgctcagtgccttttgcaaatccctgcgcggctcggattctaccgctgccttggcttggtgcgccaggttgctgcacgcagggatcgatccgcgcatcatcgcccggcggatgatcgcccatgccagcgaagacgtggggatggccaatccccaggccatggtgcaggccgtggcggcggcgcaggcgttggagttcaacgggctgcccgaggcccagctcaacctggcccaggccatcatctttatctgcgaaagccccaagtccaactccgtggtgatggccatcgacgcggccaacgccgatgtggagggcacgctgcaccagcccgtgcccgtacacctacgggatacctcctataagggcgcagataagctgggttctggtaagggttataagtatccgcacgattatcccggccattgggtggcccagcaataccggcccgaatccgtcaaggacaagacctattatcgcccctctactcagggcagcgaggcgcgcatccgcgaaaactggctgcgccgcggttgggatccggacggggaataacgccgccacgccgcaaaacccaaacattccgcaattttatggggaattgtgcccctttagggccggagattgggggctttgcggcttgccaaattgtggcgggggcagtataataaagtttgtatcgttattaaattaacaatgtaaacgccggttccagccggcgtcccgttttacggggaataaataaggagggcacatccgaaatggaaaatcgcgtgtacaatttctctgcaggtccgtccatgttgccgcttagcgtgttgcaaaaagcgcaggccgagttgctcaactgtaacgggtccggttcgtccgtcatggaaatgagccatcgctccgcgccctatgaggccatcatcgctgaggcggaaagcctgctgcgcgagctgatgcagattccggataactacaaagttctattcatccagggcggcgccacccagcagttttcgatggtgcccatgaacctgaaggtcaacggcaaggccgattacatcgtatcgggtaactttgccaataatgccgccaaagaagctgccaagtttttggacgtgaacatcgcggccaactctaagccgcaaaattatgccgagatcccggcctttgacagcaaggatttcgatcctgaggcggactacgtgcacatcaccagcaacaataccatctttggcacccgttacaccaaatggccggaaacgggcaacgtgccgctggtagcggatatgtcctccaacattctttctgagcccatggacgtcagccgctttgggctgatttatgccggtgcgcagaagaacatcggcatcgcgggcctggccgtggtcatcatccgtgaagacctgctttcgcgcagctgcgataagctcccggtgctgatgaactacaacacctatgccaataacgattcgatgtataataccccgccttgctttgccatttatatggctaagctggtgtttgagtggatcaaagagcagggcggcgtggcggccgtgtacgaaaacaatgtgaaaaaggccgctatcctctacgactatctggatagttcctccttctttaaggctacggccaagaaagaggatcgttccctgatgaacattccctttgtcactccctcaaaggagctggacgcccagttcgttaaagaggcggcgcagcagggctttgtcaacattaaggggcaccgtttggtgggcggcatgcgcgccagcatctacaacgccatgcccaacgagggcatcgaaaagctggtcgccttcatgcgcgattttgaggcccgcaacaagtagaacggagatagagaaggaggttaccctatgtttaagatcggtacgctaaacgccattagcgatagcatttatgaccacctccctgccgaccagtttgaagtgggcaaagaggtggaaggcgcccagggtatcctggtgcgcagcgcttccatgcacgaaatggattttgacgagaacctgctggccattgcccgggcgggcgcaggcgtcaacaatatcccgctggataaggcttcggaaaagggcattgtggtattcaacaccccgggtgccaacgccaatgccgtaaaggagctggtgctggcgggcctgctgctctcctcccgtaagatcgcccagggcatcgaatgggcgcgcacccttaaagggcagggcggccaggtgggcaagctggtggaaaagggcaagagccagtttgtcggcccggagctcaagggcaaaaagttgggcgtcgtgggcctgggcgctatcggcgtcatggtagccaacgctgccaccgcctttggcatggatgtgtacgggtatgacccctacatctcggtcaaatcggcctggggcgtttcccgtgccgtgcactatgttaagtccatcgaagccatggttgaggagtgcgattatatcaccatccacgtgcctttggccgatgcgacccgcggcatgttcaatgcggatctgctgggccgcgccaaagacggcctgcgccttttgaacttcgcccgcggcgagctggtggatacgccggcggtgctggcagcgcttcaaagcggcaagctggcctgctatgtaacggatttccccaacgacgagctgcttaatgtggataacatgatctgcatcccccatctgggcgcttccacgccggaatcggaggagaactgcgcgcacatggctgccgagcagattgccgattatctgcaaaacggcaatatcgtcaactctgtcaacttcccgcatttggagatgccccgcgtagagggcaccttccgcatcggcgtggtgcataagaacgtctctaagatgatcggcgccatcaccggcaccattgggcagtacaacatcaatatcgataacatgctcaacaagtcccgcggggaactcgcctataccttgattgagagcaatcatgcggcgggtgaggatgtgctgaccgccctgaaagggatcgaaggcgtcatccgcgtgttgacgttctaaatcatgatacaaaaaggccacaggaatagcccctgtggccttttctcataactttacaacataaggaggatgcgaaaatgatccgtcatatcgttgcctgggcgcaccagaagggctttagcgccgaagagaaccagcacaacgcccaaaaggtaaaagagactttggaagccctcaagggccaggtagagggcatcgtggagctagaggtgttgatcgatccgctcgataccagcgacaagtccgtcatgctgatcagcctgtttgagagccaggcagctttagccgcctatcaggtccatcccgcacacgtaaaggctgccggttatgtcaaatccgtgatgcaggagcgcatttgtctggattttgacttaggctaaggtttatcgcaggaacgccgaaaagtgacaggatttgaacctgtcacttttttattgactgcatgccagcttagccgttatgataaaagcatcacatgtttatcaaaataccaatataacgttctttcattcatttattaacaaaagaaaatcttcggaggggtagtatgaagaaataccttgctttgcttttatttattatactgcttattccaggctgtgcgtccgatctgggtaaataccaaccggcggctaccgctacgcctgcgccggtggccacacctgcacctgcagcgtccgctccctctcctcaggctactaccacacccacacctccggccatagcggaggggcttgttcgcaccgaaatggggtttgggctatactccattggtctgccagaagagctggggccttatacgtataacggaactttgatgatgtcgcaatgctacgcctcgccggccgacccgatcttctctgtatacaccaatttcgccctgatcgatgattatcaactgacggccggatccaaccatagctacagcagccaaatggttctaatggtttctcctacttttgatgaacagcggtttgagtcaaaaagcgcaacgctctcccagggcggccatgcgacatactccttttcacagatggatgaatatgccttcctcaacctggagatcatgactgacgagataggctacaattttactattgttttacccgccagctattacggtaaactggagaccattgttcaaagcttccgggtaaatgaagcgcgcttaagcgactatctcaagagaaagccgattcgcggagaagatggacgctggacggcctgggatcacagtcttgccatcgaagtcccggaagattgggatatctgtcttcccgaatttatgcggaattaccccatagggctgcaatggaataacgccatgcagttgattcagctttggtactacgaggattacgatacgatgctggaggaggagtttgccgcctttgaggaaactgccagagaatttgccatcggggcaggatatgcagatgacgaatcctgctgggaagacccgattactatgccccttgacaagctgggtacagaggcggtctgcatcactcgccgctctaacaatgacctgccgcacgtcacctatatcagctttatttatgagcatcgtttgttttacggctcctttatgtccatgcccactgtatcacaggaacgccagcaacagctgcaagatattatggccaccttacagcctgcggatattggcggcgaaggcgtcctttaacggttccaaggcattaatataaagcaaaaggccgggcaaaatgcccggcctttttgatctgctttttcagccctattttacaggccgaagttacgcaggttatcgtagctgatcttgatcgcctcaaacggcggacgatacacgcagcgatcctgctcggtcacaaaccattccacgccgatgtcgcggcaggcctgaatgatgtccagccagttcaggctgccctcgcccacttcggcatacaggcgatgggtgcactccaggaaggaggtatccgaataacggtcgatcaggtaatccttaaagtggacgaccttcatccggcccttggccttgtagatccagctgaccacgtgcccgccgccggactgtacccagtgggtatccagctggaagaagacataccggggatcggtattctccagcaggatatccatgccggtcacaccatcatatttgcggaactccagcgcatggttgtggaagtgcagatacagcccttcggccgccagcttctcgcccaccacattcaagcgtttggcaaagtccaggaagccctctttcccgttcgtgcgcacccattcaggggatgcaccaatgacgatatacttggtatcgagcgccttagcgtcggcgatcacctggtccaggtgctcttccagcttctcaaagggggcattcatcgccgtgcaaacgatgcctacctcatccatgatctccttgatctctttggcacagggcgcgttttccttcacgcccacgcccagctgcacgccatcatacccaatatccgcaacgcgcttaaaggcgttcatgtaatcatttttcgtatccagataatcgcggaaggcaatcgtctgaacaccgattaaagctttaggcatttgtttcatcctccttaattcttaagcctgcgccatggcgcggtccagattctcaaagctgatgcgcgcgctctccaacggatggcggcgcgtttcatcctgctcgaccacatagctctttacgccgatctcctcgcctacgcggattaccttgacccaatcgatattgccctcgcccacctcggcaaagagcttaggggccagccccaggtctgtaatgctcgcatccggatcaatcatataatccttgcagtgcagaataggcagccgccccttgacctggcgcatccaccaatagatatccccgccgccggactggatccagtgggtatccagctggaagcccagttcaggcacgctgtcgaacacgatcatatcgataccgcgcaccccatcggcaaaacgccggaactcctgggcgtggttgtggtacaacagggtctgcccattatccttcagcttcttagccagggtgttcaggcccttaacaaaggtacggtatccctcctgcgaggtacggtagcaaggcggcagcgacccgatgacgatgtactcgttatcccagatcttctgctcctctagcgtctgcttaaagccatcctcgtccatcaacgtctcaaacggcacgttggtgtgcgcggtcttcatgcccaagccgtggatcagatccgcaacttcctgcacattgatgtccgcaggcaaacgcccacgccccgccgagaccatcccgtagcccattttggctacctcgctaaaggcatctttcatgccctgcgaggtggtcaaaaggtcgcggatgccgatcaactggaggccgattctctcattcattcccatttctcctcctgaagtctatcgattagatgccccagctcttaatgttgttaatgctggtctgcaggccattgaagggattctgatgcgtgaagtcctgctcaatcatcaccagctcacagccagcctctttggtggcctccacgatggccggccagttcaggttgccgcagccgatctccatgaagcgtttgtacacgccgccaatctcggtaaccttcttcatctccatgtagtcctgctcctgaacgttggcaatgccgtagtccttataatgcacaacggggatacggcctttgcactttttgatccaggccgccgggtccgcgccgcccgccgctacccagtgggtatccagcatcaggtccatctcggtctcctcaaagaggatatccatgccgcgcttgccgctgtcaaaattgacgaactccaccgcgtggttgtgataggtcaactccaagccctgggccctgaagaacttcaccttttcctgcatggccttggcaaaggctttgtaaccttcctcgccgcgcatacggaagtggatcggaatggtggctacgctgacaaaacgggtgcccaggaatttagccttgtcggcgatcgcctgcggatcagccatgatatcgtcatactggccgccggcggaaatgttgtgcaggcccagctcatccaggccctttttgtactcttccaggctcaggaacttgggcacgccgccctggatgtactccacgcccatctgggccagcttctcgtgcgcctctttgtagtctacgggattctgcaggtagtgacggatggtatactcaacaacaccaattttagccatgattcatttaccccctaatattcattaaaaatttaatggatgtccagcacatcgttcatgtactttttgctcttggccagcgcctcgatgggacagccgcgccagaaatcctgctcgatgacgaaatactgtacaccgatcttgcggcagttctctacgatgggcttccagttgatattgccatagccgatctcggcaaagatcttgtacaccccgccgatatcctggatgtgctggggttccggattcgggtcgatggcataatccttaaagtggatgatatccatgcgcccttccagcttgagcacccactcggccggatccgcacccgcggcagaagcccagtgcgtatccatgataaagccgaagttttccgggtcggtattgtccagcaaaatctgcatgccgtttttcccgcccggaaaattggcaaactccatcgcgtggttgtgatagatcagcttcagcccattgtcccgcagctttttaccgacctcgttcatctctttggcataggcctcatacccttgggcgctgacgcggtttttcagcggcagcgtaggcgtattgatgtgctgcacgccaaaggccttggcgtcggcgatcaccttgtccaggttgctcatcaaatcatcgtacccggcgctgccggtgatatttttaaacccatactcggccagcaggtccaccatctcggggatggaatcgcagcaagcggccttgccgccctgccaaatctcaaagcccagctcctgcaggcgttttaagcaatccctaaagctggttttattggtcataaaatcgcgcactgtgtaactgcaaacaccgatctgagatgccatagaaaataccctccttcaatagcgatggatcgcgttgtttatttttcttgccccttaatttgcgtttttgcctacttcagtcccacgttctgcaggcccttgatgctgatagccaggctgtcgaacgggttgcggcgggagaagtcctgctcaataacgaaccacttaactccgatggacagcgccgtatccacgatctgctgccagggcaggttgccctcgccgatctcggcaaagagtttaggcgcctggccaaggtctgtaatgctgggatccggatcgatcatataatccttgcagtgcagggtatgcatacggcctttgcactttttgatccacttaagcacatcgtccccgccagaatgcacccagtgggtatccagcatgaacttggtatagagcggatcaaagccctcaaagataatgtcgatgccccgcttgccagacttgaaacggcggaactcctgcgcatggttgtgatacatcaggtctattccattgtccgcaaactttttggccagcatgttgaactctttgacaaaggcgtagtagccttcttccgtatcccggtattcaactgggatcgcgccgatcatcgtcgccgtgcagccgaagtagtggatctcctctaccaacgcgtcgaagtcgcctcgcatacggtctaagttgccgccataagagcagagcatcagcccgttttcatcgagcagatctttaaactcctcgttcgtaaagaacgcgggtttggcgccctggatcgctttgaagccgatatttttcatcttcttcatcgattccgcataatcttcgcggttggtcaaataatcgcgaatggtatacgtaatcgcagcgatctgggtaggttgcgttgccgtagtcgccatgttccattcctcccgtagtcatatttacgcttcacgcgagcgctaaaacgcaccctgcgtgtagagtacaataatgaaattagtaaactttcctgccttttagggcgggaaaagacggacggcaaccgtccgcttttcttattgagaagtgacggcgtcacctctctatcaatatatctctcaacaaccgcccatcgcttagcggaaataatccacgccggctttgaacagtttttggtccttctcgccgggcacattgcgcaccacattagcgccgatgcgctcggaatggcccatcttgcccatcacccgtccatccgggcttaagattccctcgatggccgccatagccccgttggggttaaaagcgctgtccatagtggggttgcccgccagatccacgtattgggtcgccacctggccgttttcaaacagctggcggatcaggccctccggcccaacgaaacgcccctcgccgtgggaaaccgggatggcgtggatatcgcccgcctctacgtaggtcagccagggcgattttaccgaggcgatgcgggtgcgcaccatgcaactggcgtgccggccgatggtgttataggtcagcgtcgggcaatctgcgtcgatctcccggatctcgccatagggcaacagacccaacttcatcaacgcctggaacccgttgcagatacccaaggccaatccatcccgcttttgcagcaattccattaccgcgtccttcacgcgcgggttgcgcagcgtggtcgcgataaatttgccggaaccatccggctcgtcgccgccggagaaaccgcccggcagcatcaatatctgcgcccccctgatcgccttttccagtgtcgcgatggagtcctcgatcatcgcgggggtcaggttcttcagcacgataatatcggccaccgcgcccgccttgcggaaggcgcgcgccgtatcttcctcgcagttagtacccggaaaagccgggatcaccacgcggggctgcgccttgccggacgcatgcaggatagccggccggcccgtgtaaagcttatccaccatcacatctgtcagcggcgcggcatcggtcggatatacccgctccagcgtctgcgtccaggccgcgatgcagtcctcaagcgccagggtctgaccctccagccggatctcctgcgcgtcgatcgtctgccccagcatgcgccaaccaagccccttcagcgcctgttccacatccgcccccggcgcaaaggccagtaccacgctaccataataaggcataaacagcgccttgtcatccacaccgtccgccagttcaaagccaatatgattgccaaaggccatcttgctgaccgtggcggccgcaccgccctggcccaccgtagcggcggcctgcacctggccctggcgcaccagttggcccacccgctccaggttggccttaaacgcctcaaagtcgatcatgccgtccgcccccggcaaaaccggcagcagggcgaccgcgccgcccgcctgcttaaactcgggcgagccgatctgggaagccttggcaatccccaccgcgatggagaccaaggtaggcggtaccgaaacatcgttaaacgtcccgctcatggagtccttgccgccgatgcccggggtgcccatgcgcttttgcgcctcatacgcgcccagcagcgccgccatgggtttgccccaacccgtgggatcctcggtcatgcgctggaagtactcctgcatggtcagccgggccttggcgtaatcgccgcccgcgcaggcaatcttggccaacgaatggatcaccgcatacatggcgccatgatagggactgtaagaggacagatccggatcgtagccatgggccatcagcgtggcagtatcggtctccccctccaaaagagggatcttcgccgccatggcctcgttgggcgtgagctgatacttgccgccaaagggcatcaacaccgtgcccgcgccgattgaggcgtcaaaccgctcggccagccccttctggctacacacattcaatccggcaaggttttccttccaggccgcagcccggtccccgccattattcttcaaaacctcgatctcccgatcgaagaaaggtaccccacagggcacagtcaccgtcgcgtccgcctgctggggcgcgccgttggtatccagaaaatcgcggctgatgtctacgatacaatcctcattccagaacatccgtagacgccgtcccggggtgaccgtggctaccagggtcgcctctaggttctcttcctgtgcgtagtctaaaaatttctgcacgtcccccgcgtccagcaccacagccatccgctcctgagattcggaaatggccagctccgtaccgtccaggccctcgtattttttcggcaccgcgtccagattaatatccaaactctcggccagctcgccgatggccacgcatacgccgcccgcgccaaagtcgttacaccgcttgatcagccggctgacctctttcttgcggaaaagccgctgaatttttcgctcggtcaggggattgcccttttgcacctctgcgccgcaggtggtcaggctctcctcagtgtgcgccttggaagagccggtggcgccgccgcagccatcccgccccgtgcgtccgcccagcagcacgatctgatcgcccggcaccggacgctcgcgcaccacgttctcccgaggcgctgcgccgatcaccgcacccagctccatgtgcttggccacgtaaccggggtgatagatctcctccaccttgccggtagccaggccgatctgattaccatagctggaatagccctgtgccgccgtgcgcaccaacacccgctggggcagcttgcccggcatggtatccttcaggctctggcgagggtccgccgcaccggtaatgcgcatagcctgatagacatacgaacggccgctgagcggatcgcggatcgccccgcccaggcaggtagccgcgccgccgaaaggctcgatctcggtggggtggttatgggtctcgtttttaaacatcaccaggtactcgaccgtttccccgtccacatccacgggcaccacgatcgagcaggcgttgatctcttcagactcgtccaggtcatccagcaggccctggcggcgcagctccttagcggcgatggtcgccatatccatcagcgtcaccggcttatcggtgcgcccggcatagagcacgttgcgcgccgcgcagtactccgcataggatctttcgatgggcgccgtccaagcacccttttcgatcttaatgttttcaagatgcgtcaaaaaggtggtatgccggcagtggtccgaccaataggtatcgatcacccgcagttccgtcatgctgggcgcgcgcttttcatcatcccggaaatagcgctgcacaaaagccagatccttcacggtcatcgccaggcccatgttcttgacccgagcttccagagcagcctcgtcttcagagaggaaatcctccagcaccgcgatcttctccggcgcatccagcgcaacctccaggctttccggcttatcccacccggcctcccgggcctctacggggttgatgcagtattccttcacgcgcggcaggtccgcctcatccagccctttaagcaggtagaccgtagccgcatggatcagcggcggattgctcagcgtcagcatctgcacgcactgagcggccacgtcgctgcgctggtcatactggccgggcaaaaactctgtagcaaagcgcaggtaaccctcgccatgggtcacctcatcggtcacctggtcgatcgccgggtcggaaaacaccatccgcaccgccttgtcaaagtcctgctccggcaggttctccacgtcataccgcacgaggatgcgtacatcctccaggccttctaagcccaaaacgctgcgcagctccttttgcaggcgcttgctctccacatcaaaacccggacgcttttcaacatataccctacggaccaaaatcatgcctcgcttcctagaggggagacccctcagaactatatgctttttattacgtaatgatacagggttattatatcacagcttgcagcgccgtgcacgccctttcaggcattaatctctgccagaatccaacaaaaagcgccccctgatcgggggcgcttgttcaaaacccggttagcccagaattacccgcatcaccggtacaaagatcaggctaaacaccgtggtcgccagcaccatgcggctggcaaagcccgcatcgctgccgtaggccttggagaccagcggggtctggctcatgatcggcatgccggactgtaccatatatacgttgcgcatgatctccggcgtgcggatggccgacaataccgcaaatacgatcagcggcgtcaccgcgaaccgccccgccatcaccagggcggagaaccggtcccaaccgtgcagcaggtttttaagccccatgctttggataataaagcccgtatagatcaggcacaggggcgtggccatactgcccaaagattttgccgtatccaggataaaattgggcagccgtatgtcggcaaaggtcagcgcgatcatcacgataaagctggtcagcgcaggcgagaagattgcctttagatcctttaaatgaaagctgaactccccaccgccgtcccggcggatgcccatcacacccacggtccaaaagaccagcgtattgcaggcaaagtaaaagagcgcaggggatacggcctcctccccaaacagggctgtggccaccggcaggccgatcaccaccgtattcgcacaggcgaacatggcccgaaacacgccgcgccgccccttggggatgcgcgccgccaaggataccagcgtgccgatcccgtaagatgtggcaatggccaaaagcggcgccaacaggccccagccggcctcccgcagggactcggtggtgaagtacacattcatgttgttcaccatcatcgccgggatggccaccttcagcgccagttcggtcaaaaaatgccctgtatgctccgtaatccatttaaaatgcgcaaggccatagcccagggcgatcatcagcaagatcggcaatacgccctgcaatgcggatacgataagcgctcccatcgtcctgcccttccttcctcgcgggccgcccgatgtgccaatgccagttgtcctttaggcggttacgaatgcctcataaatggcccgcacggccaaatcaaaatcgtcgctctccacacctacaataatattcatttcgctggagccctggtcgatcatccttacgttgacgccggcccctaccagcgcgtcaaaaagcttggccgccacgccgcgctggcgcaccatgccgtggcctacggtggcgatcagcgccatgttgtcggatacctccagcgcatccggcgagaccgcctcgtgcaggctggtcaggatcgcatccaggttgtcgcccagctgcgcgtctgcaatcaccaccgaaagggtatcgatggaggagggcatgtgctcaaaggagatatcgaatttttccagcacgctgagcaccttgcggccaaagccccgctccgtattcatcatctctttttcaatggtgatgaccgtaaagcccttgtgcccggcgatgccggtcaccgtgtgcttgcgggcagcctcgtcaaaccggtccatgatcatggtaccggggtgatcgggcgcgttggtatttttaatgttaatgggaatgcccgccagccttacggggaagatggcctcctcatgcagcacgctggcccccatgtagctgagctcccgcagctcacggtaggtgatataatcgatggtttccggatttttcacgatacggggatccgccatcaaaaagccggaaacgtccgtccaattctcatacagcgccgcatcgatggcccgtgccacgatggcgccggtaatatccgagccgcccctggaaaaggtcttgaccgtgccatcccgcttggcgccgtaaaagccgggcaccaccgcgcaggtatagtccttgagcaccgcgctggcctttttctgggtctcctcgggcaggaagttgcccgcctcgtcaaatacgatcagctccgccgcatccacaaagggatagcccaaatagtccgccagcaggatcccgtttaaaaactcgccccggctggcggcataatccgcatccgccccggcggccaggtcttcccgcactttttgaagcggcccttccaggtcgcactgcagccccagatccctggcaatacccctgtaccgctggcagatccggtcaaacaccggcccaaagtcctccccggcacaggccagccgctgggactcatacagcatatccgtgaccttaacatcgtcggaaaaccgcttgcccggcgcggacggcaccacgaacagacgcgccgcgtccgcccggatgatctcccttacctttgcaaactgccccgcgtccgccagcgagctgccgccgaacttgaccaccttattgcccatgatggtgcatcctccctcacgcataaacccaattcacattttcgcgcgcatgcgtcaaattccgcgcgcacatgggtgatattataaagtaagcctgcatcccgcgtcaagccgttatcctacggcactccagataaaagcgtttttcatccgcctcacccatggaaaaagtcttgcgcggcagggcgcccgcctgctcgatcgccggaaacagggcgtgtttatccatggccggcagcaaaaagctcatattgccctgctgtatccccatcgttagggtggtttcaatgccatgcacataatccaggctctcgccgtcctgcagggtttcatccagcaactgctggatggctcccaccgccaggggatggcccgggttccccaaacggatcagcccgcatacgccgtcagctactacgccaagggcctgttcccccgccgcgtccgccgcgcaaacggccggccacagttcctcaggcgccagcgccgcaaagtcaggctgccagcccagggctttggcgcgggccaacagccccgccagccgctcctggggctgggtatggaacaatacccggttgatgggggcaaaggtcagcccctcgtcatgcacgttattgatctccaccattgcccagcgcgccggatgggcttgtgccgcctcgcccagggcctttttcagctcttcatagcaggccttggccgtcgccagagagtggttgccatcccccacggcgtaaagcaccggcgattccgggcacttggcggcgatgtcctgccacagcccttccagggcgtcggccaggcgtccataggccgcctccccctctacccaaaacccggtcacatgccctccgcccagcatcaggtcggtatcgtaggccacctctaattcatgtttatgcgccgccagcggctcaatgaccctgcgctcagggtcgtcgatcagcagcatcacgtggggcagctcaagcgccgcgccccttcgcaccgcctggcgcggcgggatacgcgacaaaatagtaccctccgtcgcccgcactggcgaagtagatcctttattgtaatcatacttttcaaggtctatcatggccagcaaccctcgccgcagcggcgcgtgcgcggtctgccgctcgatatagataaacccttctctgggtgcggccaacacaccgtccgccaggtaagacgccatcgcttgatggatgcgttcgatcctcccccccgcatccgggcgctccagataaatctcagggaagatcaagttcagcgtcgacggcgcaccgcccacggttcgagccacacactcccagtaatcctgctgagaggtatactggtcacaagcgatcaccgcccatttattcaaatcgatctgtttctccggcagcaaaacctgcggcgggcaaatccctacccgccgcagccgcgccgtattctggctttccgtcaagggtatcctccttcaaatccacttatagcgagcgtgcatcggggtttaagcagttaggcggcagcttgccgctcaaagccgcctggatattctctacacacatcatgcccatcctgtcgcgggtggcgatggtggcgctggccacatggggcatcatggtcacattgggcaggtcccgcagttccatctcatattccggctcgttttcaaacacatccagcccggctgcccagatggtgccctccttgagcgcctttgccagggccttttcatccaccaccgggccccgcgccgtattgatgaggatggccgtgggcttcatcatcttcagctctttttcgccgatcagatgcttggtctccatggtcagcggtacatgtagagaaacatagtctgagcgctgtaacagctccgggagcgtgacccattccgcctcacaatcccgctccagcgcttcgtcccgcctgcggttgtggtaaatcaccttcatgccaaaggccttggctttgcgggcaaaatccccgccgatgcggcccgcgcccactacgcccaccgtggcgccggtaatatcctgccctaaaaagagcttaggcgcccagccggtaaacctcccttcgcgcatatagcggtccccctctacgatgcgccgcgcgcaggagaacaacagcgcccaggcgatatccgccgtcgcctcggtcagcacgcccggggtattgctcacccagatcgcgcaatccgtagcggcggtaatgtcaatattattatagcccaccgcgtaattggcaaaaatcttgcactggggccccgcggccttgagcactgcctcgtcgatggggtcggtcagcaggcagagcaccgcgtccatccccgctacattcttcatcagttcctcatgggtcagcatccggtcctccgggttgcagatcacgttacccagcttgcgcagcgccgccatgggcttttccggaagttcccgggtcacataaatgttcggctgcatatccgtttacctccttaaagggccgcccaggcttcgttcagcgtccgcttggcattggcgatcaccagctccggctcctcatccccaaagggtttgacctcaaagctgactaccggtgggttctcggtattcaaaaagccaatatccaacaatacccgcaaaaattccaccatctcgggtacgccattgcacccgcccgggaagccgaagcgggggtgctggtcaccatagcccggcgtcgctttatccagcttgggatctacggcgttgcccaggtgggcatggatgatataatccttcaccggcaacagagattctttagcgctctcgtgcagcagcggcagatggctcaggtccaccatcagtccaaagttcgggcaggtttcgcgtatctcggctgcaaacttcgccgccagatccgccgggccgatcaggctgcacttgtccacatcatagtcgaacacttccagcgccacgcgcatgccatccttctgcgccgcataggcgcacagttcgcgggtggagcgcaccagcgcgtcataggccgcgtccttattttccttggtatacttcccgctcaaaaaggcaaagcccttggcgcccagctcataggcctcgtcgatacccgcctttaaggtttccagcgccttcagccggcccgcctcatctacatcgttgatattcagtcccgtggtcaaaagccggggctgggccccgtagcgcaccgtaagccctgcgtcggtcacaatctttttgacctgggcgcgcgccgcgtcatccttgatccagctcagctcaatggcagtaaaataatcgtcccgggcgatggcgcgcaccgtttcaacaatgctttcatccatcccgctcatgcacttgggataggccataaagtgaatcaggccgggtttaaaatatcggtacatcgaagcgtccatttcagttttgctcctttcgtcgtctgctcgatttattacacagcatccctaaattgtcccagtaaaactataccacgcccgcgccgcgactgtaaataattgtgcgaaaggaaggcgctcaactggaaccaaatttcgcccccagcatatcctgataacgaaaccggtcaaacaactatcttaaaggaggccatgacatgtctttctattctccccaaaacgcaggtaacgaaatgtgccccggtcgtaccaacggcgcccagggtatcagcgaaaaggtgtgcgtccaggtcaaaaaggtgtacgacagctgcatgcagcaagagcagatcgacgatgtgaacatttgcatctgcgacctttatcccgccggcaagcagtttagctatccgttgacctttgtatcctgccgctccaccgcctgctccggcaagctgcacaacctgtgcatcgaccgcctggacgaccggccgaattttgcccgcgtccgcgccgatgtggaaatccccctggagattctctttgaggatgccgaaggttgcgagggtctgggctatggctgcatcacggtgcataaagacgtaatcctgtgcgtgccctgcgactcaatcgttcccttcacggcggaagcgttggccagcgccgtatgcgtaaccggtacatactgcgataacaactgcttcaaggtcacagtatgcgtcaccatcatcttgaagatcaccgcggaagtggaactgctgatccccagctacggtttctgcccgattcctccctgcgaggagttctcctccggcgtgtgcaacgactttttcagtctgccggttttccccgtaggctgcaactgcaatgtggataacaacaacatccagccgcgcagctgcaactgcgggtgctgaccccctaaccgaacctcccatcacctgtagtgcatcgccttagcgcaagaaaaagcggcccagggtctttcctgggccgctttttcttgtctcacttactttttcatgctttacagtcgtttaaaatataagctatgataaagtaaaatatactattaatattcattttgtcgaaaggggcgctggttttggctgaacattcgctttcgcgcgcggacctactgcacatattccctttactaagccgtattggcgatacccgcttggccgagcagatcatcgccgtctggcaggatgcctttgccgattgcctgtggccgcgtctggaggacgcctgctttaatcccgaggcgcaccccttccggctggtggatcatatcaatgcaatcactgaaggggcgctggccgtagcgcaggccatggaaaaataccagggcatcgtgctggatcaagatcgcatcatcgcccttggatacttgcacgatgtcagcaagatccttgagtttgagcccgggccggatggcacgccccgcaaaagcgagataggccgcctgatccagcacggggcgatgggtgccttttatgcccgtaagcacggcatggcgctggaatacatccatttgatcttgacccataccccgcaaagtaagatggcccccgtctataaagaggcgtggctcttttcacacatcgacctggcggacgcccagatcgtggattcttttcacgaggcctaagcaccggcggtcagagcgttacagcttaactgcaacacataaaccagttcatttgagaggggcgttttgaatgcgcaaaaggcgttgggcccgggcgctgaccgccgcgattttagccgggctgcttttgctatccatccccgcgctggggctggccgatgcgggcaacttcgccggcagcagcgattatggcagcagctcgggttggagcagcagcggtagctccggcagttccggttggagcggtggcagtagttcgggcaattccagttggaacagttcaggaggctccagcagctggtatagcgatagttcagatagttatcggtacagcagccaggatgatagccccagttacaacgctggcagtgcggcccatagcaccaaaaaatccccccatcctcccgccgagccggggatcatgttgatcgttatattcctacttgggctaatcgctcttgggctctatctattattcaggattattccgccggctaaccggaaggaaactccgccgccggaccctgtccgcccggcgcctatctacgcggtatcggattttcagctctctccgctgcgccagcgcgaccccgggtttacccggcaggcctttgccaagcgggtaggcgaaatgtatgtgcagatgcagcaggcctggcaggccaagcagtgggcccccatgcgcgctttgatgaccgatgcgctgtttagccagtttaaccgccagatgcaagaatacatcaatcggcaccgcaccaactacgtggaaggcattcgcgtgctgtcggtggagatcacagattatcgccaggacgcggtgaacgatgttttgaccgtgcttcttgaaacccgcatcatcgattatgtgaccgacgacgataccggggcgttgatcagcggcagcaggaccaaagagctgtttatgacctatgagtggaccctggtccgctccaaactggccaagactcgccgggcggacgaagctgaaatggcccagtgtcctaactgcggcgcgccggtatccctcaaccagtctggccagtgcgaatattgcggcagcgtgttgaccagcggcgcttacgattgggtgatctctgccatccgcggcatctcccagcgcagccggtaacggatttatcccataaactttttataggggcgtaatttcatgaaaaagcaaaaactcttccgcatcctgatcgccttgaccctggcagcggcgctgctgtgcgccctgccggcgctggggctggccgacgcgggcaacttcgccggcgggagcgattacggcggcagctcgggcggcggttccgactggggcggttccagttccagcagctggagttcgggcggcagttattcgggcggcggctctttctccccgtttagcatcctcgtgctggttgtaatcgtggtagtctacctaatcattaaaaatacccgtaaaaagaaggggggctcctccggcgtctcctttaatgcaggcgatacgccgcggccgctggccgataacctgctggccccgctgcgccaggccgaccctaacttctctaaagaggcgctgctcgaacgggtgggcaacatgtatgtgcaaatgcagcaggcctgggagcataagcagtgggctccgatccgcatgctgatgaccgatgcgctgtttggccagtttaaccgccagatcgacgaatacatccaaaaacagcagaccaaccatgtcgagcgcatcgcggtgctctccaccgagatcaccggttaccggcaggatgcggtaaacgatgtgctgaccatccgcatcatgacccgtatcatcgattatgtgaccgacgaccgcaccggcgcggtggtcagcggcagcaagaccaaggaactgtttatgacctatgagtggaccctgatccgctccaagggcgtgcaaacgcccaagcagatcggcgtgcggatgaccgagtgtcccaactgcggcgcgccggtaaacgtcaaccagtccggccagtgcgaatactgctccagcgtattgacctcgggcgagtacgattgggtgatctccgctattcgcggcatctcccaacagagccggtaagtaagggggccagactttggaaaggtggcagcgcaagaagcctaccggcctggggcgggcgtttatggggcttttaggggaagcctgtgttctggctcctgcgccattggcgctcgcggccagtgcggacgctgctgccgcccacgccgactcccccgtttccgcagcgggttatctgcttttgcttttggctataatcggcctgatcctgtggctgggcaggctttatagccgccatctgcaggcaaggaaagcgcgcgagcatctgcccgaaaaagaaacaccgtcgcctttcgcgcgcttttgcaagaaaaatcccgatttatctatccgattctctgaaaccccttgattttcctgtgtttcccgcaggtctgctgccataaaaagctccgttttcccttgtttttgcccttgtggggcaaaacaagggaaactttttatcagtcgcctactaccttatccagcaagcgggctgaggagcgtttcgcttcccttgtcgagtgagcgtagatgttcatggtggtactgacgtcggcgtgtcccaacagctcctgtacatccttcggcgctgccccgctagggagcagattacttgtgaatgtgtgacggagttgatgaaaatggaagccctcaagccccggtatcttctttgaggctgtccggcaggcaatgctgaccgtgctggaggattcaaagcacccgtccgggcggagacaaacgaagtcgatttcccggtaattctccggcacttcctccatccgttgcagactgtacagctcgtagtaactgcggcctttctcctgtacctgtttgtagtagttcaggctgtaaagctcgccgtactggaagcggtttttgtgctgctcggtcctggctgccttgaggagcgccgccagcgtgtcgcagaagtccaccgtgcggattttgccccgtttggtggtgctgacctccgtcttgtgcctcgtcccgttgtagcgcatgctgcgccgcaccgtgatggtctgctccctcatgtcaatgtcctgccatgtgagagcgcagacctcgccgatccgaagccccgtgtagtaggcgatcgggaagatatgaccttttgggacgctcttgcaaaggagtgtcgggaggagttcaaacgcttcgggacggaaggaaaatgtatcgaggcacgggagcttatcatcgccctgccggaggaatacacgcagtttgatcctcggcaggtgcttcaggagttcacagagcaattcaagaagcgatatgatgtggaatgcgtttcggcgctccaccacaacaagacgaagaagaactatcacatccacctgatcttttctgagcggcggttattgccggagccggatatcaagattgccagccgcagcgtgttctatgatgaaacctgcaagcgggtacgcacgaagaaggagatcaccggcgaggacggtcaaatccgcaagggctgcaccgtcatcaagaagggtgaagcctatgaaagccacttgttcacggtaaaggacgacgctttcaaaaacatactgttcttggacgaagcaaaagagttctacaccgctctgattaacaggcatatccacgacccggaacggcgattaaaggtctttgatccgagcagcgtatatctccccaccaaaaagatcgggaagaaaaacccgaaggcggcggagattgaggcggacaatgcagcacggcaggactggaacagaacggcggatatggcgctggtatcggggattgccgaggcgaagatcatagagatcaaaaacgagcatatctacaacgaagccagccgctccgtgcaaaaacatggctggctgccggggctgtttcggaatatcatccaaagggcaaaggaaatcctgcaaggattgatccgcgaaacgatgatcccgcccaagcctacactgtccgttgatttgacggaataccgcaagctgcaaaaactgatggacaaagcgcaggacgaagccaaggcgatcaagcacctaaaggatgtcgtaaagccaggactcgaaaaacagctttccgagataacaggacttttcaaaggaaaagagcgaaaggctttatcggaaaagattgagcaggtgcagcaggaaatcgatgaacgactggacagaatacaaggtattgtgaaaggcgctgggtatcccgatgtgcaagcgttcagacaggtatatgacaaggctaccgctcttgtggagcagtacaaccgtgacctcgccgcatgggagcggcaggcggcagagaagaaaaatcccaagagggaaaaaccacccgaaaaagagagcgtcataaagcggcttcgggagcttgaggcggagacgaagcgaaacaaccagccccgccgaaatcccaaacaacgcagctatgacattgaacgctaaaacgaaaactgcaccgcaggagcaagccctgcggcgcgtacatagaaacgccctgcaagtttgcggcttgcagggcaaaaaatgtgtgtttcccggaaattttatagtctttccaagagaaaagattgtgaaaaatcttatccaagtatcgtcttcagatcctcttccggcgtggtggtgggggcaatgttgtaatgctccaccagataattcagcacattcggtgaaacaaaggcggggagtgtgggcccgagccgcatattcttgatgcccagatacagcagcgtcagtaggacgcagacagctttctgctcataccaggagagaatgatggacaggggcaactcgttcacgccgcagccaaaggcttcagcaagcgccacggccaccttgaccgcgccgaaggcgtcgttgcactgacccatatccatgatacgaggcaaaccgccgatggtgccgatgtccagatcgttgaagcggaacttgccgcaggcaagggtcaggatgacggtatcggcaggcgcctgcttcacaagctcggtgtagtagttgcggccgggctttgcgccgtcgcagccgcccaccaagaagaagtgccggatggcgccgctctttacggcgtcaatgaccttgtccgcaacgccgagaatcgtgctgtggctgaagccggtggtgacggtggttccgccgttaatgccagtgaactgcgtatcctcggcaaagccgcccagctccagcgccttctcaatgactggggtaaagtccttgtcctcgccgatatgtacgatttccggataggagaccacctcggtggtgaagacccggtctttatagctgtccttgggcggcatcaggcagttggtggtgaagaggatcggcgcggggagatttgcaaattccttctgctgattctgccacgccgtgccgaagttgcccttgaggtgcggatatttcttcagctcagggtaaccgtgggcaggcagcatctcgccgtgggtgtagatgttgatgcccttgtccttagtctgctccaggagccgcttcagatcgtacagatcgtggccggtgattacgataaacggccccttctccaccatcagcggaacggtggccgggacaggcttgccgtaggtctcggtatttgccttgtcgagcatctccatgcaggcgaaattcacttctccgacttcgagaacgatgggcagaagctgatccataccccagtcctcgccgatggcaaagagcgccttcacaaagaactcgttcactcttttgtcggaataaccgagcactccggcatgataagcgtaggccgccatgccgcgaataccgaaaaggatcatggatttcagactgcgaatatcctcgtcggcgtcccagacctttgccatgtcgtaatcatcgttcttgccgcatgagccgcaggaaggacagttgggagcaagcctttctttttctgcatggacctcgtcaatcaaggcttgaatggtgacttcgttgaagtttacgttggtgatggttgtgaacagccccttgatcatcaacttgcagacattttcaatcggctgcgcggcgccgtccgccgcacgggcaagaccgaccagtgcgccggtcagttgatcctgcaatccagcgacatccgatgtctttccgcagacgccggcctttcccatgcagcccttactgcctgcggtctgctcacactgaaaacaaaacatttgcgtatccatttttcatacctccttatacttcttcgatggcacccacggggcaaccatccttggcttccaccgcgcacttaagcgcttcttccgggacttcagtctgggtggcgacggcaacgccttcgtcgcccatggagaacacctccgggcaagtaccagcgcacaggccgcagccgatgcatccgtcatttacaacatacttcattgtctgatcctcgctttcctcgttttttatgattccagtgtcaacagcagcgccatcttaaaccgtttgactgcctggacactatgaattcctgctttggcaaaatgaaaattctcaccggctttgatgggatggtcttttccttcgtagccaatcacgccctcgccatccaaagcgaaaatcagcgcctcgcccggggcggcgtgttcggaaaggccggtgccttcgtcgaaagccatgacgacaaacttcatctggtcgttatgaaccacatccatgttgacgatcttgccgtcctgataggggacaagttctgccagtctgaacacttcgcctgccttgattgcctcgttcatgatatcgctcctcctaatcgagatttctgtatagacagcaccttccgctgttcgtattcccatcggtgtatcccgtagggttaccatgctgtcaccggtatgaaggggtctgctgaagccgtctgatccgtagacctctatgccaccctccgccaagatgagcagcttgtggtacggataaatttccgcacttatatccgtgttcctggccaaggaaaagtagatgatgtcgtttgctccaccatgaacggctttggagatcgtgcagccagaaatcgctgggttatccctcgcaatggagaatacttctccgactttttctttcatacaatcactttccgctctcagcgattttatcgttgatggcctttatgacgctctcaggatcgacgccatgaacggcgcaggcatcctcaagactctccgcctgggaagccggacagccgaggcagtgcataccgattccgagcagcacctccgccgtttccgggtactggtttacgatttcaccgatcaaggttttcctgtttacaactgtgattcccataagtttttcctccctgttcttgattttctgctctgattatactaaaatcgaaacaacgcgtatgttgttgcaacaacggaaggatgattattatgaatactttttttctgacgaacacgccgctgtttcatggtatcagcgagaacgaaatttcggaactgcttagctgcctgggcgcgaaagagcgcaaatttaaaaaagatgagatagttttccgagcgggatcctctatcagcgagattgggcttgtggaatccggcagcgtgaatatcgtcgtcaatttttattggggaaatagccatatttttggtcatatcggaaaggggcaggtctttgcggaaaactatgcggcaattcccggcaaggagctgctctgtgacgttgtgacctgtgaggagactgaagtgctctttctgaatatgcggaatatgctgaccacttgccagaggggatgctcgttccatactcgcatcatccagaatatgcttcggatttctgcacagaagaacttaaacctctcttcccgtatgatgcataccgcgtcaaaatctctccgggagcgcctgctttcttatctttcggagcaggcgctggaacacggaagctcgcacttcaccatcccctttgaccgccagcagcttgccgactatcttgccgtagaccgcagcgccatgtccaatgagctgtccaagatgcagaaggacggtctgattacttaccataagagtgagttcaaactgaatgacaccgtatagaataatgggattgaattatggggccttggggcagattgctgaaaaagctccccggcgatttgttttcgccggagagcttcttatcaatcaagtttatcgtattcttcatccgtcacgtgttcacaccatacggtatccgtatgtacgcccggagccgcgatggagatgtgggagaaccaactgtctttccttgcgccgtgccagtgcttgacattagcagggataacaaccgtaacgccctctttcaattcaaccgtcggcttgccttcctctacataccagccttcgccagcgatacagatcagaatctgctgtcctccggctccgtccgaggtatggatatgccagcaggtccggcatcccggctcgaaggtcacattgctgatgaacagcggcatatcctcattcggcaacaccatcggcgatagaaacgacacccctgtgaaatactgcgaaaaagtatcgttcgtctggcctgctccaaacagattggcacggtcaaatccctctcgcttcaggtatttcatgactcgtctcctaagaagtgttcctttgcaaactccatgtcttgcacaagctccaccgtgccgagatacgttcctgaattgtcacgcaccgccatgtatttcaccagcatcgtgcggccacccttctccatccagacaggcacctcgtcacggcgattgttcctgaaatcatcgatgatctggcgcaccatgggctcgatcttcggcggatggcaggagaacacttcccggtcaatggccatgccgggacgtttgaagaccttcggtccttcattgaaaaagcggttgatattatccgcatccacaaaggtaatctccagcggaatcgtattcagaagcgcggtcagctcctctagggtcatgtgaccgccgggcatgacgatctcgctctccgcatcgaaagagacggagcccttcctgttctccgcagcctcccagtgttcctgcgccacgccgaagcacaggtcgtaatccttctcgtcgtggtagatgccgtaccattcctcctctgtgaagttcactgcgcagattgggaacaggatgttctgctccttgtagatcatttcctcggcccgggtcagcacggcgtccagcctggcgctccattctgcgccgtgatcgttttcctttgcaagcgcactaagttcatcgcgaatctcgtcgtccaccgtccacatcacatcggagggaccggagacgccgtatttcaccttcagcaggggatagagcatatcaccctttttggcataatggatcgaaagatcacgaatcgccgggataagcgattcatccttgccctccttaaatctggcaagcaaatcggtaagcgcgtcgttttcttttgtcagcgtgtacagaggatgcccggctattgcctccagttcggcggcgcgggcgttcttatccgtgtagtcctttttggggaaggagtctctcttcgccagctcctcatgcgccttttttcgcaggagggaggcttcgacttccttttctgcattggctattttctcctcggttgtcgcgccatggaacagggcggagtggacgtcgcagagcctctgcacttcagaaagcggcgttccctctttcatgagttcctgctctgcctgcatgatctccgatgcctcgacgtcgctaaactcacggacgaagtccgcccgtacagtctccagtttttcgccttcgcccagccttttcagataggtcttgagctgttcggtgcggcttgcggtgggattgttcacatttattttctccacaccagcctgcggcgcagaagacatatccggcatctcaccgacaagctcgaagcctttgcccatcaaggttgtcacgacatccatcatagagatattcttcatcttcgcgcctttgggaatcgtcatgatcttgccgacggagtgcagcatgggctttttaatgatctcggtaaaaccgagccctgccatgatctcgatcagctcagggtattcctgtgtcaattcatagacagttttattcaaatcaagcttctttgccatagtgatagacctcctttgtatttttctgtatttattataaacatacttagaaggattgtatgttgttcaaacaacaaagcaacacattttttctggccacactccaaagcaaagctgattgcaaatttgggcggagaatatactcctacctatatctacttctgaataagccgtacaattatttgtcaaaagagataagagtggcggggattgctccccgccgcccgatacctttaccttatatgtagatcagatcatgattaacgatctctgttgccctgtcacggatgttattcatccgctgtacccactgcatttgatcctgcgctttgagctgttcggtgaccccctcacgttcggccatttgctctgtcagcaggagcatttgttccgttgcctgttcgttgatgtcggcaaggtatgtattcagcctgccgctggtcagcagttccgtgtaaagagcttttcgctcctgctttatgtaccgcagataccgctgcccccaaatgccaataggtttttcttcttcggctggtactgtcaagcatggaatgtagtaatcgccttgcagagggttttaatgaaatcctctgaaaccgccccaacaaaggattttccgcgatctgctcaccgaatcccggccctcctgacaaatgagatcacgaattataagcaggacgcgacacacgatattttgaccgtgcggatgcaggtgcgcgcaatcgactatatcacccaggggacgggggacaccgtggtggccggtagccgcacccggcagctatacaccatttatgaatggacgctgatccgctctaaaatggcgcgcacggctgcccgcgccagtcaaagtccacagcggtgtccccattgcggcgcgccggtggccgggctggggcaagcgcgctgcgcctattgcgatagcaggctacagaattcccaggcggattgggctttgcctcttataccatccgctcggtatcccaaaaggtcggcgcttagttcagtttaaataaaaaccaccccgtgcacgtgggcacggggtggttttctattcgtctatgactactgccgcgccgccgcctttaaaacagccagtgcctccacggcagcgggctcaaattcgcccggcgcgttaccctcgatgctgacccggcccggccggccattttgctcgatcgccctaaggaagggggcgtaatccgtcccatcctcccgccggggccaatagcgcccttccgggcaggccacatggcagtgccacagccgcacgccagcgcgcagcacattgcccggcgccacatcaaacgcgctatggtaggcgtccaccagcaggcccacgttggcgcggtccaccgcatcgtgcatggctttagcctggtcaaaatcggtgataaaattggtttcggcagcgcgcaggtattcgatgctcaccccaatgccggccttttgcgccatatccgagagcagccgcacaaaggcaatatactgcgccgcagccgcggcccggtcaaacccctcggggatatcccgcgcaaagccgccgccgatgccaaattgtttaacgcccagcagcccggcgcggcgtaccatcgtgccaaaaaacgcgcacagctctgcccagggcgtaggctgcggcccaaggatcttctgctccggggtaaagatcgcgttgaggctgaccaccggcaatcctgtctcctgaacacgcgcacgcaggttcgcaaactccccggcggacatcagcgcaagctccgtgcccggcagctcgataaaatcatagccgattttagccgccgcctcataattcttagatggcgtacagatgccaaatttcattctcatctaccttctttcctaatctgcggccgttaagcggccaatcatttggtcagcgcggaacttcacgcgcaaccagtccatgcaagggatattcccttaaacacaaagcgcttaaatattggcattttacaacgtttttgtttattgtactctcacagcgcaaaatcaacaagcggtgcccaacttttttgtttaaaacatcaataattcctgcatgcgtgcatccctatgcctcgcttgcgccccatagctgccgcatttcctcaaaagtcgcgcgtctgcccacttgcaaagcccctctaaatagggtaaaatgagccggagcaacctaaaaagtataaaaggtggtgcacaaatatggaaaatacgaataatcccgtcaataacgagctggagaacgaggagcgcgatttcgtcgtttttacagacgatgatggcaacgagtttgagctggacgttattgattactttttccacgacggccaggagtacgccgtactgatcgacctgagcgagggctgcgactgcgagcatgagcatgccgaaggcgaagcgtgcgactgtgaagacggctgcggcgagcgcgacgtgtacatcatgaaagtggtgaccagcgaggagaccgaggagttcatgccggtgcccgacgagctgtttgacacggtagcctccatcgcccagaagcgtttggaagaggccgccgaggatgaggaagaaagcatcgactaaagcgcgcgaaaaaagccagaccgaacggcctggcttttttatttcatccctggcgctaaaagttgggcatcatacactcctttgacccatgcgatccaattatccagcccagtttggaaacgataggcgattccaccgcaagcctgctgtgccaaacgctgacagcgcgctttgataccacgaatttagccgctgcgccatcccggggtttcacggctggatcgttaaattcaaaaaagttggatacagcctttatgtcttccacccacgggccggcggttttaccgcgctggcagtggtcaacaagcgggaacgtgtccaggtcaaatccatgcttcctaggctgacggattatacttaacctcgctattgggccacctcgcaaagtatggagcagtgctggtttggcggtagatgtgactgaacgcgcgtttttagaggatatgctagcgttggccgcgatctgccgcgttaaaggacgggcgcagtaaaaaagagcctccagacgttgattcaatagagcggtaaaaaaacggattttgaggaaggcactccctaacaagattccatgaaaacaagctgaacagttagcaaatttcggactcatggtagaatcttgctctttgccattaaagctttgtaacattcatttctgtgcaagtacaggccacttacaatacttgtctcaattctgtaataatacgattttctactccactctcgtttgttctaatacgtagtaaaggcagtccgtatttctccatcacactattttttaataaatctcgctcagcctgacggctaccttttgcatgataccgagtaccatctatctcaatagccataataggtttcttgtccatcttgctaaacaagagaaaatccaagtgcgtcagcggattagatgcatacagggtttcttccttggtcaacagagaataatctctgattaatgtggctacagaagaatgtattgcacaatcaatttttgaaaattcctgtaaagacaaaatctttttaattacagcataggcaatattttcagaatcatattcagacacccgtttatgctttattaagtattcccttctttgtttatagtattccttatacaatagatcaaaaaccgaaaagatcttgctttcgataatctgaaaattattatattcgatatatcttgctaaatcaccataattcgttttttcattttcttttctgcccgaaatcactatagtcagtgattttatcgctctggaaacggcaacatttagaagattgggattatcaacaaactcgccaattacattatccactgatgctaaaacaatggcgtctttttctcgtccctggaatttgtgaactgtcgcaacctcatatgcatctccaaattgttgctgaattgcagccacttgatcacggtagggagtaatgattcctatatcccgataaccacgctctttcaacacaggcaaaatctctttacaaattacatcaatctgtcgttgattcatatggtcgcgagcatgattaccaggggcagtacgatacatagacaacacatcagcttcgccgcgatcttctgtcataatgattaactgtccattatagaacttttgattaaagaaacttgctattttggggtgacaacgataatgttcacgcagcaataccgacggcacctcactccaaatttccgccgcagatgctagcatactatgagtagcaaagtgatagcgctcatcaaattcatgcttattccagatatcatcggcaatacgaatatcattaaaggtcaacacatttgggagctgttgttggtctccaacgataataatattcttagcacaggaaaaagccaaaacaccagttgccagatcaacttgagaagcttcatcgacaatgagataatcataaatatgttctgtagatagcgtccccttaatcgaatatgcagtacttaaaataacgggatactctctgttaaattcttcggatttgccacgaaagtctgttttttcaaaaatcattcgtggttgttgccactgataccgataagctaattccgctttgaagagtttcatagatttttctctcaactcttttattttggcatcaaaatgataatctcggagtttcgcttccaacgatttcttttcttcgtgtagttcagccattttatttttgtaatatagaccctgtataaaaggaatagcatcttctgcaacatgtgagaatacagaaagcactgctctattgaatcgaatagaaataaaaagttttttgaataatccaattcttttgccagaattgaattcatattccagccaaagcgacaagagtttatctgatgtcaactgggataatcgttttgcatcaaatctaatagttcgcttgatcaatttctgcaatcctattccttgaattcaacatggtattgatttcttctgaaagctgcgctacatccctataaaaagcgtttttcctatccgcatctaaaatccaagatcgcatattgggatatgtgcgagtttgcgtatccaagaatctatttttatttttttgatttcccaaaaaggctgttagaaaagcaactccttgctcctccattttttctgcaacatttagaatagcagaattgttgctggatacaacagccacactttttccgtttttcacggcatttgctatgatatttaaaatagtctgcgttttgccagttcccggtggcccttgaatgatgctgacttgcgaggaaaaagcgttttctactgccattttttggcattgatttaatccaaatggaaatatcaatgggacagtacgatttctcttttcgacaggaaggctcggtgtgagaaatcgtgatagcacggtacaatcatctactgctgtgattttgtcatactgaagttttagaatgtttatgccgttttctgttttgatactaacggcagttgccgtatctttgaagtattgaaacagctctttactatgggcttctgcaagacagttttgcgatatttgtacatcatttcgtctacatgacagttcctttttcccgatacgtataactctatagaattcaccaaaatcacgtatttgatcaatactagtgataatgccatctttgtatttgaaaataatcgtatccgggtcaattacctgctttaatttgataattcgaacgttactgctattatagctatacacttgagaagaattgtcaaaaaccacatcacatttgctgccacggaaccggaaggaaacgatagattctgttttatcttttccgttcacaataattaactgtttggatgcatccacttaattcccctctttccgtcatactgtcttattgtgcactaccgctgcgggctctttttttatcgctatatcagcttatttcctgccaatccttgcacacatcgacccagccccggctgtccgagtaggtctcaagctccggcagggtcaggcagatggcgctgttccccgaaccgcaggccgggtagaccgtttcaaagcgcttaagggatatgtccaaaaacacctgtacttgcacgcccacgccaaaggggcacaccccgcctacggcgtgtccggtctgtgccagcgcctgttccggggtcagcattttggccttgcgcccaaaccgcgccttatacttggcattgtcgatcttggcatcccccgcggtcacgatcaaaaggcagccctcctccgcctggaatgaaagcgtcttggcgatgcgccccggctcacagcccaccgccagtgcggccagcggcaccgtggcgctggatgcgtcaaattcgatgatgtcctgatccctgccccattttttcaaatgctcgcgtgccgcttcaatcgacaatcagatcccctccccggtaatagactttgccgcgcttataggcctccatcatctctccagcgatagagatgctgtagggatgatccggcagcgtttcccgctcgaaccaggcggcctcggcgatctccgccgggtcgatatgcaaggtggggtccccgtccagctgggcaaaaaagccgatcatctgtgaatcggaaaacggccagggctggttggcgtaatagcggatatttttgacccgcacgcccacctcttccatcgtctcccttgccacggcctgctccagcgtctcgccgatctccacatacccggcgatcagcgagaagaattttgccccgtagtgcgccccgcgcgccagcaaaatcctgtccccatcgataatcgcggtgatcacggccggggatatcttggggtacaccgttttgccgcaacccgtgcagatcagcgccctttcgccctggctaggcgccatggccgcgccgcagcgcccgcaaaaccggttgtccccataccagcggctcagctgcgcgcccacgacgcccgcataggccgtatcccggttgaggttggagcgcagcaggttgaccgggtaatatccgccccccggcacgcgcagcgccgtttccccggccgaaaggtaacagccctgcccatccatctcaaaaaggtattgcagctgccccagcgtttcaggcgccacgtcgcaaagccggggcagcgcataatccccctcacgggccagcagcaagatctcgcccttggcgctgtaatgcaaaatataatcctgcgcccgggccaaggccggggcaaacgcgtttgaaaaccgatgcggtgcgatatgatggaacatgtgctcttttcccatccctttactaaaaacttctaagcagtagtttagcactggcagccgttcaatgcaaacgttcaagatagttggcgtgttgacatcgctttatattaaagatagaataaactctaactatgttttattacaaaggtatcggtaaaggaggcctttttcgttgcaaaaattcagcgcaaagcgttttttcacccttatattgctgatgttgctctgcgcggcagccctttatttttccggggctacgccgctgattctgctgcccatggcactgctgagctatctttacgcccgcggcgaacagtatgctgcattaggggcgctggtcatctacgccctggccgtatccctcctggattttgcgccggccggcgcgctggcgctgatcgccgtagcgccgcccgtagtggtaacaggtgagatgatcggcaggcgcaaaggcgtcgtggatagcctgctgttcatctgcggtggcgttttggtggggttaatggccgccatcctgcttaccccggtgctgacgggcaaggatatctttaccacagtagccgatgtggtgcgccagatggtcctggctaatgtcgagggtagcggcgagttgctcatcgcccaagtaaacgagatgctgtcggcagctggccaaccgctggatgccgccacattcgaaggccaggtggagcagtttattctgctattccaaaattctctggggctgatggcgcctactgcgctgatcggcgccagttccttaggcgggctactgctatacgccttgcccagttgggcgctacgccgcgccggcgccaaggcgcgtccctctctgctgaaacgggcgctgggctggggggccgcgcccatcccaaagttgccgccgctgcgctactggcgcctgccccgctggctgggctttagtctgctggggcttacggcgctcacctttgtgggttcctgcctgggcggggcgatcttcagcatcggccagatggtatcctccgcgctgatgaccatctgcttcggcgcgcaggggctggccctgctcagctactattttaattattccggcaaggtgccaaaggctgtgcggttcatcatcatggtcctggcgctaatctttgcctcgccgctggtgatgatgctgggcatggccgatctgctcttccgcatccgggagatcatggagctgcgccgcaaaagcggcggcagcgggcaggggccttttaataccttataatgtatccggctatgaatattcgctaccctgccaaggttaggcgtggtataatggctatgattcaagcaatttcccgttttgaaaacggttcagggaggttataaaaatgaaagtaattttactggcggacgtgaaaggtaccggcaaaaagaacgaggtggccgaagtatccgaagggtacgcccgcaattttcttttcccgcgcaagctggcggtagaagccaccgcggcccagctcaacagcatccgcttaaagcaggatgcgcaggcccaccgcaagcagcaggaaaagcaggacgcgcaggcactggcccaaaagatggagggcaagcgcgtgaagatcgccgcccgcgtcggcaaagatggacgcctgtttggttccatcaccgccaaggagatcgcgcaggccatgcagcagcaattgggcatggaggtggaccggcgcaaggtcgagctggccgagcccatccgcgcgctgggcagcgtgcaggtattggtgcgctactatcccgagatcacctttaacattctggtagacgtggtgggcgaataagcgcctgcaacccggataagctaaggtaaaggccggcctcggcggccggcaacaagaaagaaggatttgccatgagcgttttacagcatgataagatcgccatcgtcggcacaggccttgtgggcgccacctgcgcctttaccctggcggattccggcctagcttcagagctggttttagtggatgttaacaaggcccgggccgaaggggaagccatggacattgcccacggcgcggcctttatgccgccggtgcaagtgcgcagcggagattatgaggattgcgctggcgcggcgctggtcatcctagccgcgggcgtcaaccaaaaagagggcgagacccggctggatctgatgaaccgcaacatggccatctaccgccagatcatcccgatcctggaagagcagtgcccggacgcggtctttttgatcgtggccaatccggtggatttgctcacccacattagcgcgatcatgctggatcatctgccctccgggcgggtcatcggctcgggcacggtgctggatacctcacgataccggctgcttttgagccagcacacgggcattgatccgcgcaatatccacggttatatcttaggtgagcatggggacagcgagtttgccgcctggacgctgacctcggtagccggcatggacctgatggacttttgccaccaatgcggcgcgtgcgaccggcacttaagtgacgtcgtgcgtaatgagatctatcaggacgtgcgcgacgcggcgtacgacgtgatctcccgcaaaggggccacctattatgccgtggcgctggccgtgcggcggatcgccgaggctattttgcgggatgaaaaggccgtgctcaccgtttcgacccatgtgcagggctatctggacctgccggatgtatcgctgtctttgccctgcgtggtgggcaaaggcggtgtagagcgcgtgctgcccgttgccttaagcggcgaggagatgttgctgctgcacgcatcggccaacaagctgcgcgcagcgcttgatgaattgaacctgtaatcttaaccataaggaggctgaccccatggcgcaggagcgaaccggcggcaggttgccgccccataacgcggaagctgaacagtccgtcctgggctgtatgctgctggatgccgagtcggtcgccatcgcgctggaacgcctgaaggacgaggacttttaccggccccaacatcaggagatctttcgcgccatggccgcgctttacgaggccggccaaccggtagacctggtcacggtggtggacgagctttaccgccgcggctctgtcgagggggtaggggggcttgagtacatcacagagctgagccgctttgtgccctcaacggccaacgtccgctcctatgtggagatcatcgcggatcattcgctgatgcgccggctgatcaaggcctccggcgacatctcccagcaggcttacgaagccagcggccccgcacagggcgtgatggagtttgccgaaaagcagatctttgacctatcgctgggccgtacggccaacgcgctggtgcacatcaagcccacactgctggagagcctagcccagatcgaggatatctactcgcacaaaaaccgcattaccggcgtgcctaccggttttgcggatatcgattacaaaaccagcggcatgcacccggccgaactgatcctgatcgccgcgcgcccctccatgggcaagaccagttacgccatgaatatcgtgcaaaacgccgcagtcaaaaatcatgagactgtggcggtattctcccttgagatgtcgcgcgaccagctggtcaaccgcctattgtgcgcagaggcgttggtagagctgcaaaaggtgcgtacaggtgacctgaccgacgaggactggcaaaagcttaccctggccatggcgccgctgtcgcaggcgcccatctatatcgacgatacgcctggcatcacggtgctggaaatgcgctcaaaatgccgccgcctcaagctggaaaagggcctttcgctggtggtgatcgactatctgcagctcatgagcggcagcggcgcggagagccggcagcaggagatctcggccatttcccgttccttaaagcagatggcccgtgagctggaagtgcccgtcatcgcgctgagccagctctcccgcgcgcctgaagcccggcaggatcaccgccccatgctcagcgacctgcgcgaatccggcgccatcgagcaggatgcggacgtggtcatgttcctttatcgggacgaatactacaacgccgaatcggaggatcgcaatattgccgagctgatcatcgccaaacagcgtaacggccccaccggtacggtcaaactgctttggcaggggcaatatacccggttcatggatctggccagggattggcagggataaagagaaatttaaaggaaagggatgctgcgcgcagcatcccttttggtttgcgtcaagtcctagacggcctatcgcttcttatcataaaaggcctttgccaaatcaccggcaaaggctctttctattcttttacgaaccggtaatactcccgacccgcttcatcggccatgcgccgcgtgcgcacgccaaatacccggtcaatctcgccgcccgcgatcaccgctttgggtgcgtccagcgccacaatgcggcccgcatccatcaggcagacccggtcggcgatctcgagggcctgattcaggtcgtgcatcaccgccagcacggtcttcccccgctggcgcatgttccccatcaagttcaagatctccagctgatggcggatgtccagatacgtggccggttcgtccagcaagactacgggggtgtcctgtgccaacatcatggccagatagaccttttgccgctctccacccgacagggccgccagcggcttatccgccatggcctccaccccggtgtctaccatggcctgccaggcgatctggcggtcccccttgccggggcggcggggaaaacccagataggggaagcgtccatgcatcaccatctgataaaccgttgccgcggcggtatcccgtatctgcggcaaaaaggagagctggcgcgcaaattcccggggcgaaaaatcgctatagggcctgccgcttaagcgcaggctgcccgcctccggctttttgagccgggcggctacctttagcagcgtggattttccgcagccgttgggcccgataatgcaggtcacgccgccgtccgcccgcagggtaacatcctccagcacgggcctgccctcgtatcccgcatggatatggccaagctcgatcatatcctcatcccccctttacgccgaaagagcagatagacaaagaacgggccgcccagaatagacataatgatgcccaccggcagctcaaagggggcaaacgccgtccgcgccacgatgtcgcaggccagggtaaaaccgcctccggccagggcgcacattgggatgagatagcgttgatccgtcccgatcaaaaaacgcgccgcgtggggcacgatcaatcccacaaagcccagcagccccgcaaagctgaccgcacagcccgccagcagcgccgccagcgccagataaacggtacggtagacgcccgcccgcagccccagcgatccggccacctcctctcccaaagagagcacgtttagctcgtaccccaaggcaatggccaacgcgatcccgatggggatcaatatccccaccaggcttaggctgctcatattcagccctgaaaatccgccgatcataaaggcgatgcggttcatctgcgtttccgggaacagggtgaggataatatccgtaaatgcgcctagaaagctggataccgccatacccgccagcacgatggtgcgccgggatgcgcccgtgcgcgtggcgatggcatataccgccagcgccgccaccaacgcccctataaaggcaaacaccggccccaacgcgatggcacctggaaaaaacgccgccgcggccatggtaaaaagcccggcgcctgaattgacgccgatcacgttcgggctggccagcgggttgcccagcaccgcctgcagcagcgcgccggaaacggccagcgcaccgcctgccagcgctgcgcccagcgtgcggggcaggcgcacatacatcagtatctgataggccttatcccccgcgtcgccctggatgagcgcccgccacagctgctccgggctcaggcccgaagaacccaggcaaaaactcagtaccgtcaatatcaaaagcgcaccggcagtcagccccaatatcaggattttgcgtcccgccctattggaagagctgggggtacagatattttgcaagggtttcatagctctctccccatctggcgttgggtttgtaatggaacaggtctttatccagtacgatatacttcccgttttttaccgccgataggttattccacgccgggttggattggatccctgcttgcagcgcatccagcgcggcctgctcttcgcccatggtcaccacaaagataaagtccgggtcctctgtgatgatctcctccatgctcaggtcctccaacagggaatcgtgccgggcggcgatattgtcgcaccccagttcgtctagcatggtgcatacgaaattatccttggccttggctttggctttcgtgctcaacgcccggacaaacagcacgctgggccggtaggaggagagcgccgcctgcatcttgaccgcatcgatctgctcggcgatggccgtgccgttttgcacatacaggtcctcccggccggtcagttccgtgcagatcttgagcatatccaggtattcttcaaactcctccaccttaaagtaggcgtgcggcacgccggccttgcccagcagttcatccaacttcatatgcccttcaatgtccggagagaggatgacaaaatccgggtccagttccaacaccctctccacgtccggcgttttgacctggccaatcaccttggtgtccgcatccagttcaaggtcgcgctcgctgatggcatcctctgtggtccccaccagttttcctccagccaacagccaggtctcggcataagagcccaacagggcgactacccgctgggggccgtatgttacggttacttcatgccccagggcgtcttgaaaggtgtagctttgcgccggggccggggtctgcgtcgcctggggcgtttgtgtttcctctaaagccacctggggcccagcgcaggcggagcctaacagcgccgcgcacaacagcaggcttgcggcgatcacgccagtttttttcagcacgcgcccgaacctcctaaaatctcctctttgcgctgcagcaggtcatccgccagcagctgcttctccacctgttccatgcccaggcgttccaccagcgtagcaaatcgctcgcccggcttgccctgatccttgaacaggaggattgccttttcaatgatgtccagcacctcttccttgctggtgaatatcgtcttaagcgccgtgctgtgccgaatttttttgccccagcggccgcccacatagaccttatagcccgcctcctggtgcgttagcgccttaaagtagcaaacctgcgcacagcggccgcagttattgcataccgcaggatcgatcaccagcttgccctcggtcaccttggcggcgcctaccgggcaagtctgtacgatgctgcacttgccgcagccccggcaggcctccacatccagcaccggcacccgttgccctacgatgcccaggtcgttcaactcgggcttaacgcagttattggggcaaccgcctacggcgatcttaaacttatggggtagcgccacggcgcggtaacccttataaaagcggcggtggatctccttggccaaggcctgggtgtcgatcaggccaaaagtacataccgtccccttgcaggccactaccgggcgtacctttgccccagtgccaccggtctccatcccctcccgggctacatatttcttcaccgcctcgatgtcctcaaaattgatgccgggaacctccagcgtcaaccgcgatgtaaaggcgatatcgccgttgccgtacttgtcggccacctcgctgatatttcttaactgtttagcattcagtacgccgttctccgtaatgatgcgggcggaaaaatgcacgccgtcgttattggataaaaaaccctcgcccttgacctttttacgttgttctgcgctaatttccatttttgaacccctcctcctcactaagtcggcccacgcacggccgcctcttcactattatatcatttgccttctatagatgataatagtattattgaatcagatcgatagatatttacaatagtaaggagaagcaagatgaccattcgccaccttcgcatctttatcgccgtggccgatgcgggcaagatgagcctggccgcaaagcatctgtatctcgcccagcccaccgtcagccaggcgatcggcgagttggagcagcactatggctgtaaactttttgagcggctctccaaaaagctctatatcacccccgcaggcacccgccttttaggatacgcgcgccacatcgtcgcccaatttgacgatatggaggcagacatcaagcaaacctcccaggcgcccaggctgacgatcggcgcgacgatgacggtgggcgcctgtgtgctgtccggcatcgtatcccgtttcgagggggaacatcccgcagctcgctgccagttgtatatcgataatacccgcgagatcgaggcccggctgctgaaaagcgagttggacctggccatcgtcgaggggcaggtccaaagccgcgatcttcaggtgcatcccctcttccgggacgaactgatcctggtctgtcctcccggacatccgctggcccagcgcagtcgccttaatttatgcgatttgcaggatcagccctttatcctccgggaggaaggcagcggcacgcgggcgttatttatgcaatctttagccgaaaacggcatttccattgaggccaaatgggtctgccatggccccgagtccatcaaaagcgccctgctggccggtcaggggatgaccgtcatctcccgccgtctggtgcaggcagagctggatagcgggcttttggtgcagctccccttacaggatgcccgcctcacccgcttttttagcctggtctatcacaaaaacaagtttatctcccccactttgtgcctgttttttacccaatgcaaccagatctgcgccgagcaaaatctgccgcctctaccgcttaacgccttgcaggggtaagccccaaaaactccggttcatttatatgagccggagtttttttattcccttatggctgcttaaaacaggtcaatgctctccacccggggaaagccggtgtatttgctggtgatctcgctgacccggtatacatccaggcaaccctgatagtccatctcgtttttgcagatcagctcccgccattttccccagtccgcttccatctgccgggtatccccggctgccaaatccatcagcgtgcgcgccagggcccgtgcgtaatccgcatggtagctaaggtgctgccaaaagtccaaccgcagccctgtctggcacgccatgttgcgttcgatcaccggagcaaaggcgtcgatcttttccaggcaggccgccatgttttcccgcacctgcgcgttttcccgcgggccgatacccatcagataatcgcagtcgctcagggcggaaagcgcgcttagataagcgtagaccgcctcgccctgctccccataagcatgggcaaagtagtcccgcgccaggggttcaaacgcctggtccgtgtccatcaacgtcaggcccattacgtaattgggcagggcattgggcagggccgcgcggatctgctggcagctcatataaccgccaaaccccatgggcgccagctgcttgatatccccgctgatgatgcgggagatgcccacatagcccaggtcgccatagtgggcgcgggtcagcgggtaatcgtagacaaagctatccccgctgaaggctttgcgccaggcggcatagtaggccaggttttcttgcaggctggtcggtagggtgatgcggttgcgccggtattctgggatgggcggcaggccttccatcgccggatagctggcgttaaaggtacgcgtaataggggcaaacatcaggataaaacgctccgggtggttgaaccgctctttttgcggcggccacaaaagctcctggtaaagcaaaaacacaatgcgggtatgcagccccatgcgccggagcttttcatccgctgcgttgagcaggcggatgtattgatccgttggatgttccttttggcaggcctcacactcgcagatattgttataggtatccgccagccagacgtgcagataatccacgtccgggttatctctggcatagcaggcgatctcctcgctcacccgctcgatgaccgccggattagaatagcacagattggtgttgagcgggatgccattccaaaacgtgcgtttgccatccacctgcgccagcagcgggcgcacttcctcccggggctgctgggcgctgcgctgccaccccaggcccggataaccgatggcttctcccgtccagccatgccctgcgtggtgctctaacaggccgcgccgcttaatcgcggcgatcatctcgtccgtatagcgcagcgccagcgccatattaaactcgcctgcttccaggcaggggttgccggtatgccggtaccagttctccaaaaagaaataggggatgcggaactggataaaaaaactattgtagccgaccttgggtaaccagtcgatggtatcgagcacgttttcgatggcgtccgccccttcgatgcaaatgccccggtgccgcaggctggccgccttttgaaaggcctgtgccagcgcctcatcctccactttagggacatgctcatagcgccttcccggccttaagaaccggcagcccagccgtgtaaggtacgcatataccgctagcaacacgcttctggggttgctgcccacaagctgtcctccctccggtccgatcttcacgctgtagcagtcgtccagcgcggggtcggcatccccgggcatgtccagctctcccggctctgccacccgcaaatatacgggggcgccctccccctgcgcaccgttttgtgctattgctatctccggcgccatccgttccaaataatctctaagctcatcggccgcaaaggccagcgtttgttccgccgccggataaagcaggttccaccgcatcgattgaccctccttcgtctggggcttttgtcccgcccttctatttcctattatattccaattgggcggttaaaccaggtataatttgcagattttacacaccaccatagcactttaccggcataaagacaagcctttttcttttgtttcttttggtgtaataagtataagaggtgataaaccatgaaacagcccagcatgactgcactagtcagcacatttgcaagagcctatcacgcagcccacagcactacgcctatttttaatgacacactggccaaagcactgctctatcccggggaatatcagatgattgcccaacacatgctccaaggacgtgccttttttaacattaccagcgaaggggaagaggcgctgcgccgcatcgtggacgagtatttatccccagcactgctgggccgtgccgcttacgccgaaagcgcgttaaaaaacgccgtacgcatcggtgcacgacggtatctgatcctcggtgcgggttatgatacctttgcctatcgccaaccgacgtgggctgcaccgcttcaggtggtggaaatcgaccaatccgctaccatctcggataagcaacgccgcctccaggctgcacacatctccattccggacaacgtacagttcatcgccgccgacctagcgcaggtagagggcttgcgcacgttaacgtgctcgcccgcactatcctcaaaagtaccgactttttgcagcttgctgggggtgacctattacctcccccaacctgcgcttgccgcgctattaaaggtattaaacgacctgttgccgccaggcagcagcctggttttcgattacccgctccccacttacatccagggtgcagatcccgccaagcaggccactttggcgcaagctgccagcgaaaaaatgcaggctgcctatacttatgaggaaattgaagcccttttggagcagtacaacttcctgatttatgaacatctttctgcgcgggcgcttacggtccaatatatggatacatataatcgttccgatcccgcgcatcctattgccgcgccagcaaatgtcagctattgtctggccgttcgggataaataagcattggggaaaatcaaaggccccgcacggtgtgcagggcctttactcattttagccttaaacctgattatgcttcgcccagatattggtcgatcgccttgttcaaggtatcgatctcctcggcggagagctcccaggcggtagcggcgcagttctcgtccgcctcacggggattgcgcacgcccatcagcgccgtatccacgatggggttctgcgtgctccagttgacggtgacctgcgctaccggcgcgttgtgcgcttcggcgatcttatccatcaccttgagcagctgctgaatcttggagaacttgggctccttaaagtaatcatagaaattcaaccgcgtatccgacgggtcccaattgggcagctcacggatggcgccggtcaaaatacctgcacccaaagagccataggtcatggtgccgatatcccgctctttgcagaatttcatcagcttttcagcgctgcggttgaccatggagtaaggcggctggatggcgcccaccacgccgtatttctcggcgtccaggatcatctgctcgtcatagttagatacgccgatattgcggatcttgccggccttgaccagatcggtcagcgcgcccatggtctcggcggggtcggtcttaaagtccggccagtgaacgatgtacagatccacataatccgtctttaagcgtttgagcgaaaggtcgatctcgcggaagatgttctcccggccgttgttgcgcacgatgggatcgtcctcaccctgccaggtcaagcccaccttggtggcaatgtagaaatcgtcgcgctttaagccgctgatggcatcgcccaccacttcctcggaatagccacggccgtataccggcgcggtatcgataaagtttacaccgttatccagcatcgcgcggatcgccttgatggaatcgttgcggtccacatcgccccagccggcgccgccaatggcccacgtacccacggtgacgacggatacgttcatatcggtctttcctaaacgtttgtacctcatgattttccctccatatttacatttttatattgcgcaaggctcgtcccccgggcagtcagcgctcgcgcctataatcgcagcttgcgggcccacatggctctatgaaatattataaagtttataaacgataaaagcaagcgtattccattcgggcagcttggcgggtactgccagctcacctcagcacttccatcatacaggcggtataacccggaatgccgtcattttcccgtccattttttcttttccccggatgatcgttcaatctccctttgcagaattttgacatagttcgctacagcattcatttttacgcatacttttgtacgattatgcgctatattcccgaataaaatcgcatcttgaaaagcttcgttcgcctttgtttaaatctatttccaacccatgcgttatgtgctatactacaggtaaacatggtgtttattcgccctccggcctgtattaaccgccttatgttcctgcacaaaccgggggcatccaacaatctggcgcacaggttctgcccgccaagatccgggggtctataacatggatatacaatttcaatcgcctgtctttgccgaaaaatcagcactttttacaaagggtttgttatatgatgcttatcgctacctgggcgcgcatccgcttgacgcggaaaaaagccagtggcaatttgtggtctgggccccccatgcccaaaaagcggccgtagtaggcgagtttaatgtatgggattatgaagccaatcccatgcagcccatcggggaggggctgttcgccgcggtgatcaatcatcttgcgccgggcgagtgttataaatatgcatttttaacgccggaaggcaaatggatctacaaggccgacccttatggacaggctgcacagctgcgccccgccaccgcctcctgtctggcggatgccagcggttacgcctgggaggatgcggactacctagccgcccacgccgggcagcatcagcgcagcgcccccatgtccatctatgaggttcacctgtcctcctggcgccagcatgaggatggaagcttgctgacctaccgtgagatcgccgcgcagctggtggattacgtgcgagagatgggctttacgcatgtggaatttctgcccgtgatggagtatcccctggacgattcctggggctaccaggtcacgggctttttctcggtcaactcccgttacgggcagcccgaagatttcaaatatctggtcgatcagctgcaccaggcggggattggcgtgatcctggactgggtgcccgcccacttttgcaaggacgaccccggcctgcgccggttcgacggcacgccgatctacgaacatcccaatcccctgcggggcgagcatcccgagtggggtacctgtatttttgactacggccgcccacaggtgcgcagttttctgatctccaatgccgtttattggatgaatgaattccacatagacggcctgcgggtggatgcggtctcctccatgctctacctggattatgcgcgcgaagccggccaatggctgcccaatcaatatggcgggcgggagaatatcgaggccatcgccttcctgcgccagctaaacgatacggtacacgcgcaaaagccttcggcgatcatgattgccgaagaggctaccgcttgggccatggtcaccaagccgccctatattggagggcttggttttgattacaagtggaatatgggctggatgaacgatacgctgaactttatgtccatggattcagtgtaccgcaagtaccatcacgataaattgaccttttcgctgatgtacgccttttcggaaaattttatccttccgctggatcacgacgaggtggtgcacggtaaaaaatccctgcttggcaagatgccgggagattactggcagcagtttgcctctttgcgcctgcttttgggctatacctttacccatcctgggaaaaagctgctctttatgggaacggagctggccccctttatcgaatggcgcttttacgaagggctggagtggcacctgctgcaatacgaaatgcaccggcacatgcagggttatgtggccgcgctcaaccatttttatgtagaacatgccgccctgtgggaggaggacttcagctgggaaggctttaagtggttaggcgccaatgattcgatgcattcgatcatctcttttttgcgcaagggtaaggatgaacagctggcggtgatctgcaactttacccccgtggcctgggaggactaccgcatcaacctgccgcagcccggcacagtagaagagatcttctccagcgatcaacccggctggggcggctccggcgtgaccaataccggcctgctccatacccaggaggtattgtggaacgacagcccttactccctgcagttgcgcgtgccgccgctgggagtgagtattttgcgctatacgcccgacccggaacccaaacccaaacgcgcgccagcccggaaaaacagcggtgccggcaagaaggcagctaaaaagaacgccgtaccagccaaagatataaccaatgtagaaaaggacgccgtcgcttccaaagcaaagcccgccgcaaacataggcaaaaagccaacggcaaagggtaaaaaacgagcggtgtcttctcaaaaaaaggaagataaaaccggtattaaggccaatccgtcatagcctgtacgggcgggccataatatatcgcgggcaggcgccccgccggggcgcgccataatttaattttaacgaccttaggggggctgaaccacatgaaacacaaaagatgtatcgcgatgctgctggcaggcggccagggcagccgtctggggatattgacgcgcaatatcgccaagccggccgttcattttggcggaaaataccgcattatcgattttccgctttccaactgcaccaacagcgacatcaataccgtgggcgttttaacccagtaccagccgctggcgctaaacagctatatcgccggcggccagccctgggatctggaccggaccgacggcggcgtattcgttttgccgccctatatgaaggggcaggggggcgagtggtataagggcacggccaacgccatctaccagaacatcccctttatcgagcagttctctccggagtacgtgctcatcctctcgggcgaccatatttataagatggactacagtatgctgctggacttccacgagtccaagggggcggattgcaccatcgccgtgatcgaagtgccctggaacgaggccagccgctttggcatcatgaataccgacgaggacgaccgggtgatcgattttgaggaaaagccgccggagcccaagagcaacaaggcctccatgggcgtgtacattttcacctggagcgcgctgcgcaaatacctggaggcggacgaggagaacctgctctccagcaacgactttggcaaaaacatcatccccagcatgttggaggatcagctcaatctattcgcctatcccttcagagggtactggaaggatgtgggaacggtgtacagcctgtgggaagcccatatggacctgatcgcctccccgccgcgctttgagctcaacgaccccatgtggcgcatctatgcgcgcaacgccgtagagccaccccaccagatctgccatggcggcgaggtcacccaatcgctggtatcagagggctgcctggtctgcgggcgggtcaaccacagcgtattgtttaactcagtgcagatttccgaaggcgccgaggtgatcgattcggtgctgatgcccggcgttaaggtcgaacgtggggcacgcatctatcgcgccatcgtcgcgccggataccaccgtgggtgctggctctttgatcggcgtaccgctcaaagaaggtacgccggataatgagggcatcaccgtcatcggcacaggcgcctttgtgcccccggggatggagatctcccaggggcagatgttggcggccgaagacctgaaagcgggcaaataagggggatgaaagcatgattaaagataccttagggatgatttataccggcgaggacagttaccacctgcgcgatctttgctccaagcggccgatcgccgccatccccatttgggggcgttatcgggccatcgactttttgctgaccaacctggtcaactccggcgtgggcaacgtgggcgtcatcgcccagcaaaactataactccttaatggatcacctgggcagcggcaaagcctgggatctggaccgtaagcggtacggcctgcgcattttgccgccctatatcgattcgagcagttcctccaccggctataccggtattgtggacgcgctgcagcgcaccatgacctatatccgtcacgcgccgcagcgatatgtgatcctatccggctccagcgtgttgtttaaaagcacctttgacgatgcgcttgcccagcacgtggctaccaatgcggacatcaccgtcttttataaagatgccaccccggcggagatgagtgccatggtggacggggactttatccagctgcgggaggataaccgcatctgggattttgagatcaaccccgccagcccgcactccaaccaggtgatgatgaacgtgtttatcttagaaaaatcgctgctggaatacctcatcggcgaggcctttgcccataacgagcataactttaccgagggcatcctgatgaagcgggtcaaggacctgcggctgtacggctacgattataagggctatgtggcccggctggattcggtacagagctactttaagcactccatgaagatattggagccggaaatgcgccaggagatcttctatgaaaacgggccggtctataccaaggtcaaagacgaggtgcccacccggtatgaaaacggctctcacgtttccaattccatgatcgccgacggttgcgtgatcgaagggtcggttgaggacagcatcctcttccgctcggtgcacatcgcccccggcgcggtggtcaaaaactgcgtgatcatgcagggctcggagatccaatccggcgctgtcctggaaaacgtcatcatcgataagtccgccatcatccggcgggaccgccacctggtaggccaggaaaattacccggtgctaatcgggaaaaacgccatcgtttaggcgcacatggaggataaaatgccagagaacgaaaaaagcgctgttccgatagaaaaatccgcccctgcggcaaaaaaggcgcccgccaagcgcaggcccgccggcgtttaccaaaagggtgtaaagcccaaaaaggctggcgccaaagccacatctaaggcgtccgccaagaaaaaggccccgtccaaaagggccgcacacggtaaggacaagcccttgtcggcgccagaacaggaggttcaaatggagcaacatttcgcccctaaaaagattttgcacgtcgccagcgagtgcgtgcccttcgtcaagaccggtgggcttgccgacgtagtgggcgccctgccccgcgctctggccaaagccgggcacgacgtgcgggtgatcctacccaaatatgggcagatcgccgagcattaccgcaatgagatgacccatgtgacggatttctacctcgacctgggctggcggcacgttttctgcggcatcgagcagctgtgtcaggatggggtcacctattattttgtggataacgaatacctgttttaccgccattatatctacggttgggggaacgacgaggccgagcggtacgcctttttctgtcgcgcggtactgaattccctggagcgcatcggctttattccggatgtgctgcactgccacgactggcaaagcggcatggttcccttcctgctcaagacccaatatgctcacctgcccgccttctcgggcataaagacggtattcactatccacaacctgcaataccagggcctctccaactggccgcacgtgcaggagatgttaagcatacccgatgaatactttcgcccggacgtattagagttccacggggacttaagctttatgaaggctggcctgacctatgccgaccagttgaccaccgtcagccccacctatgcaaaagaaattcaaacgccggactacggcgagcggctggagggcctgctctccgcccgccaggggcagctgcacggtatcttaaacggcattgatgttttagagtacgacccggcaacagacccaaagatttccagcgcatataccgccggcgatctctccggcaaagcggcctgcaagcgcagcttgcaagaggagtttggcctggagcaaaatcccaaggccatgctgatcggcatggtcgggcggctcaacacccaaaaggggctggacctggtcgaacaggttctgggcgattttatgcaggatgaggtgcagttggtgatcttgggcgacggcgacgcgcattttgccaatttcttctccggttcctgcgaacagtaccggggcaagctaggggcatacatcggctttaacctggacctggcccaccggatctatgccgggtgcgacgcgtttttgatgccctcgctctttgagccctgcggcctttcacagctgatcgccctgcgctacggcacgctgcccatcgtgcgggagaccggcggcctggtagataccgtcacttcctacaacgagcagaccggtgaaggcaacggcttctcctttgcgccctaccgggccagcgatatgctctacaccatccgccgggccaattacttttatcacatgcaaaaggatgtttggcatacactacagcagcgtgctatgtccggtgactatagttgggatgcctccgcgcgcgcctatctggagctgtacagccaggtttaaggccactgcgaaatttgacagttctgcgcggatttgttatgctttttgcgggtattgcccaaacgacaggtcatcagggttctgccctgatggccttttttaaggagtatctagtttatggaaataaagcgcaatcagcccgacctgcaggcgcgtaaagagcaaattataaatgaagtgatcggcaaactccgccgccattttggccgtacgctggaggaggctacgccctcccagctttataaggccgtggccatgacggtgcgggacgccatcatggaaaagtggaccgcgacccgcaaagcccgggtgcagcagcagaaaaagcggctgtactatctgtccgtggagttcctcatcggccgctcgctggtgaacaacatcattaacctctgccaggacgaggcctaccgccaggctttagaggaattgggcgtggatctggctgagatcgagcagtccgagcccgaaccctccctggggaacggcggtctgggccggctggccgcctgctttatggattcactggccacgctgggccttccggccatgggctgcggcatccgctatgaatacggactgttccgccagaagatcgtggatggcagccaggtagagatgccggataactggctggacgacggcaacgtgtgggaagtgcccaacctggacgaccagatggaggtgcacttcggcgggcagatcgaggaggactggtccagcggccagctgcacatccgccataccggttaccatacagtgatcgcggtaccctacgacattcccatctccggttacgattcggacgtggccctgtcgctgcgcctgtggagcgcgcgcgccccgcaacagctggatatgagcctgttctcccggggcgagtacgcacgcgctgcggaagaagcggagctggcgcagaccatctccaaggtgctttacccggaggataatcaccaagagggaaaaatgctgcgcctgcagcagcactacttctttacctccgccactatccagtacatcgtcaaggattttaaaaagcgctatccgcatatgccgctgacccgcttacacgaaaaggtcgccatccacatcaacgacacccatcctgccctggcgattccggagctgatgcgcattctgctcgaccaggaaggcctgtcctgggaggacgcctggcaggtgacccgcaattgtttcgcctataccaaccatacggtgatgagcgaagcgctggagcgctggccgttgcagatgttccgggagcttttgccccgcatccatatgattaccaacgccatcaacgagcagtactgccacgacctttgggagatctatcccaacgattttggaaaaatcagctatatgtctatcattgcctacgaccaggtgcgcatggctaacctggccctggccatgagccataaggtcaacggcgtttcgcagctgcacgcggatattctgcgcaaggacctgttcgccgactgggcgcgtactgaaccggacaagatcatcggcatcaccaacggggtgaccatccggcgctggtgcgtcaaggccaaccctgggctgacggatctaatcaccgaggccattggtcccgattggatcaaagatgcggaccagctgcaaaagctgatccccttagctaccgatgccgcattttgcgagcggttccggcggataaaggtggaaaataaggcccggctatccaattacatcgccaccaaactggatattaaggtggatcccagtagcctgttcgattgccaggccaagcgtttgcacgagtacaagcggcaattgctcaacgccctgcatatcctgtacttatatcgcaggttaaaggaagacccgagcgcagacatccaaaaacgcaccttcttctttgccgcaaaggcctcgcccggctattaccgggccaaggagatcatccgcctgatccacgccgttaaggatctggtggagagtgacccggtggttcgggagaagctgcaggtcgtattcctgcccaactattgcgtgtcgctagccgaggtattgatccccgcggcggaactgagcgagcagatctccaccgccggcaaggaggcctcgggcaccagcaacatgaagtttatgctcaacggcgcgcttaccatcggtacgctggacggtgccaacgtcgagatggcccagctgatgggcggcgaaaacatctttatctttggccgcaaagcgcaggaagtagaaaatatgctgcgcaataagctttaccatgccggcgagctttacgagaccaaccgggcgctgaaaaacgtgctggatatgctggtagacggctctctgcctgccgatcatcctcgccagttcagcgacctttaccagtccctgctcttcggggatggcggcaatattgcggacccctatctggtgctggacgattttgccccctacgccgaggcgcaggaggaggtgcagcgggtctatcgcgatacccaggagtggatccgtcgtgccgtactcaataccgcccacgcgggctttttctccagtgaccggaccattcgcgagtataacgagcgcatctggcatttagagccccagatggagcgggagtaaaagagcgctaaacaggagactttatgattcatcattcgcaattagaacgttaccgcgcccctacgggcgcggtcgtttttaacaccaaagtacgccttcgtctagtcgtggaagccaccctttggcctacggcagtctatctacgctatcagccctgcggcggcgaaatccacaagttggcaatgggctgccgggaccgttccctctcccagctggtgtttgagcttcagtttgacgccggcacgcaggaggggcccctgttctatgattttgagattcagcgccagcagggcgacctgtattatggcaacgcggccgacgggctgggtggcgaggggcttgtgcgcgaacaaagcgaaggaccccgctttcagatcaccgtttaccggccggattaccaggtgcccgcctggttgcagggcgcggtgatgtaccagatctttcccgaccggtttgcccgctccggccccctgccggaaaagctgcccgcacgcttccatcaagattggtacgaagtaccggactacgtccccaccctgggtagggatgaatatatcccggacgattactacggcggcaatctgcgcggtattcaggaaaagctgccctaccttaaaagcctgggcgtcgaggttctgtatctgaatcccatctttgaatcggacagtaaccaccgctataacacgggcgattatgaaaggattgatccgctgctgggtactcgtgaggactttaaggccctttgtaccgcggcccgcgcctgcggtatctccatcctgctggacggggtcttttcccataccggttctgacagccgttatttcaataaagaagggcgctaccccaccctgggcgcgtatcagtcgccggattcgccctactacagctggtatcactttatggattatcccgaccagtacgattgctggtgggggttcaagacgctgccctgtgtcaaggagttggaccccggctttcaggattatatactaggcagcccacagggggtggtgcgccaatacctgcgcgacggggcgcgcggttggcggctggacgtggcagatgaattgcccagcgtctttttagatcatctgcgccaggccgtaaaggatgaggatccgcaatctgccgttttgggcgaggtctgggaggacgccaccaataaacaaagctacggggaacaacggcggtattttggcggcagtcagctcgacagcgtgatgaactatccccttcgcgaagcgctgctgggctttttgaccggcgcgctcaccgctggcagctgcatgcggcacattctcagcctacaggagaattacccggtcccggccttttacgcgctgatgaacctgatgagcagccatgacgtgccccgcgcactgaccgtgctgtgcggcgcgccgcaggcggataccctcactcgggagcaacaggccgccgtatcttatgagggagaggcactgcagcacggcaaacaaaagttgctactactggccagcgcgatttatgccctgccaggcgcgccctgtatctattacggcgacgaggccggtatgcagggcatgcgcgacccattcaaccgcgctgcctatccctgggggcgggaagatagcgcgctggtggaagcctttcgggcgttgggcgcgctgcgccggcgctgtcctgcgttgcgcacgggctacctggcagtgaccgcccccagcgatgggttgctgtgcatctggcgctacgccaaggatggcatggatgcgtttggcgatcctctggagagggcagccctttgcatcgtcaaccgcgatcccgatgaggtctgctgtacattatcgccgccggatggtctaagcgcctatccgctctggacagatgtgcagaccggtgaagcggcagcgccccaggagggaaaactggaattaaagctttcaggttttacggctcgcttgcttgccgcaaaataattgacggatatcctgcaatttgctatgctttagatatggttaactgttatataccattatttaggggaggcatctattactatgcaggtactaaaaaactacattgcgggccaatgggtggagtccgcaggcgcactgaaagacgtctataatccttccaacggcgagttgatcggccaggttccgctctcgccccaaagcgagatggacgctgccatcgacgccgcgcaggaagccttttgctcctggcgcaccacgccggtgagcgtacgcgtttcctatctcttcaaattttatcagcttttgcaggaagacttgccggagatctcccggctgatctccatcgagggcggcaagaacaaggccgattcggatgcggagatcaaacggatgatgcaaaatgtggaatgcgcatgcggcgcgcctatgctgctggccggcgaaaagctgatggatatcgcctcgggcggcatggatggcgaagtcatccgccagccgctgggggtgttcggcatcatcgcgccgttcaacttcccgggcatggtgcccttctggttcatgccctacgcgctggccgcgggcgatacgctggtcatcaaaccctcggagcaggtaccgctgaccatgcagcgcatctttacactgatcgacaaactggggctgcccgcgggcgtcatcaatatggtcaatggtgataaggacactgccgcgccgctgctagagaatcccaaggtcaagggcgtatcctttgtgggcaacacggctaccgccaagaagatcgccatggcctgcgcggcgaacaacaagcggttccaggcgctgggcagcgccaagaatcacaccatcgtcatgccggatgcggacctggaccgggtcgtcaaagccctgctaaccagctgctttggctgcgccgggcagcgctgtatggccaccagtttggtggtcgccatgccggaagtgtacgacgaactggtggccaaattcgtcgaggcggccaagggcgtcgtcgcaggcgatgcgttggccccggataccgatatgggcccggtgatcagcgccgcagcgaaggagcgcatcctgggcctgatcgaaaagggcattgccgacggggccgagctgctgctggatgggcgcaacattcagctgcccgcaccgcttgataaaggacactttgtgggcgccaccatctttggcaacgttacaaaagatatggcgatttacaaagaagagatcttcgggcccgtcgttggcgtgatgaaagcggccaacctggacgaagccctggcgttgattcgggattgccgctttggcaacggcgcctccatcttcacgcagaacggatactgggcgcggcaattccagcaaaacgcctcggccggcatgctgggcatcaacgtgggcatccccgcgccggtggcctatttccccttcggcggcgaaaaggagtctatctatggggacgtcaaagcgcagggtcgcgatgtgttcgactttatgacccagcgcaaggtcgtcaccacccgtttctttgcagaaaactaattagctaaggtattaaaaatgcctccggcgtcagccggaggcattttttcttctatttttcctgccgcggatgctgcttttgcctctgcgaatcagtacagcgcgccgcgcaggccgcacaatctccacagcagccgccctttttgcgccgccggatgatcgccaggattgccagacccagcgccgccgtcagcaacacgatgagtacgatctccggtaaattcataaccactccttacacaaacaacgagcctacctggaacacgatgaaagaaacgacccaggccaccagcgtttggtagcccatcgccagcagcgctcccttggtcgaaccgatctcccgcctggtagccgccagcgccgccacgcaaggcatgtaaagcagcgtgaatgccaggaaggacgtcgccgtcaaaggcgtaaataacccatttaacgcccccaacaacgcagtatccgaagcgcccgcaccggttaaaatgcttaaagtgctcaccacggtttctttagccgtaaggcctgtaatcagcgcggtagacatccgccagtccccaaaacccagggggatgaagatgggtgcgatcaaccggccgatggaagccatgatgctatccgcattatcgctgaccatatcaaaggaccagttgaaggtctgcaagaaccaaatcaccacgctggccacaaagatgatggtaaaggcccggtggataaagtccttggccttatcccacatatgcagcaatacgctcttaggcgtgggcagacggtaggccggcagttccattacaaagggcaccggctcccccttaaaggctgtgcgctttaagatcagcgccgagagcacggctactacaatgcccaacacgtagagcgcgatcatcaccaatgccttatgatccgggaaaaaggccgccgtaaatacagcatagatgggcagcttcgcgctgcaggacatgaatggcgtcagtataatcgtcatcttacggtcccgctcgctggaaagggtgcgcgtggccatgatcgccgggacgctgcacccaaagccgatgagcatgggcacaaacgagcgcccggaaagccccagcttgcgcagcagccgatccatcacaaaggcgacgcgcgccatatagccgctatcctccaacatggagagaaagaaaaacagcagcaatataatgggtaaaaaggacagaatactgccgatgccctggaacgccccgtcaatgatcagcgaatgcagccaggggctgacgttccattgggtcaggctgaaatccaccatatacgtaatggtgccgatcccctcgtccagcaggtcgctcaaaaacgtccctatagggccaaaggtcaggtagaagatcagcatcatgatccctaaaaagatcggcagtgcaaacaccttgtgagtcaacacattatcgatcttgtgggagcgctgctgcgctaccgattcgccctgctttttcaccgccttggcgcatagcttttcgataaaggaatagcgcatgtccgccagggctgcctcccggtccgtccccagctgatcttccatctgctttacaatgtgctcaataatatccagttcgctctcgctcagccccagcgcgcgctgcatgggctggtcgttttccaccagtttggtggccgcaaaccgtaccgaatagggggtctttttcaccttgctctcgatcaggtgggcgatggcgtgcagcgcctcatgcactgcgccgctgcaaaaatcgatgcgcggcggcgcctttttttccttggctacggcgatggcccgctgggtcagttcgcttacgccctcatttttgctggccgtgatggggactaccggcacctccagctcccgctccagggcctggatatcgatgctgccgccgttggcccgcacctcgtccatcatgttcaaggcgatgatcatcggcagccccagctccatcagctgcaaggtcaaatacaggttgcgctcaatattcgttgcgtctacgatgttaataatcgcgtccggcttggcgtcaaacagaaaatcccggctgaccagctcctcagacgtatagggggagagcgagtagatgcccggcaggtctaccacccatgcgtccttctggcgcttgatctgcccttcctttttctccaccgtcacgccggggaaattgcccacgtgctggttgctgtcggtcagctggttataaagcgtggttttaccgcagttttggttgccgataagcgcaaaggtcagcttcataccttccctcccaccggccgcaccgcggccttggctacgctttctccctcggccagcggctgcacgtcgatcttgtccgcatcgtccaggcgcagcgtcagctcatagccccgcacggtcaattcgatgggatcgcccatcggcgctaccttgcggatgatcacccgcgtcctgggcgtcagtcccatatccagcagcctgcggcgcagcgcgccgctcccgcccacctgtacgattttagacggaacgccgatcttcatttcactcaatttcatcttcccaactaccccgcttaattgcgatgcgccatccgggcggcggcgcatcgagttaatgtatcctaacacagcctccgccaaccatgatgccacaacccccttggattgtcaatattccccggccatgccttgcgtatggattatgatctactcaatatatatcccggcatccagtccgctagaaccggtcgcataatacaaaagggaaggggaccaaaaatgtcctcttccctttcaatgcgtgtatgcaaaggcaattaaccctgttttttaaagtgcccgcgcgatgcgccgcacagcgggcaggtaaagtctgccggcgtttgagagaaatccccctcaaaggtgtaaccgcaccggtcgcacacatatttccccggcccctgctcaggctgcgatacttcctcggactgagcctgataggtgggtgcgttcttcggcgcccgtcctttgaccacctcgtgataatagcggtaggtcatcggcatgccgtccgcgcccttaaaggcatcctgcacccgtgccagcaccacgacgtgggtctccatctccatcgtggagatcaccttgcaagtgataaacccgctggaaccctccttcaggatcggcaggccatccgccgtcaacgcatagtcaaggttctggaatttatcctgatccctgccggaagcaaaacccagcgcgcctatggcctccggccgcgcctgctcggtaaggatcgaaacgctaaaggcgcccgtacgcatcatcacatcataggtatagttctgcttgttgatgtttaaggcgattaccgggttttccgccgtgacctgcgtaacggtattgacgatacagccgcagggccttccgttatccgatacgcctatggcatacatgccataggaaagctgccataaaaccgcgctatccatcgtcattccttcggcttagtagttctcagccttgatttcgaaataggccttgggatgcgcgcataccgggcatacctcgggcgccttggggcctacatggatgtggccgcagttggcgcacttccaatactgcacgccgtcgcgctcaaacaccttgcccgcctcaacgttggccagcagcgtattgtagcgctcctcatgctccttctcgatcttggcgaccatctcaaagagcgcagcgatcttgtcaaagccctcttccttggcttctttggcaaagccggcatacatctcggtccactcatagttctcgccggcggcggcatctttcaggttgtcggccgtctggggcattccatcgtgcagcagcttgaaccagattttggcatgctctttctcattgttagcggtctcctcaaagatcgcggcgatctggttgtagccgtccttcttggcttgggaggcatagtaggtatacttattgcgggcctgggattcgccggcaaaagccgccatcaagttcgcttcggttttagatccttttaaattgctcatcgtagtctctcctttttctcgattgtataatctttatttgttcaccgccgcgcccccagggcttggcagggaatatcgcttttagcccaatgccacatccatcatcatcataatggcaaacccggcaatgcaccccatcgtagccaagtgcgtactctggtggtcgcccgactgcgcctccgggatcagctcttccaccaccacatagatcatagccccggcggcaaatgccagcgcatagggcaggattgcctgcatactgctgaccagtgccgcgccgatcacgccggcgatgggttcaacgattccagacgcctggccgtagaaaaagctcttgcttcgggaaaggccctcccgccgcagcggaatggataccgccgcgccctcagggaagttttgaaggccgataccgatcgctaccgccatcgcgcttagcacggttacctcgctcatcccgtttgccgcagcgccaaaggccacgcccaccgccaggccctcagggatattatgtaaagtaatcgaaaataccagcaaaatgctgcgccgcagcttggaaggcaccccttcagcctggctctggccgccctcagggcccatgtggatatgcggcagcaggtgatccgccgccagcaggaaaagcgccccgccgataaagccaatcgcggcaatcatccaagccggtatcgcccggccctgcgccatctccagcgccggggccaacaaagaccagaagctggccgctaccatcacgcccgcagcaaagcccagcatcgcgttaaacacatgcgggcgtatctttttaaagaaaaataccatagaggcgcccgccgctgtcaacagccacgtgcccgtggtcgccgccagggctaaaaggaccggatcatccatcgccttcgcctccaagtcatttttttaatcgctacccgtgcgcttggcctcctggcactgtgggcaggtgcccataaatacgatatcgtggctttccatctcgtattccgtcatctttgccaccgtctcatccagctgctccagatagggcaagtcgatgtccttgaaggtgccgcagaccgtacactttatatgataatgatccgagcaggtctggtcgaaccggtctgccgcatccggcacggcgatgcgccgcagtttgccctcttccgccaggatattgaggttgcggtaaaccgtggcccggctaatatccggataaatcgccttgaccttatcgtacacctcgtccgcagtagggtgcatgccatggtcgattaccgcttgcagcaccaattgccgttgaatcgtgttccttttcttcatagcctccactaccgttcttcaagtgaaatttattctttattgatattatatatcaaatcaaaggaaagtcaatagcttttggacaaattttccacggcaagcaaagtattctactggtttagtatcgcttttttatgtcccaatatacctgcctatcgccccgctgccattatttttaaatttgcgtcgttctcaaggccgctggagcgcaagacctctcctccagtcagcacaaacaacgcctctacacccggctgcgactcgatgattgccatccccttttccgggccggctacaaagcaagcagtcgacagcgcatcgccttcgaccgactggctggaaaatatcgtgacagaggccaatccattttggacagggtaacccgttttggggtctaaaatatgatgatagcgctgcccatctacctcaaaataccgctcatagctgccggaggtcacccaggatagatccgtagcggtgtaggtggccatcaacgtgccccgttcgcccgccggatcctgtatgccaatggtaaagggacgcccatcggccaggccgccaaaggccagcacattgccccccaggtcgataatggcgtggcgcacgccgcggtcctctaaaaattccgccacccggtcagccacatagcctttggcgatgccgcccaggtcgatctgcgcgccgccgtttaagcgtacctcattgccatcgcgcatctcaatcttatgataatcgaccttcgtcaaagcctcctcaatggcctccttgcccggcacccggggctgctctgtcttaaaattccacagctgggtaagcggcgcggtggtaatatcaaaacagcctgcgctcaaatcagaataagcggtcgccctttccagcagcgcataggtctgttcatccaccttcacccactcgccctgcgcggcgttgagattaaatacatcactgccgggttcggttcggctcaaaagcgcatcataccgctggcacagggccagcgcctcgtccagcacggccgtatccacgtcgccataggccgttagggtaatcaccgtatcaaaggcaaaatccgttttggatacggcttgtttttgccccgtgcaaccggataagacggccagcagcaggcacagcaccagactcatagacctctgcttcaatttaaccgctcccttcaggatctctttgtatgaaaagacggcgcatgggtgaacatgcgccgctttgcagctttaactatttgctggctttgccgctcatcttaaccagcagccaggtgagcaggaagatggcgagcaccaccacaaaaatagcgcccattccctggcccatcaacatcaaaggcacctgtaaattcatatgcaatccctcctacagtaacccgggcagcagcgccaagatcacgccgcccgctacgaccgatgcgatctgtccggacacgttcgcgccaaccgcatgcatcagcaggtgattttgcgggttggcctccagccccagcttctgcaccacccgcgcagacatcgggaaggccgagatgcccgccgcgcccaccatggggttgatcttatttttggagaacaggttgatgatcttggcaaacagtacgcccgcaaccgtgtcgaatacgaacgccagcagccccaggcccatgatcatcagcgtctgcacgttgacaaagttttccgccttcatactcgcggcgatggtgatgcccagcaccagcgtgatgaggttggccagctccttttgcgcggtttccgacagcgagcgtagcacgccgcactcgcggatcaggttaccgaacatcaggaagcccaccagcgatacgctggccggcgctaccaatccagccaccagcgttaccacgatggggaacagtatgcgcgccagcttggataccttcatgggattgtacggcatggcgatggcccgctcttttttcgtcgtcaccagcttgatggcaaagggctggataatgggtaccagcgccatataggaataggccgccaccgcgatagccccgatatatttgctgtttaacacctgggataccagaatggacgtggggccgtccgccgcgccgataataccgatggaggccgcgtcccttagatcaaatcccagcatgcaggccagtaaaatagtcaaaaagataccgaactgcgccgccgcgccgaagaacaacagcttgggatttgaaagtagcggaccaaagtcgatcatcgcgccgatgccgataaacagcagcagcggcagcgcttcggccgcatggatgcccacttcaaacatccagtccaaaataccggtaacctcgccgatgcccgccatctgctgggtcagcgcgccggaaaacggaaggttgaccaggatcgcgccaaagcccatgggcagcagcagcgccggctccatctccttcatgatcgccagatagatcagcaatgcgccgatcacccacatcagcgcctgttgccaggttatcgccatgatgccatcgagtagaaatgacatgggattccacctctctaaacctttttatttatattcaagccgggcaaagcccggtcgaaaccgccataccctatcccgcgccaggccgcagcgcgcacgcttcccttattatgctggcctgaccgcactttcatgcggggcgcgatataccccgacagaggtggacaagaccttcaacaaaaaaggcgcggcttatgagtcaaaatcaactcataagtctcgccttttaaagttaaaccagggtagatctgacgcatccgcccatgcttgttggcttaactacatattgctatgcagactactcccctatttcagatataattgtctttacttatcttacacgaattcccaccatttggcaaccgcccaaagcggtaaaaacttctaaagttggcgcgccgtattttttgccgggcttggaccataatagcatcagaggtgattatattgttaggtgtgattatgagcatcatcgccggcgcggccatgagcgtacagggcgtcatgaacacgcggttgagtgaaaaagtcgggctatacggctctaacgcctttgtgcagggcacggcgtttgtgctatcggtcatcgccatgctggtgatgggcgagcatcacaatttaaaaggattattcgacgttaacaaactatacctgttaggcggtgtgttaggtctggtcatcaccgtcacggtgatgatcggcatcaaagatctgagtccgaccatcgccatctccacgatcctgatctctcagctgttggtagccgcgctgatcgacgctttcggcctgctgggcgctgaaaaagtggcctttgactggaccaaatacctgggcctggcgatgatgatcggaggcgttctggtattcaaatgcaagtcctaatcgagcggctacccttctaaacgcttgtctttagcgcgcgggctacggtataatagccttgaagaaggtgacgctatgaaaatttcgaccaagggacgctatgcccttcggatgatgctggacctggcgctgcacaacgacggaagcaatatctcgctgcgcagcatcgcctcacgccagcaaatttcagataaatatcttgagcagattattaccatgctggtccgggccggctttgtacgcagcacccgcggcccgcagggcggctaccggctatctgccgaccccaagacctatacggtgggggctatcctacgcctgaccgaaggcagcctggcgccggtggcctgcctggaggggccggataacccttgcacccgccgcgaccagtgcgcgaccctggaggtatggaagcagctggacgaggcgatctccagcgtaatcgaccggatcaccctggccgatttgatgcagatacagctgcaaaaagacgcgcaatccgtactctagcgtgcacgataacaaagggctagcctgacgcgcgccgctgcaattgcagcggcgcgtttttcatatcctacttaaaatacgcaagacaataggcgcatctggtgttatactatagataaatcggccagcttgcttgccgaaagaaaattggattaaggtgatgcatatgaaaatcgcagtcgtaaatgaaaccagtgcgggccatcgcaatcccgatgtcatgaaagctttggagaccgcattggcgggccaggggcatacgatcatcaacgccggcatgaaacagcagggcggggatccggagctgagctatatcgagaccggctttttggcggcgctgctgctcaacaccggccgggcggactttatcgtgggcagctgcggcacgggccagggctttgtcaacgtggcgctgcaatatccgggtgtgttttgcggcctgatcaccgagccgacggacgcgttcctctttgcgcgcatcaacggtggcaactgtatctccctgccgctgaataagggctacggctgggctggagacgtcaacctgcagttcatctttgaaaaactgtttaccgcgggcagcggggcgggctatcccgaatcccgcgtagaggcgcaggccaagagtcgcgagctgctcaaggagatgagcacgcagacgcacctgccctttaaagatatcttgaacagcatggatcaaggcgtgctcgctcgtacgctgaccttccctggcgtgtgggagatcctggacgtggataccttggaggatgcgcagctcaaggccatccttatcgaaaaatataataacgctaaggcgtaaacggtttataaaaaagggccagctcccaagggggccggcctttttttgatccattgacgcgaagttaacccgccctttataataaaggcgttatcctttaaaacggaggcgacccatcttgcggcaaaagacctaccgcgataccctgcacgcctgctattggggctatatcacccaggcgatcatcaacaacctggccccgctgctgtttgtgatctttcagacccgctttgccatctcgctgacgctgatcggccagctgatcctgctgaatttcggggtacagctgctgaccgatcttttcgccatcaaattcgtagataaagtgggctaccggtttgcggtggtgctggcccaggcatgcagcgcgctggggttgatccttttagccgcgttgcccaatttgctgccctcgccttatgccggattgatgctggctgtggtaatctacgccttcggcggcggactgattgaggtattgatcagccccatcgtcaacgccctgcccggggacgccaaagcctccgccatgagcctgctgcactctttttactgttggggccaggtggccgtggtactggtcagcacgctggcactgcactttacgggggatgggatgtggccacttttacccctgctctgggcgctgatcccgctgtataatctgtttttgttcttgcgcgttccgctggcgcccatggtttcagcggaggaaaaaacgccgctgcgccgtctgtttaccagccgcattttcgtgatcgccatgctactgatgctgtgcgcgggcgcttcagagctggctatgtcccagtggtcctccctgtttgcagagaaggggctgggcgtgcccaaggtgatgggggacctgttggggccctgcctgtttgccatattaatggggctgggccgggtattttacggcatttgggggcataagctgcgcctgcggcgggtgctgatgtgcagcgcactgctgtgcgtggcctgttatctggtcaccgtattttcgccctggcccgtgctttccctgctctcctgcgcactttgcggactttccgtcagcctgatgtggccggggatgctcagcctcacggcagaacgctatcccgccgggggtaccgccatgttcggcgtgctggccttgatgggcgatttggggtgcgcccttgggccatggctggccgggctgatctccgatacggcgcaggccgcgccaaggctgatggcgctggggcaaaccctgggggtggcgggcgaacagttggggctgaaatgcggcctgtttgccgctgcgatattccctttgctgatgttgggtgggttggcgctgatgcgtgtaaagcgccgcacctaagttcaccggcgccgagcggttttctcttctgccggccttacttgcaaaatgataaagttcacgcttatacaaataaagggcaggtgaaatgccatcacctgtccttttaaaatccgttgagctggttaccactctaccttttccacgtccatggggtgcggattgacctccacccggtccaccttaccgctcttaatgcggatcactttatcgccaatagcggtcaatgccaggttgtgggtgatgatcaccaccgtcatccctgtagcgcggcaggtatcctgcaaaagtttgaggatggccttgcccgtggcgtaatccagcgcgccggtgggctcgtcgcaaagcagcagcttggggttcttggccagcgcccgggcaatagccacacgctgttgctcaccgccggacagctgggaggggaagttgtccttgcgctcttccagccccacatcccggatcacttcgtccagatccaatggctgccggctaacctgggtagccagctccacgttctcccgggccgtaagattctgcaccagattataaaattggaagacaaagcctacatcataacgccggtaggtgatcagctccttgcggttaaatgcgctgatctgcgcgccatccaccgtgaccgtgccgctggtcgcactgtccatcccgcccagtatatttaaaatggtgctcttgcccgcgccgctggccccggcaatgatcacgaactcgcccttggcaatgctgaaattgacgctggagagcgcctccagcgccacctcgcccatttggtagacctttttaacatccttaaaaacgataaaatcttgcatatttattctcctttgtaaccctgcctttattctaacagatggatagaaacggaacaaccgccggtttgccgcatgtaaatttcagattcactgtttatttacaaattcgaaacaaccgattcatcgccgccttttatgatgataacgtcaaaatgaaaggagtggtgcagatggccgccagccctaatgtattccgccgcgcggagaaaaaatacctgcttaatcctcagcaataccaggcgctgatgcagcgaattaccccggagttggaggcggacgcttatggggcgtataccatctgcaacatttatttcgataccgcgcatgacgagctgatccgccggtcgatcgacaagccgccctataaggaaaaactgcggctgcgcagctatggtacaccaaaggaaacggataccgtttttttagagcttaagaaaaaatggaagggtatcgtctacaagcgccgcgcctgtatgtcgctatctcaagcccgcgccctgctggctggtgagcggcctgaagcgcccagccagatcctgcgggagatcctctacttcttggatttttaccatcctgtgcccaggctctttctcgcttatgaccggttggcctaccacggccgcgaggaccagagcctgcggctgacggtggatacccacatccgcagccggcggcaaaagctggacttagctctgggcagccaggggcggcccttgctggagcaggaggcctacctgctggagatcaaaccccccacggccctgccgctgtggctgactcaggcactgaacgcgcttaagatctatcccgtatccttttcaaaatacggcaatgtttataaaagcgaaaagttcgctttacaaaaggagtgtttgaaccatgttctcaagtattctgacggccagtacggagaccctgtccataaccaatgcgctgatctgtaccgggacggccctgatctgtgggttgatcatcgccctggtctatatgatccacagcacctacactaaaagctttgtcatctcgctggtattgctgcccgccctcatcggcgtcattatcatgatggtcaacggcaacttgggcaccagtgtggcggtgcttggcgcctttagcctggtgcggttccgctcggttcccggcagctccaaggagatcaccagcatcgtattcgccatggccgtgggcctggccaccggtatgggttacgttacctttgcggggctgatcaccgtgctggtcagcgttgtgctgtttcttctttcccgcacgccttttggcgagacgcgcagcgcgcgggagctgcgcgtgctaattcccgaagacctggattatactgcggtatttgaggatatctttgcccagtatacccgcacacaccagctgcataagatcaaaaccaccaaccttggcagtatgtttgacctgtactatcatattacgctcaaggatccggcacaggaaaaagcgttgatcgatgcgctgcgctgccgcaacggcaacctgaccatcgtatgcaaccattctggcggcagccgcgaagagctttaacccctccccacagaaaggaggcccaccgtgagccgaaagaacaaagttttttatacctgtattgcattgctgttgagttctgcactgctgcccggatgcactagtggacaaaatgcccaaagctcagctgcttcctccacatccgccgcacagcagagtgcttccggcaccgaacagggcgcagtatccgttacccagccacaggtgacctttgacgcggacgacagctataccgcctgggacgagggcagcgccaccgccatcgcattttccggcacggccgcatcggtttccggggcgggggtcagcgtcagcggtaattgcgtcaccatcacctctcccggtacctatgtgctgaccggcacgctggaggaggggcagctgatcgtagatgccggaaaggaggatgtggtgcgcctggtgctcaacggcgtaagcatgcactgctccacctcctcgcccctttatgccaagcaggccggcaagaccgtggtaagcctggcgcccggtacagagaataccttaagcgacgggagcgattacgttttcccagatgcggaaagcgacgagcccaatgctactcttttttgcaaagacgacttgacgctaaacggcacgggcagcctaaccatcaacgcccagtttaacaacggcatcgccagcaaagatacgctcaagatcatggaaggacagatcaccatcgacgcggcggacgacgccatattggggcgggatctgctggtggttcagggtggaacggttaccctacgcgcccaggacgacgggctgaaatccaccaacgatacggacgccgccaaaggttccatcgtcatctcgggcggacagttggacatcacatctcagggtgatggcatccaggcatacgcgggcctgttcatcagcgggggcgagctgcgcatcgtcactgccagtggcagtgccaacgcggcggcgcacacagatggcaatgagatggtacgcggcggcttccccagcgcggagcaaaccgcgcaggaggatgagaccagcgccaagggccttaaagccggcggcctgctttccatcaccaacggcacgtttgaccttgatacgctggacgacgcgctgcacagcaatggcgcccttacgatatccggcggcacgcttgccctggccacgggcgatgacgccctgcacgccgatggggcgctgtccgtttccggcggcacgcttgatatatccgcctgttacgaggggctggagggcacgagcatcgatatttccggcggtgagatcgcccttgtcgccagcgatgacgggatcaacgccagcgacgggagcgagacgacaagccaaggcatggcggcgcccggttcgggtgggaacagcaactgcgccatcaccatcagcggcggcacgatctacgtggatgcctccggcgacgggttggattccaatgggtccatcacaatgagcggcggtaccctgctgatcagcggaccggtgaacgacggcaacggcgcgctggattttgacggcagctttgaagtcaccggcgggctcctcatcgccgcaggcagcgccggcatggcgcaaacgcccacacagcagggtagccaaaacattctctccatgacctgcacggcccagcaggcggccggtacgccgatcgttctgacggataaagagggcaatacgctggcgtcctttacgcccgacaaagccttccgcaacgtgatcctttccctgcccagcctggcagcggacagcgaatatgcgcttacctgcggcgataatacggtcagctttaccgccgccgagggcatcacctatctcaatgaaagcggggtgaccaccggcggcatgggcggcaatatgggcggaaccggcaatgggcgcataccgggcggcgatgggcaaacgccccgcgggggcaacggcgcgccgcgaaactagagccattaggaaggacgggcaggggataatcccttgcccgtccttgctttattgtgtgtcgtaatgtttaattgccatcccagtgcaccgctggaatcacggctgtccatcctcccaatcctcccccgccagggacccaaagcccgctccgcattggatctgcacctgtggtatagggatccgaacgtcattttgctgtttatccgcgtacacggcgctatgggcaataggctttagcccttctcccccgccggtatgccgcagtaaaaagtgcagcgtagcgccctgcgccccgtctacgcccagcgcgtcgatatcccatcttaaggtccgctgcccgatcctgcgcgcgcgccctttgctggccttgggcgtcccgatgatgtgaaacgctctgccaaaccgctcctggagcacgagatctgtcgcccccgcgcaggtaaggctatgcgttagattcttccaggccgtccgggcgcccttatgcggcaaaaacacgtgcgccccttcgggcccgctggcccaggcgttcaatgccagggtatttacctcgctacgggaagagacgcctacgcaatagatttctacgcccatctctctgagtttgtcggcggccttggcggacggcccgcccgccgtatgcatgccgtctgtccataagatcaacactttacggcttgcggattgcatattgaaaagcgcccgcgccttgataaacgcgtccgcgtgattagcctttccgcctacgcgcagcttattcaatctgcgccgcagtcctaccgctgcggtgatgggccaaacctcaatataagcttcgtcgctaaagctgatcagccccatccggtttcctgcgccgatatgatccgcccggccgccatgggtttgtgcagctaccaaacggatcagccgcccagccatctctttgacctcgcccagcgcctcgccgcccatgccgtctgacgtgttgaccgccaaaatgatatcgcagggtttttccagcaagctcggcgccgcggccaaggtcagctggacggaaaaaatttcgtcacagccaatataacttttactaacgttttgattgatcaatgtcaatcccataaaaaacacccctttgcatgtgagatatacaaatcctatatatcttatgccgcaaagcgtaatggtgtttttattgtaaatggatatatcccctagttccgcccgggctgcgcaccctttagggcttaatgtaggcgaagccctgcgcctgtttttgcgccaattcgacgacccccgctggcaccgggtgtacaaagccgctcagctcctcttgggagatgcccaatgcccgcagcgcattttggcatgcggcaaattttgcgccctgctggcttagcgcctgcatttccgcttccagatgtccgctttcacgataagttaagaccgcctgactgttagctacgacctcgatctcataagcgctggcgttttgccggcagtaggccaccatattttttacattccccagggccaggggccatttttcctcctcatccacatggaatatcacgcgcatcttgttccctccacttcatcgttttttactattatacgcttgcagctcccgcgttttccatgcccggcagggtgctttgggctacaccgccgcgcaataaaaaaagccgcagttccctgcggcattgctccgttttatcgccttattagtccctggcctgttccctttgttcagggagtctatcgctcccggcagcgctgtccatcagcttgatcagctccagcgcgctgcgaaaatttcgggtttggttcgcttctacccaagtgatctgaccctgccagctcgcgttttcgcgatactgtacctgcaccataaaggtagcctttttccccgcttctggtttttccttcatcttttccacagtcccttttcccttatccttttgcactttaaccctttgcccaaaagaccggctgaccgtcgtagccctgggcgcgttgacctcgtcaaacctctcctccagccgcaacagcaactgattcaggtctttaaacgcgcctttccccgtggcggcatggtaaaaccggcccaatatccgggattcctcccaagcgtctacgcaaatccaaattcccgcccgcacccttgccaccctcccctttttatatccttatcctatcacgtcagggtcgcagcagcggtcacgcatatccaacatataggcctttattccgtaaaaaacgccctccgatttatcgaaaggcgcaaataccgtcgtctgttaccaactcgccagcgcctgattttcgcgccgttccatcatttcatccatatccgcggcggagatgcatttaaaatccagctgaacccggcccattctgggaaaccggtgaaacctgtgccgaatccgctgggcaacgccgtcgcaatcctcctgcttaatctccatcagcatcagcacgaattgggaggagctgtagcgcgtgtacgtatccccccgccgcagcgattccttaactgcagcacggaaactctcgctcacctttcgcatccgttccccggtaggcagcgcctctccatcttcctccttcagggtgcacagcatcaaatagaccgaatgtgtgctgcgctccatatgccgcagcacaaagcggtataagctggtaaaaacctccaggttgcaaaaataggcgcccggctcccgctccgcctccgccatccggctgcggacctccacgaccgatggcgttacctcctgcaccccgctagagataatatcaaactgttggcgcagccgctctgtagggccgatgcccagatcgttaagcagtgtggcgcaaatcgcctcgtacgcctccagcgcctcttttacccgcttggcccggtaaagcgtatccaaatacaacacggccagcgtttcttcatagggatatagctttacggccttgcgcaggtatggcaaaagcctttcctgcttgccggtgtggttggccagcgcgcaggcgcgctccaggcactccccatacagcccttggtagcgcaccgcgtagccgaccacccacggttcacgcgaaaagcgcggcaaaaatccgctatcgtaaagttcggctgcctcaagatattgcgccagcgcctcatcgtccggcagcggattctcccgcaaattctggatgcgctgggaaaaacgctctacatcgaccgtacaaggcaccgcagagcaaaagccatacgcgccctttttatactggatgcatgcacgggtaacgcccgcggcctccagggtcttgcgcaggcggtagaccaggttcttaagcatccctacgggattttcgctttcctcatcccgcagcaaaatgccgattaactcatcctggcggatcatctcgtcccggttgcaaaccaggtaggcaaacagctgcagcaccttgctgttgcggctgttgcgggccaccacctcaatttggccgtaggaggcctggaaccctcccagcatttggatctgaagcaccgcctcttgtgtcataacggtatatgctccctttctatcggtatatattctaggtattatagcacaatgcgcagccggcaatatactttataatcaactattttcgcctttagacgcgcaatttcttgcgcatcagctcggcggacgcgctgtgcataacagcatcctccggggtaataatcccctcattacacattttgagcaagctggcatccatcccgaccatgccctcagctgccgaggagaagatcgccgtatcgatctggtgcgtcttggcctcgcggatcatattgcggatagccggattgcacagcataatctcaaaggccggggccaccttgccgctcttggtcataagcagctgctgggaaaccacggcctgcagcgcggtagaaagctgcacgcggatctgcccttgttggttgggcggaaaggcgtcgataatcctgtcgatggtattgaccgcgcccatggtgtgcagggtcgaaattaccaaatgcccggtctccgccgccgtcatcgccacgctgatagtctcataatcccgcatctcgcccagcagtatcacatccggcgcctggcgcagcgccgcccgcagggctacctgatagctttcggtatccgtatcgatctcccgctggctgataatgcttttatcgtgccgatgcaaaaactcaatggggtcctccagcgttaccacgtggcatacccggctgtggttgatcgcatcgataatacacgccagggtggtagacttgccgctgcccgccgggcccgtgaccagcaccagccccttggggcgcttgcccagctccagcacgatatccgggatacccagctccttggggtccggcagttggaaggcgatcacccgcaccacggcggccagcgagccgcgctggcggtaaacgctgaccctaaagcgggaaaccccgaccagtgagaaggaaaaatcatcatctccggtcttgagcatccgcgccgggtcccgctgccccagcgaatagatctccaggataatgcgctccgtatcctccggcatcatccgctcctcgcccatgcgctggatctggttctttattttaaaggacagctcaacgcccgccacgataaagatatccgaggcctgcttttccgccgccgcttttaagatctgttccgcttgcatgccctacctcctttagtgcagcaggttcggcttttgttcctgctggttctgctcgctttctacctgccacagctgtttttgccatccgccgccgggcagcccatcctggttcagcattaaggcagcacgtacctttaaggtccgccgcgcgtcgatctgctgtgtaaacgccaccgttaaggcgcggtcttccaccgtataatggacgtcctgcgtctccagcgcctcctgccattgcgggtttccctttaccgccgtcagaatatccgccaaatgcgtttcggcctcaaggtccgccgcgtaataatcccgtaccgcctgggccgcgttatccgccagcgccttgtccgctctggccccggtcagcgccagggcggcaaacgtggttaaacagagcaccacaaacagcgtcaggatcgagatgctcccggtgccgatgctaaaaccgcttttgcgttcgttcatggcgccacctcccgcaccagcacaccggtgttcagcccaaatatctcctcttgcgccttgctgacggtaatctccgcctgaaccagcgcatctttgcgcgtcagaagaacggtcagactataccgcccttgtgcagcttggcgccaatcctcatcatagcttacggtcacgccgtcctggccggcagagccctccagcagccgcgccagctcttctttctcgccccccgccgcctctaccgcctcagcagccgcctgcgccttgagcgtagccatcgacaactccgtgctctccacgctcagcaccttggccttgacgaatagattggtgcagaccgcggcggcaaaggaaaagaacaccaggatgatcgccatctccaataaaaaaagcttgcttgatgatcgctgcatatccgtcacccgatcccgccgcccacaagggccacggcgccttcatacacttgtccatcctgcccggttgcggcgatctgcatcaggtctcccccggccatgtgcaactccaacgcctgcagcgccatgatctgctgcccatcctgcacctcggcctgccggcctttttccagggtcacctcgcgcagctgcccttcgcttacaaagatccaggtggcataggcctgcccgccctcgtgctgatataggatcagcgcgggcgaaccgcccaccgcgccgatctccacctgccccggctcacccgtctggcgcaccttctccgtcaggtagatgatcgagctgcgcgcatcggtattggcctgcatatccctcgagatccccttatacacattcgcccccaacaccaccacgaacagcgctaggacggtgaacacgcagaaaagcgaaagggaaatcacgatatccgttacatgccgcttacgctccatctatgccgcctcctttccgtttcactccgccgggaaaacgctgatctccggcatcaggttcgacccgatactgttataatggtaaacatatttatcccggttgaggatcaacccgtattgggtctgcaagtactccaggtcgctgggatactgcccttcaatagcatagcattgcaccgccgcgcggcgcacggcccgctgggccgcggccagctgctcctcacgtgtggtgttggacacatcccgtgcacccagggtcacacccaccaatatcgccgcggcaaataaaaccgtcagcagggcgggtagcctgcgcgccagcccacgctgagacctggcgaaaatatttctggccatttttgctcctatccttccatccttagccgatcgcggacataacacccagcagcggcagcatgaccgagagcaggatcatccctacgatgatcgaaaggatggccaccagcgtaggttccagcgcggcgatcagcgcccccagcctgcggtcggtctcctcctcataacgagcggcgatcttgtgcatcacactatccagcgcccccgtctggaaaccgatggtcaccatttttccataaaggccggaaaacagccccgctgaaacgatcgcattggcaaagccctcgcccgcggccacctgctcacgcgccgcggcgattttgcgcctcacccgctcatcctcgatcagatccgtagccatctccaggcactcgtccacatccataccgctggagagcatcagcgccatcgcggaggcaaaccgtccggaagaaagcatatcgttcgttttgcggaaaatcgccgcatacagcgcggaaagggcgccacgccctttggggaagctacgcaggatcaaaaaagccagcaccaaagccaccaacgcgccgatgatccaggcagaatagcggctgaccgtagcgccaaagtccatcataccctgtacaaaggcgctgacctccccgcccagctgggcaaatacctcctgaaacactggcaatacctcgatgatgatcaccaggatcaccgccaccatcaccgcgatcatcaccagcgggtaggttatggagctgcggatggcgcgcgaaagcgcctcgctgcgttggtagtatgcagtcagggcgtccaacacttcttccagccggcccgccgcctcgccgatctgtaccatattgaccatataattggggaaaacgccgctttccctaagggcgtaggccaagggctgccccatctccacgtgttctagcagctggcccagcagcaccgcgccctcgccccctttaaggtcctccgccatcatcaccaggccctcttgcagggtgatcccggccttgacgataaatgataattgctcacaaaacgcggcaatctcctggtttgagagttggcgcactttttttgccatcgtctttctccttccggccctaatagtaatacagctcgtggtaggattttccatctcccacatactcctgcgcgcccccgcccgtggaggccatggtcgggtccatccgggtccacttttcgccgtcaaaatagataatattattgatccaaccctgcccttcgatatacacgctgatccaggcgtggtacagctcgcccacgtatccgatcaccagcttggtggggatgcgctgcgtgcgcagcatcgccgtcatcagcgccgcgtaatcaaagcagatccccatccggctttgcagggtctcatcgatatcgggcagataattgctggtgggattatccgccttatcgtaatcgtagcgaatctcccccaccacaaaatcgtatatccgccctaccacttccagctcatcggccgccccttcggccagctgcgcgcccttggccaccgcttggctgtctgcgtcaaaatctacatactggttagggtataaaaacggcccgaattcgctgtccagcacaaccgcctgctccccgctgaatacctgggaatacttcgtgcccgaaatattttcatatatgccaattctgtactggccgtctcccgctgtcagcgggaagacctccggtacatccttttgcagattatacgtgtaggtttcgccctcgccacaggtgatctgtagcttgaccttgtcgttatcgccatcatagcgtacggtgatatagccttcaccccggttggaaacgtcgatccacaccttgtcgttgcccagcgtctccgttcccggcgcttcgggcaccaacacttggggcgccgcatcccgctcgggcatgcttgggcccgcgttttgtacagccgcgctgctttgcgcagggccatccgccccgccctggcagcccgctaccggcaataataaagcaagggtaagcaacagcgcaccggctctcaaggcctctttgcgcacacgcagcccacctttacagtactaaagttttataatatgcggggcctctgccccgcacctccagtataacggagcccctacgcgatgtaaagcgttggcgctgaccggaaggcgctccgttccggcctattatacagcaaccctgtcatgcaatggtcacatatctttatccatacgcatcgtattggcaagttcctaactacaggtaagcatgttttttgacaaagcagaaggtacaaacccgatatagtccgtagcgatgtgtttatccatgaccacatcaatgtctgatccacacatacaaaagcacgcagcccatataggtagtttgtggatcagatcagcgtcgcactggcggcggagtattacactatagatttcattaaaaaaatatcgcaatccactaaagtggattgcgatattggaagcggcaacttgccgctggcggagaggatgggattcgaacccatgtgcgctttcacgcaaactgatttcgagtcagccccgttatgaccacttcgatacctctccacatgataacgaacatcattttaccatatccgccgggccttgacaaggcccctgcaacagcttttctaacgcctatcctgcataaaggtgcgcatcagcgccgcacattcttcttccaaaaagccgcccgccacgcggcaggcgccctgcagccgttcatcctccggcagggccaagacgctcccgcagcagccatagcgcatatcgtaagcgccaaagaacaactgccccaggcgcgcttgcacgatcgcacccgcgcacatcgggcagggttccaatgtcaccaccatcgtacagtcctcaagccgccagtcgcccaccgtctgcgccgcccgccgcagggccagcacctctgcgtgggcggtcgggtcgcccagcctctcgcgctcgttatgcgcccgggcgatgatcctcccctcgcgcaccaccaccgcgcccaccggtacctcgcccgcctgcagggccacttgcgcctgtgccagtgcctggcgcatataatcttcaacaaaagtcattgtgctcacctgcattatttatggtagggctggttgcgcaggatgcggtaacccctgtacacctgctcgagcaggatcaccctgcacagctgatgtggaaaagtcattgcggaaaagctcagccggaactgggcgcgtttgagcacgcactcgtgcaaccccagcgaaccgccgatgaccagcaccaggggatttccgccctgctccacctcgcccagccaggtggcaaacgcctcggaagtgtacgccctgccgtcgatacaaagcgccgcaaccacctctctttcccgaattcgggaaaggatgcgctcgccctctttgcgcatgacctgctggcgctgtgcctcgctgagccgctcgggcgccttctcgtccgccagctcaaccacctcgaccttggcataggcctgcaggcgtttaaggtattccgcgcaagcgccccgccaataagtctcttttaaactgcctacggcgatcacccgaatatccacctgtttagcctcctatcagcgataaaagcatcaccagaatgcaggccacaaccgccagaataaacgggatcagccaagtccagcccctgggcttctcaggccgtggctgcgcctgggcctgggccgccttttgcgccgttatccggttaaagttgtaaagcagcacgataaagatacccgtggccgccatcgccagctgcccgatcgccagcccggaggccagcaattcatccaccggcagctccagcagcgtttgggcctgttgcaccgcgccgccggctgcggcctgcagcccatcggccgcggcgctaagcaatacgccaatggcattatttaagaagtgatagaccatccctgccatgaccgaacccgtccgataggtcacataccccattatgccacccagtatcgtagcataaagcagcgcccgcaggttcatgtgcagcaggccaaacaacaccgcggtgatcagaatggcgggccacttgccccagacacggaaggccggcatgatcccgccgcgcatcaacagttcctccagtatgcccggcaacagcgccaccatgcccagattcaccgccaagtcccatccgcccgagacctgcggcatgacctccggcatcgccgggtagccgatcgcatccaacaacaggctccagagaaagttaaaaaagatcacgaccgcatagcccaccacggccatgcccgccaccagcaacagctctccgatccggatgccgccaaattgcagggtctggcgcagcggcgccttgacgcccagataagcgaacaaaaaaaccggcagcgcgatggctaacccgtagatcaaaagctgcgttaggtagtccccgcccggcagatactgcacgggcagcagcaaaaaaggcagtacgatcatcccgatcgccgcagtaaagtacacccatcccgcttggaacaggctcagactcgctttggtttgattctccactttttcttgcatcctctatcccattttaatcagcgcgctggcgccatctgcgggagccagctgcaaatagatatccttccccggttccacctggcccgcgctaaggcagccgctgacagtggaaaaggccagttcaggcaggttattctcccggctcaggtgggccaagagcagcgcccgcgtgccggattgggccagcttcaacgccagttcgcccgaggtcgcgttactcaaatgccctttccggcccaatatgcgctgtttcagccttgcagggtatttcccccggcgcagcatctcctcatcatggttcgattccaacacgatcccctggcaccccttcagtgtttccagcacatccgggtgcgcatagcccatatccgtcgccaccgcaaagcggcacttcccgcttgtcagcacgtatcccaccgggtccgccgcatcgtgcgggatggaaaagggctgtacgttgatatcccggatataaaaatcctgcgcgcgctgaaaggcccggcggttgcgcagggccacccgctccaccttgggctccatggccgcccaggtgccctcattggcgtaaacgggcaggttgtaagatttggatagcacatcaatcccccggatatggtcgatatgctcatgggtgaccaaaatgccgctcagctctccggggtccacatccaaattgcgcagcgcgcccaccagccgcttggcggatacccccgcatccacaagcagctgcgtatccccgcagcggatcagacaggcattgccgctggagcccgaaaaaagcgtgcaaagttccattttttcctccttacaagcgtaccaaacgcccttatagcctattataacgtgaaaccccgccttgcacaaccggcgcggcgcgtgctatccttaataacgattgatacgctatatccttttaataccaaggaggcttttatgcgtgcgataactacacaacaaattaccgatcaggtgcgccagctgtgtatcgacgcctgctgcgcgctgccgccggacgccatggccgccctgcaaagggcgcgccagcaggagacccagcctttgggccgcgcgttgctggggcagttgatcgaaaatgcccagctcgccgggcgtgaaaacctgcccatctgccaggataccggcgtggccatcgtatgggtagaattgggccagcaggcgcgcctggccggcggcgatctggagtccgccatccatgagggcgtgcgccgcggctatcaggatggctacctgcgtaagtctatccgcgatccgctcaccggtaaaaacacgggcgataatacccccgctgtgatccatctgcgcctggtgcccggggatacactcaagatcaccgtggcacccaagggcgcgggcagcggaaacaaagggcagcttaaaatgctcaccccctctgacggtctggaaggcgtcaaggattttgtcgtgcaatgcgtaaaagaggccggcggcagcccctgtccgcccatcatcgtgggggtaggcctgggtgggaccatggagaaagctgctctgctctccaaacacgcgctgctgcgggaggtggggcagcccaatcccgaaccgcaggccgcccagatcgaggccgaactgctcgagcgcatcaatgccctgggcatcggcccccagggcgtaggaggacgcaccacggcgatggccgtacatctggaggtcagccccacccatatcgcctgcctgccggtggcggtcagcatccagtgcaatgccgcccgccatgccagcgccacgctgcacatgcaggacgtaaaggaggaaggctgatgtccgcacatgaaattccgttgactctgcctctggagccgcaagtcatctccaccctgcgcgcgggggatctggtatcgctcaccggggttctttataccgggcgggacgccgcccatgcccgttttgacgcattgttaaacaaaggcaagcccctgccggtatcccttgccgggcagacgatcttttacgtagggccctgcccgcctccgccgggccgccccatcggcgcctgcgggcctaccaccagctcccgcatggacaagtatgccccccggctgctggatttggggctggccgccatgctgggcaaggggccgcgcagcccggccgttcacgaggcgattatccgcaaccgcgcggtatattttgccgccaccggcggggccgcgcagctgttagcccagcgcgtcaaatcagccgaggtctgcgcctttccggatctgctcagcgaggcggtctaccgtctggaggtggagaatttccccgccgtggtagcgatcgattcgctggggaacgacctgtatgagctggggcccaggcaatatctggattcgctgaaataacccgccgcccctgctgatgattgtgaggtgtaaaagatgagcaaggcaagccaacgcctggccgcgcttaagcagctttaccgcagcgccacgcccgcccctacgacccggctggcccggcgcgaggagctcctgttgcccatggccgacggggtcgagctgcgcaccgtgttcttttttcctgcaaagcgcgagcaggcccccattgttttacagcgctgttgctatccggggatggcgcaggagattgagatccacggcgaagaatacgccaagcgcggatttatctttgtgctgcaatggtgccggggcaccggcggctcccaaggggaatgggaacccaacgtcaacgagcgcgccgacgggcttaccacccttcactacctggccgcccagccctataccgacgggatcggctattggggcaactcctacctggcgctgaccggctggtgcatggccgatgcgctgccgccccaggtcaaatccatgtaccttggcgtatacgggacggaccggcacacttccgcttaccaggatgggctcttccgtcaggatatcctcaccgcctgggcgcaggaaaatgccggcgtccccatagcctctaacatgatggattcctaccgctaccgccctcagctccatgtggatgaggcgctctggggcgtaagcctgccttggtaccgggattggatcagccataccgaccgcagcgatccctattggagccagggcttttggaagatgctcaaggatatccctggcaaggtcaatatccccgtctttatccgcgagggctggtacgatcatcacctgggcagcgcccttgtcacctatcaagatctatcgccccaagccaaggcgcacagcatcctgcagatcggtccctggaaccacgggtacgggctggcactcacccatcacaaggcagagcgcctggcagatgacagcgtccagtctcccctggcctggtttgaagagaccctgctacaaaaacggctgccccaaaaagccgtccagctttatgccatcggtgctgatcgctgggaaacctggccggactttcccgtgcgcgcccgccagatccagcatttctatctggacgccggcgccacgcaggacggggcgcatgcgctgctccccctgccgcccgaggcgcaggcccaggcgagctatgtgtatgatcccgaggaccctgtgctctctcacggggccgaatccctattccatacgcgagaggagatcggcagcctgccccaaccggcgtgcggctatcgtgcggatgtggtcagctttctctccgcacccactgcgcaggcctttgagatcaacggcaagctgaacgcccgcctgtttgtagcctccaacgccgaggataccgccttcaccgccaaggtgatggaggtctttgcggatggtaccacggtcaatatccgcggcggcatcaccaccctggcctatcgcaacggcgccagccagcggggcagctatacccccggcacggtggtggaggtcaatatcaccctttgggatatcgcctggctggtacagcccggctcccgcatccggctggatattgcctcctccgactttccccaatacgctgtacatagcaattatcccggcgtttgggcctgccaggcgcgtacacgaccggcaacacagcgcatctttaccggcggcgcttacccatcggttttggagataccctgcgcaacgcccgattaaaacggcaaaccccctccagctgctggagggggttttagttcttttcttctgcttaggtgttccaccggttgggatcccaatagctgcgcttattggtatccatcgcggcaatggcctgcatatcctcgccgtccagctcaaagtcaaataccttggcgttatcggcgatacgctccggctttaccgatttggggatcacaatgttgccagtctggaggtgccagcggatgatgacctgcgcgccggtcttgccatgctttttggcgatattggcgatcaccgggtccgcaatcagcaggtggtcgcggccgcccagcgggctccaggcctcgacgaagatgcccttgctctccgagtagggcttcacctctttttgctggaaggtggggtgaagctcgatctggttgacagccggcgtcaacagcccccgctgctccagcgcctggagatggtgtacctcaaaattgctcacgccaatggcgcggaacttcttttcttcgtacaggcgcatcagcacttcccaggcctcaatgtaattggtaatcggccaatgcagcagatacaggtcgatataatcggtatccagcttatccaaagcctgcatgctggcctcataggtcaacttggcctcgatatcctccgtgggcaccttagaggtgataaagatctcctcgcgcttgatgccgctgtctttaatgcccttggccacgtctttttcgttattataggccttcgccgtatcgatatggcggtaccctacctccagcgccgcggttaccgcgcccgccgtttccggccccggctccgagcggaatacgcccaacccaagctgcgggatcttaacgccattgttcagcgtaatgtccggacaattcagcatgtaaaaaacctcccccttgtaaattgagatatttgacaacgatactatcatactcgtaacgctatagttcgtcaacaaatataactaactttctttgttttcttgtgatgtgcacgcgcacggctataaaaaaagcaggacgattcgtcctgctctccatctttgaccttaatcttcgtccggcacccggcagatgtcggccccaagaccgaccagttttttatcaatctgctcgtagccccgctcgatatatttgatattgcgtatctccgtcacgccgttagccaaaagcccagctacgatcagcgctgcgcccgcgcgcaggtcgctggcggtcaccctggcgccggtcagctgctctacgccctctacgatcgccacccgatcctcaatgcgcaccagcgcgcccatccgccggatctcgtcgatatgtttatagcgggattcaaagatattctcggtgatcacgctggtccccctcgccgtggagagcagcaccgtgatcggctgctgcagatccgtcgggaacccgggatagggcagcgttttgatgttgacggccttgggcctcccttgcgccgtcacgcggatatagtcctcgccctcttccacctgtacgcccatctcgatcagttttgcgctcagcgcctccatatgggtagaaatcgcgccccggatggtcacatccccccgcgtagcggcggcggcaatcatcagcgtccccacctcgatctgatcgggaataatggtataattgcacccgtgcagtttttctacacccttgatacggatcacgtccgtaccagcacccttgatgctagcgcccatagcgtttaaaaagttcgccgtgtccaccacgtgaggctccttcgcggcgttgacgatcatggtattgcccttggccttgactgcacacatcatgatattgatggtcgcccccacagaggctacatccaggtagacctcgctgcctaccagttccctggccaccgcgtcaaagcagccgtggtcaatatccacctccgcgcccatggcccggaagccctttacgtgctggtccatcggccgcatgccaatgttgcagccgcccgggaaggggaccctagcccgtttaaagcgccccagcatgacacccatcaggtagtaggaggcgcgcatgcgctgggccatttcctcgggcacgtcagacgaggtcaccccgctggggtcgatcgtcatccggttgccctccagctcaatcttcgcgcccatcgctactaaaatatcccttaatacaaatacatcctgtatcagcggaaggttatcgatcacgctgatttcatcgctcaaaagggccgccggaatcaccgctacagccgcattttttgccccggccgcacagaccgtgccccggagcggatgcccgcccacaattctaaatttatccaagtctcactcccccgcaaaagagaacgccgcgggggttcctcctcccaaattcgccctagaaagaccagagccctgtattgccgaatctatgaaatgcggcgcagcgccgcctttatccttcgcaatttaggcatatacaaaagcaagccaaagggcataagcctccgtcttgctttgttgcctccatacacgggtttattttagcataatttaacgttttaggcaaaattatttctttggccttttttaccaatttcaattcgggtcaaaacattttgcgcctggccatatagatcgtcgccagcagcgtagccagcgccgcgatgccgatcacgatccagaaacccatggggttgctctcaaagggcaccggtacattcatgccccacagggcggccaccaacgccggcaccgcaaggattatggtcaccgccgccataaacttcataacgatgttgaggttgttggagatcaccgaggcaaatgcatccatggtcccggagagaatgtcccggtaaatggtacacatttcaatagcctgcttgttttcgacgatgacgtcctccaaaagatccgtatcgtccgggtattttttgatatagtccatgcgcagcaatttttccagcaccagctcgtttcccttcagagaggtagagaagaacaccaggctcttttccagcttcagcatctggatcagttccttgttcttcatggacttatgcagttcgccctctacgcgggtagaagccttgtcaatctgttttagatagctcaaaaaccgcgccgcgttgcggtaaagcagctgcaagataaaccgcgtccgcttatacgtataaaaggtcttgacccgcccgtcgataaagtcattgaccaggggagactctttgagcatgatggtgaccagcgcttcctccgtcagtacgatgcccagcggcaacgtggtataaacaaaggagtcattctccatctcaacctggggcatatccacaatgatgaggatgttggcatcctccacctcgatacgggcacgctcctcgtcgtccagcgctgcgcgcacaaaatccaagtcgatatgcagccgctcgctggtctgcaaaatctcctcctccgtgggcgccaccaggttgacccaggcgccgctaatggtatcctcctgctcgagcagcccatcaaaactggtaaattcgcgcagattctcctcgatcgtcttataaatcgccaacatgtttccacctgctttctcttatttgcgcctcccaaaagcggcgccaagaaagccgggcgtccgctttaccgggagaggctgggggcacatccccatgatcgcgcattccattccatctggttaccagggtcgccgtccacctatgcctcctcctttcataaaacgaacgtaaaaataaaacccctttgccaaaattccacggcaaaagggcctgcatgcaacatgcaatccacctcttttgaacgtagagctttggcacgttacagctttggcattggctaagccatgccagctacattaagtaaaaccttaactcggtaatacctgttgaccccggggcatctctggatgtttgggggcagcagcatgtatccgtaacggaacctcacctaacagaagagttctttatcattgtagcaccgcccggcactgtatgcaacacttgtaccgccggggcggcggtaatttttttggtaattcaagcctttttatacagtcgcaaagggccgcggcattccccgccgcggcccttttaccctactactataatttcgtttccggattgaccggagagccgttgatgcgtatttcaaaatggcagtgcgggccggttgagttgccggtggagcccatcagggcgatcgtctcgcccgcggataccttttgtccaaccgtcacctgtatcttgctgttatgcccgtacagggtttgcacaccgttcccatggtcgatcatcacgcatttgccatagccgccgcgccagccagcatagctgaccgtaccggccttggaggcgtgcaccggcgtgcctaccacgttggcaatatccagcccagcgtgcagccgtccccaccgctggccaaaacgggaggagatgcgtccctgggtggggaacaaaaagcccgagctgctggctgaggcgctcaccgcctggtccgaagcctttttggtgccccgcgccacgatctgcttaaccggctgcttggtcaccgtctcgctgagcacattgcgcgatacctcgatcccgttgacgtaggtgatctcagccaccacctcgcgggtgcccttttcaccctcctggatcacctttttctgcgtggtcagcatatccgcatcgtcctgatattcggtttcaaaatcaatggtatcctgcgtgcgcttttccaccaccgtctgtacattgaccagtcccttgctcttggatatggaaagctcatcgccgatatcgatcatatccgcgctgaccaactgaggattggccgcccgcaggtcgctggtccgcacaccgtattcctgagcaatttcggaaagggtatccccctgctgcacagtgtagctttgtacctggtcgggcgttgcgccatagcgcatcagcgacagcgctgtctccttatcccgaatatcctccggcgatacgttgctctgctctaccgttacttcctctacaaacgcagcggattccaccgtttcgccgctacgctcctccttatagggcgccagcagctggtcgaccacccactgggcctcttcttcggattgtacggccaccgccgtctggtcgcccaccgcaacgacggccgcgcggctcttgggctgagccacagctgctacctgttgggccacctgctgggcatccatcacatgtaagttggagacagccaccggctccacggtcaactgggcatccaccaccatctgcccctcggtctcccgctgcacctgttccttatacgccgcaaaggcctgctctaccgcctgggcatcctgcaccagcccggcctcgcgcccgtcgatatacacgcgggccgcctttaccgtgcgcgcctgccacatcggcacgccgatcatcaccgccgcgaccaagcaaacggccaatgcaccgcctaccgcgcgcttgatataaatatccctacgcgcccgccgccggtagcgactgggcatcggtcggaaacgcaccccctggtgggatgggcgctccaccataatggtatgtgcgcgcaccgcttcccggcgccgcggtggctcgctttgtgcgggccgggcaggccgcacgggctgcggcgtactcttttccgccttttcagcgcgcttggcgccgccatgcagatccagcgaaaacacgcgccgcttcttttctgcctcctggcgcacctcttgggcgctgggccaattcttttcacgtccgtccccattgccccacgggaacgcatctttttttctatctcgcctcatgccttttccccttactctgatggtttttgcagccctccttatggctgctgcatctcctgaagcaggctggagcggagtatccgcttgcgtccgcttaaccagtcgtgtaaatattcgcctgcgccgggcttttgcgcctccagcgcggcgtacaagtcatcgcccgtagccacctggtgcgcccgctgctccacataagtccgcagggcggcgtcaaaggcctcccggcccataaaacgctcggtctcccgcagggcataagcccccctggcgtatacctgcgcggagtattccgtgccgtttgcgtattcaaagctgggcatcaggctgttttgcagcggcggttctgggatcccttcaggggccatatccagcaggtctgcggtaataaagttgcgaaacgcccgcttttccgccgcctcgtcatagcgataaccataatagcgcatggtcatatactctgtaagcgcctcgtccagccaaggttcatccacctcgtcgttgcccaccagtccataaaaccattgatgggcggtctcatgcacggtgatcatctccagatacgggtatagctcccacgtccggtaaaaggtctcgtcgatctggaccagatgcgggtactccatcccgcctacgtaaaagtcggattgggctaccgaaagctgcgccccatcatagggcatcagcagtttggagagaaagtccaccgtatccttggcgtattccagcgcttgcgcgccgccctcttcattccaggcgtaggagcggatctccacatctcccgccatcgccgtttgcaccgtataacccctagaggccatcattgcaaattcccgcacgttttccgcctcaaagtagaggcgtttgcgcccaaagcacgcctgctgccccctctgctccccggtatgggccagcaccagttcctccggcagcgtcatcgtgacacggtagtccgcacactcaaagtagaacgggtcgccgttggcgtaataggggtccagattccatcccgtttcatcgtaaaccgccagtataggataacactgcccgaactggaagccgttcgccccctggccggtgcggtaattgagtttgggcagcgtaacgctgtactcgatctcgacccggcaacgctcgccgcccgccagcgcccgcggcagatccacacacaagatatcctcgctctggccgtccagcaccacgggcacatttttcccatccacccgcacggccgcgacctgcatcccgccaggcgaaaacccttcgggataggccatctcccactcttccttggggatgggggtattttcctcgtcggcaaacgcattggggtagaggtggaaatagatctcctcttgccggtccggcgccgtattgcagtagtccaccctggccacgccgtccagctggcgtgtctggggataaaaatccagcgccaagtcgtaccggttgcgcaggctggctaatccttccccgccgggcaggccgtaggcgagggctgcaatcaccagcgccgccacggcgcataggtaaatctgccagcatccttttcccggccgcgcaagcgtccaaagggaaaaacggccctttttcgccctaatcggccattttaaggccttcacccccattttatgcatccattataccctcctttatgccccttcgtcaaaaccctatggtttaccctattattctcggtggcaaaaaagactagctatggatgcacggccgccccgcttctggcaaattctctattggaagggaaccattaaaaagcccgggacaaaggctttacgccttcgtcccgggccggttaaccggtatgggcaacgattaaagttcccatccggataatgctattgtaccccgccgggccacggttatccgcccgtgtcccggatatttaattggtaatttttgttaaccctggctgccatcccggcgcaggcgcacatcctgccccgtcaaaaggaaggtagccgtctgctggggatcgatcagccgggagatcacccggtcgcgatagcggtctcgcagctcgggcagcgttaagttggtggtgatcagcgtccccttgccggagatcatccgctcattcagcacggcaaaaagctgctccaaggtcacattgctgatccgtggctcagcccccagatcatccagcaccagcagttccggggtaaggtaaagggcgctgcgccgctcgtatccgccgcccaagggctgctccagcagcgcctcttgcagccggtaggccgtagtggtcagcaccgagaaaccccggcgaatcacttccgaggcgatacaatgcatcaaaaaggtcttccccagccctggcgcgcccatcaacagaatgttatgcgtctcattcttgggaaaagcccgggcataatccaggcagaaatcccgcagccgcagcatctgcgcgcgctggttctgcgcgccgccctggggaaagatgctctcgtcaaaatccttaaaagtatgccttgggaatgcctccagccctgaatcccgggcgcacaactccgccagcctgcgctgggcgcaggtacataatacccgtccctgcgcatctgcaaaccccgtatctcggcaaagggggcagtcaaactgtagttcaagcgcagcggggtcgatgccctcgctctccagcagctgagcctggcgcgagcgcagcacggctaccgtctgggccgtttcctcggccaccgtctgggcggaggaaggatccgccagggcctggcgcgccgcagccgcctgcaaagcgccgatctgccgctcgatgtccgcccactggggcacctcttgctcgatctgtgcgcgcgcctgctccatccgcctgcggttgcggtcccgtttcaggctcaactcgtccaaaacctggcgcatccattcccgcttgcttccgggcacggcatccaccgcctttccattagagttttcgtatcacgccctctagctgttcaggcgtataatcctgttgaatgtactgctcccccggcaaattcctgcggtttccctcttggcgcttttccggcgtcttttgcaactgctcccgcgcctggcgcaggctcttaacgccttgttcatgccaccttctaagcaggctgtccatggcgtgtacccgatcccgcgcctggccctgcgcggcggattccgccgccagcattaccagctcaaagggcatgttccactcgcccagccatacctcacggtagcgcgccacatcatcttcccgcggggcgcgccgcaacccggcgcgtgcaaacacttctttaagctctccgctggcctgctcatattgcgccagcgcgccgcgcaccgcgtgcgccgcgatcaatccctggtccgccaagcgctccagcatccccgtcagctggcgtacctgatggaaaccctggtcgttgcaatagcgcgccgcgatcaggatcgcctcgtcgtccgcaaagcccagctcttgcgtccaacgcacccattcgttttgcatgcccgcagggtacgcgctgcccgtattgcccagcgcctcccaaacctggcgcaactgcgcctggcggtttacccgcgcctgctggtaatcctccacatcctgggcgctgcgcagcccctgacccttataattttccaatatcccgttgagataagccatcgagggccgcgcgcttttggtggtctcccggcaggcggccagcaccgcgtccggccgcaggccccagctctcggtccatttgcggtaaaggctcatctcctccatggtgggcagccggtaaatgcccagccgccgcaacacctgtaccgcgccggaagaagccgcctccgccccgcgcaggtattcctccgccgcctcataggtctttacgttctcctgcgcccaggtctgggccgccttatcgatataattgaagctgacccgcccgccctttttttgcaggcagtactggcatagcatcatgaccgcctcgggcgccaggcccaatatttcaatccagtcatacgcccgctggaattcctcgggtttgatcagccggcttccaaatatctgctgcaggctggcgttaaactcccggtaggggtaggcctgctcctcctggggctgccccgccggtacgccgcccatcagctgctttaagttctcatactccacctgtaacggcgcctccgagacaagccgaaccaggccctggcgctgccaatagcggaacgcgtccagcagctgcccttcctccatctgcagggccttggccatttccccggcgctggcacagccctgccccgggtaataacaatgcttgagcccgtacagatacgctttgacaaactctcccggcgcgcccagcatatattcctcgataaaaaggttttcgaccggcgtgatatcatatacgtgtgtctgcggcgcaaagccaaaagcggccatgtcaaaacctcctttttgttccgtttctgcctttcatcatatcacaattggcttttcgttgtatagcacagctgccataaaaaagcgcccgggctgctttgccacgggcgcacttaacttctattcactgtccagccattcccccgtacaggtgatgctggtgggcccagtcatatagacgtgcccgtcggcttcgtcccaaagaatatgcagctgcccgccaggcaggtacatatccaccgcgcggttactcaggccattgagcaccgctgccaccaataccgcgcaggcgcccgttccgcaggctagcgtctccccgcttcccctttcccacacccgcatgtggatctcctccggcccgctcacatgggcaaactcgatattgcaccggttggggaaggcggcgtgccgctcgaaaagcggccccagctccgtcaccgggaactggtcagggtcctccacaaaacaaaccgcgtgcgggttgcccatggatacgcaggtaaagcgcagcgtctgtcctccgacggtaagcggcacccctaacgcgcgctcgcccggcaaatctgccgggatatccgcaggccttagcaccggctcgcccatatccacccggcctcgggtcaacctgccccgggcgtccggcagcagttttatggtgcgcaggcccgcgttggtcatcacgcgtacctcgtcgcccttggcatagccccactcatgcagcagccgggcggcgcaacgcaccccgttgccgcacatcatggcctcgctgccgtcgttattataaatgcgcatccgcccgtcggcctccgcgcagggggtaagcacgatcagcccatcgctgcccagcccaaagtgcggccggctgaccgctattgccagctgttccgccggcataggcaagcgctcgcggaacccgtccacgtaaatatagtcgttccccgcgccgtgcatcttggtaaatttcatcccatcgctcctctataaaatggcgatccctttctcttccagcattcggcgctgctcctcaggccacacggatacctgcacctctcccacgtgggccttgtgcagcagcagcatgcaaagcctgctctggccgatacccccgccaatggtcagcggcaactcgcccgccagcagcgcggcgtggaagggccggctctttctagcctgctgccctgcatgggccagctgcttttccatagccagcggatcgacccgcacgcccatggaggagatctccagcgccacatccagttccttatgataatagaccaggtccccattcaggctccagtcgtcataatccggcgcgcgcaggtcgtgcggcctgcccgagcgcagcggccagccgatctgcatgaaaaacgccccgccgtgctccttcacataggcccgctcccgcgcctccggcgccagctctggatagagatcctccagctcctgggtggtgataaaggcgatctcctcgggcagccggtttttcaactgggggtacttgcgcccgatctcctcggccgtttcgtagatcgcgtcgtggatatagctcaccgttgttttgagcgtatccaggttccgctcctgggcggtgatcaccttttcccaatcccactggtccacataggtagagtggaggttgtcggtctgttcgtcccggcggatggcgttcatatccgtatatagcccttcgcccacggggaagcggtattcctttagcgcaaaacgcttccacttggctaaggattggacaatctgcatctgctcgcccggcatctctttgaggtcaaaggctaccggccgctcaacgccattaaggtcgtcgtttaagccgcttgacgccggcacgtacagcggggccgatacccgtgtcaaattcagcgcgccgcacagccgctcctcaaacccgtccttgagcagcttgatggcccgctgcgtctgcttgacccctaacttgcttttatatccctccggcacgatatgcgccatttcccatcatccttccaggcgattcctcgccgtttattcaataagcactcccagaccgggcgcttgatatcctttttttccccggctgcagccgtctattttgattgccagtttttattatagcacccctacactgcgtcgcaaaggggcagtttggcctaaaaaccgtttacagtccgtttacaatttaacctattttcattcattcgccgttcatatccccagcctattctaaagccgaatatggtcatacctcatgcaaaaaattcttttggaggttcaacatggcaaagacatcaagtaaaaagaagaaaaagctgattatcggcctatccatcggcgccgtggtcattgtaggtggggtgctggtcggcgcccgcttcttcatgaaccgtccggctcaggcagcgttgcaggtcatgcaggccgttgctaccaagggttccatcgaaaagaccgtggtaggcaccggttcgctggcagccggggaaaccaccacgcttgagctgcccagcagcctgagcgttgaggaaaccaaggtatccgccggagattccgtcaaggcgggtgacgtattggctacgctggattctgcctctctacgcagcgctatcgacagcctgaaaagcgagatcgccacattggacgacaagctgtccaacacttctgaaacggcatcctccaaaaccatcacctcctctgccgccggccgcattaagcagctttacgttgcggcgggcgacgacatcggcaccgtcatggctcagcacggggcgctggccgtgctctctttggatggaaagatgaaggtcaccttcaccctggccgatgggcaggaagcccccgcgctggacgcaagcgttaaggtccaactacctgatggaaccacaaagtccggcacggtagccgccatctcgggtagcgatataaccgttaccttcagcgataacggtcctgtcccgggagaaaccgctaccgtcctctcctcggatggcgctactacttatggtcagggcgagatggcgatcaaccgtccccttgaggtcatgggcacggatggcaccgtcagctcggtgagcgtatcggtggacagttatgtttatagcggttctactctcgtaacgttgaccagcaagcccgcctccagcgattatgagtcgctatacgcctctcgccaggaaaaggccaaaacgctgcgcacccttttgaattacgcccaaggaaacaccgttacggcacctgtggatggcgtcgtccaatccctgcccggtggtgagaataccggctttgtattggccaatgcagacagtatcgcactcacggtcaatatcgatgaactggatatcctctcggtagccgcagggcagaaggtacgcatcaccttagacgccttgcctgatgagacatttgagggcgagatcaccaaagtatctgattccggctccgccgagcagggagtcaccacctatccggtcaccatctccatcaccccttcccaggaaatgaaactggggatgaacgccaccgccaccatcgtgatcgacagccggaccgatgcgctgctgatcccccttgacgcgctgcaggagcggggcggcgagcaattcgtttactcctatgccgaggacggagccctgggcgaaatgcgcaccgtcgccaccggcctttccgacggtacaaatgtagagatcaccgatggcctcagcgagggagatgtaatcgcttatatgcccaccgaggacagttcggatgaaatggaaatgatgatgccaggtggcatgatgaactttgatccctcctctatgcccgatatggggggaaatatgccagacttgggcggcggccgcggcggttccatgccgaacatgggcggtggcccgggcggcggccagtaagggggcggccgtatgatcaaaatgaccgacgtttccaaggtctacaccatcggcagcgaaagcctgtacgccctcaaccatgccaatttgcagatcggcaatggagaatttgtttctatcgtggggccctccggcagcggtaaatctaccttaatgaacatcatcggctgcctggatgtggcggattcgggcgaatacatcctggatggccaagcgatcgaaagctattccgagcgagagttggcccgtatccgcaatcgaaagatcggctttatcttccagaatttcaacctgttggggcggttgtccgcgttggagaacgtggagcttccgctggtctatcagaacgtgcggggaaaagagcgccgcgcgcgcgctcaagaggccctcgcccgcgtgggactgaccgaccggctggaccatcgcccttcagagctctccggcgggcagcaacagcgcgttgccatcgcgcgggccatggtcacccggcccgcgctgatcctggccgacgagcctaccggcaacctggatcaccgcaccggccttgagatcatggcgctgtttcacgagatgcatgccgccggcaacaccatcgtattgatcacgcacgatagtgacgttgcccggcaggccaagcgcagcatccatattttggatggcagcgttacagaaagggaggtgcccgtatgattctgcaatccttccgcatggccttttcctccatcgcggggcgaaagatgcgctcgtttttaacgatgctgggcataatcatcgggacgatcgccgtcgtagttctggtctccctggtctccggggcaacttcctcggttaccagctccatcgagtcgctgggcagcaatcttttaacggtaaacatcacaagttcgcgttatctgccgctctctttgcaggatgtggagaatatcgccgcagaaaacgagaacatctctgccaccgcggctaagatctctcaaagcagcacagtcaaggcgggcagcactacctacagcgccagcattatcggcaccgtgccggcctatcaggatctaagcgcgctcaccctggcccgcggccggtttttaaagacgccggatctggacaacaactccgccgtagcgatactggggtatgaagctgccgaggagctttttggccgccaggatgtggtgggcgaaacggtttctatcggcgggcgcagctttttggtagtgggcgtactggaggaatccggtcagaccgtcatgggcagtaatgatagtgccgtgatcatcccctataccctggcccagcgcctttatcacgtcagcggcgtgtcctctttttacgctgcagccgcagatgcagagaatgtggacgcggccgaagcggcgttagatcaagccctgctcgcccacttccgtcaggacgaggatgcctacaccgtatttaaccagacctcgatcctggataccatgagctcggttaccgatacgctctccctgctgctgggcggggtcgccggcatcagccttctggtaggcggcatcggcattatgaacatcatgctggtctccgtaatcgaacgcacgcgggagatcggcatccgcaaagcggtgggcgctagccgcggcagtattttgatgcagtttttgatcgaggcgctggtcctcagtcttttaggcgggctgatcggccttgggatatcctacctcatcgtctggggcctgtccgccgtattgcaggccagctacaccgtgcccgcttatatcgtgatgatctctctggggttctcgatcttcgttggcgtgcttttcgggctatatcccgccaacaaggcctcaaagctccatcccatcgaagccctgcgggcagaataacctgcatatccccacaaccgccgcgcccgtacgggcgcggcggttctttattgacttttaccgcccaccgtgggataatatttttgctcattcttaaaccatgcacctgtagctcagtaggatagagcgtccgcctcctaagcggcagttcgttcgagtccgtgggcggaggaaaattgaatatttttgatatatgtcccagtagctcagttggatagagcacgagcctcctaagcccggggtcgcacgttcgagtcgtgtctgggacgccaaaaacaccgctgcaagccatttttcgctggtttgcagcgttttttattttgcttctcccggtctcttgctcgtttgggaccgggagaattttatgcgctgcaatgtatatcctgctaagaagaaacgaacgatttccacgttcctgctaagaaaaatcccatctttgctaattggagttttcggacttacctgccgcctggtgccgccgagagcagcgcagccagggtatttgccagttccggcgactgccggagctgttccaccagggcctccaggtcaagcgtcgccggtgccggttccttcggctcctctgggggacggaccgcgcgcaggttgggatttgcgtagaaggcgctctcaaacttctgggcgttgatcttgcggtcctcgtccaggatatgggcatacacgctggtaatcatgtcaatctccgcatggcccgtgtcgccttgggtggccttcaggtcgccgtggttcagtttcagcttgtaggtggtgctggaatgacggagggaatgaaagaccaccctgggcagccctgccttctcccgcagcttctcaaactccttcaggatgatgcggtcctcgcaggggcgtccgttgggcagcgccactaccaggtcataatcctgatactcgtcaccgagaaagccccgcagctcatcctgggctttcttccattcccgcaggatgtaggccagcgtcttgggcagccacaccttgcggatactggaatccgtcttaggctttttcagaatcaccctggtgctggtgttgggaaacagcggcgtaaagatgtggtagacatccttctgccccagcatctcaatggcccgcttggaggcccgcgccagctccttgtcgatgaaaacataggcgttgtcatcggcaatatcgtcatcggagatgtggacattgttccaggtcagccccaggatctcacccatccgcagggagcaggcaaaggacaggttcatcgctacatagagcttgctgtccgtacactgatccagggcggtgcggatcatatcggcggtccagatgtcccgcttcttatactccgtcttgggcagtaccacattgtcaaaggggttcttggcgatcagctcccaccgtactgcctgcttgaaggcgcagcgcaggagcttgatgatcttctcgatggtggcgttagtgaccaggtctgtctttgcatgatgggtcctggtattcaccgctggggttttttgcagggtctgaatgtacttgtccactacccgcggggtgacatcctgcaccttcatatccccgatgatggggttgatgtagttggcaatcagcgagttttggctgtcgtacatggacacgccccacttcttttccccataaagagaaacaaagtccaaaagaaattctgcgatggtctggttgctgggcggcaggaaggtccccgtaaactgctggttttccacctccgccttgcgcttcaatgcgtcctggtaagaggtgcgggtttcccatttctgccgggtctcaccattttcatccgtgtagttgtagacgatggaataattctttttgcgtttgataatcgaagccataacgatacttcctttctaagtcataggtcaagtgactccagccactcatcgaatgaccgcttggaaatgcgtatggcgttgccaattcgtacgatcttaaagtgtccttccttcacgagaagataggcggatgttcggccaatacccagaatttgagtaatgtcctccaccgtataagttcttcgctccggggactccttcttcgtaccgttccatgcttgtgacatggcagccccctttctaaaacaagaacggcgcgttgaaggaaagtcataacttgcctatcctcattctaacgcgccattccgggtttgtctgctgctaatcaaaaagtttatgaattatccataaactcaaaagcaacaggattacttaaaaagaaagaggcagaaagcggatggctgctggccgcagctccacgggaatttcaccccggcccatgctgatgggtgcggcgcacgatgctttgtgggcgtccaatgcgcgagtctcattatcctgcctgcgcatcctcgcccacaggctgccacacctgttttacggctcggttttttcgctcacctgtttggtaggggtcccgtcctgcggacttgcaacagggtcgtggcgcaccggccgcccggctccacacagacagatcgtatccgtctgccttatgctgcgccggaggcctcccgccgggctttctttgtcaaggagctatgacgggacgccgcatggaaaggggaacacgcagcgcccggacctgaatcagttcaggtcaaaattcaggatggagataatcagcttcgtttccagccgcctgcgcatatcttcatccaccaaggagtgaggaaagccgtttttgtcatagcttgtcctcatggacagcgcagcaatatagccagaatagtgctggatcacccggttcaccgcttcgggatagcctccgacagcggcggcgatcaccggataaggaatcagtgacgcccgcatatttgcagatttagtcatccacttcacctcccatcagctccttcagcagccgataggctttttgcctgcgggtgttgaccgtccggcgggccatgttcatgtactcggcgatctcgcgatctaccatgttcaggaaccagtgcatcataaagatgtcccggtcctcctggggcagcgccagcagcgcctcggccagccggtcgtcctcgatcagaatcacggcccctcccacagggaaggttgtgtattcccacgagtagcggtcataaaccgcaagctgggccattgcatcctccggcagctcgctgagtgagacctcacgccggctccgtttccgaagctgcgtgtaagcgttcattgcttcattcttgatggatctcttgcagtagctgtcaaaggcgtgctgcttatgctcgtagtggcggtcaggtttcaagttctcacctcccttcgtgccgggaggcagttcttttcttcccctttcgcccactactgttatggcaatgccgctgtttggctggttttccgcatttatatcaaaaaattttttgccgctcataatcggttcctttcgtttcgttcaggttgacaggccggaacgaaacgaggcggggaacggcagccggcgcccaggcacaggcggtcaaagggacgggctttgtgagatatgagccgcagtatataaaaagcgagccataactcacttccatgagcatggctcgctgctgcgttattagaatattttttgtagtgacatgggcgtccgccgcataagcggtaaatcccgccttattttgacctcctctgtgttggtgctctcatccatatctccctttactccaaaacatgagttataactcatttaatatgagttctatggttatttatatgagcggaagcacactctacaatgatgtagaggtgatgtgtagtgaacaatccgctggatctatttgcatggaaggtgcggtcagaacggaagcggcagcatctgacgcaaaaacagttagctgaacgcctcggtatgaacccccgcacgatcatagatttggaggcctgtcagagtaatccgaaatttgaaacggtggtccttgtcgccaaagaactgaatatcagcgtggacgccgccatcttcccggaaatggtaaatcagacagtctcgaaaacagtcgtggacttctttgccgggaaaagcgaagcagagattgaaaaatatattgcgctctgcaagcaggcggaagccttccagaaagacaagtaacgcggtcgggttcgatgtgcccggccgcgttactgttttacccgtttgccatgcgggcagtttattcttcttttgttttataagcatttttcagacgatcgaaggactcctggctgatgacatgctcgatccggcaggcgtccctttccgccgtttccgggtctacgccggcctcgatcagccggtcggtaaagaagcggtgcttttcgtaaatctgctccgccacttcccgccccacatcggtcaggtgcaggaaatagtcgctgtccattgtcaggaagccaccttcacgcagggtcgccaccgcatggcacacgctgggctttgtgacctccaggtgccgggcgacatccacggagcgcaccatgcccatcttcttatagagaacaaggatggcctccagataatcttctcccgacgcatggagcttcattttacaccttccttattcagcgggttccagagaaagaatgtcgaagaagtagggggttccggtaaaggtatagccggaaatcttgtctgtgttatagactatcatatccttctggtaggtcagaggaatatccagcgccgttccaatatcgaagttaaacaggtaggtataggtatcccggacctcctgctcatccaccatgttcgtcagattcttaatagtagcaaggaattcatcggagccctcaatgccgggcagggagggggtctgcggcaccatgctgtccatgggggtaaaccagcagtggggcgaagcaaaagcaaactgactgtgccacagggtcagatcgaacttaccttccagataatcagcgtaccactgcatctgctcggtgccgtagatggtcacatcaatccccacctccgcgagctggctcttgataacctcggcggtaggcatactggttgcactataatcagattccaaagtcagcagcagattcagcggctcgccatccttctcacggattccggtgctctcattcatgacccaaccggcctcatccagaagctgattcgccatgtcggggttatagtcgtaggtggtttccagttctacatcagcatagggcgtatcacgagtaacaatcatatctgccgcaggctcataaccattagaagtagcctgggacaattcctctttatcgatggcgtaagccacagcctgccgtactcggagatcagacatatagggacgggtggcattggtagtgataatctgcacacgggtgtccttatccgccatctggcccgcaataccgtccatagcaagggcctggtcgtattcctcataactcagcagactggcaccatagatcatgtcaatctcgccagtttggagcgcctgtaggcgggaagtggagtcaggaatgtacttgacgatgatctcgtcccaatagggcttttcaccccagtagtcctcgttgcggacaaagcgggtgtactcgccggccacatactcgtcatagatatagggaccagtaccagccacaccagaaatggtctggaaatcatctgggataatgaactccggcgcgctcatggggcacacatccgaccagcaaaaatcttgcagataggcatagaaggggtggtcatagtggagcgtgatggtgtagtcatcgacgatctccatttccgtaatatcggtgatacccttcagcgtatagaaagatgggttggactgcttgtgttccagattagtcttgaccgcctcggcgttaaacggctctccattgtggaaggtaatcccctgccgcagatggaaggtgagctccgtctggtcatcattatattcccagctctctgccagaccagggacaatttctccgttgtcaaagtctaccagattttcatacaccagtttggatgtacagcacagggagttgttcatgtagagggtggagaggtctgtggtttctgctccgatggcgtaggtcagcactttcttttcagagtctgccatagttgatacatcgccgccagaccccgcaggcgtctggttactgctgcaagcagtaaggagcatggcgaaacaacaaatggctgcaatgagacgagcaagtttcgattttttcatggtttacttcctttcttgtgaatttatgtcaatattagattgaccgatattaacgatttgcccgctttccagctcataaatgcgctgggacaggcgataggcgaatttcatatcgtgagtaataaggaaatagctgcatcggtattcccgatggtatgcctccaagacctcacgaatcgccttttgcgaaatcagatcaagcccgctggttaactcatccaaaatgagatagtcgggccgcacagccaacgcccgcagcaatgcaacgcgccgctgctcacccccggataggtttttggttggcgtatccaatagttttctgttggtggccgtcaaatccatcagttctaagattcgctgtttacgctcctgagaagataactttgtcagattgcgtaatgcttcctccagattatgttctaccgagcgccggcggttgaggctgccagtggcatcctggaaaaccgcctgtatctttgtgcgatggctgcgccattgtccataactccatttggcaatgttctcgccatccagcaaaatctctccactggtggggcgctccaaaccgattaaaaggcgggctattgtacttttcccactgccgctttccccggtgaaactgatattttcccctttgttccatgtaaatgaaatgtcctttaacgcatgaaaaggcttgccggaggcatccaaaaaatctttgcttacatttcggacttcgatttcttccatgtccagccacctccttcctcagccatagccagacgcacgaactcttttgtccactccttatgcggagcagcaaacaaatctgccgttgcaccacactccacaatggttccgctcttcatcacaagcagatcatcgcagagagtgcgaatggccgcatcatcatgggacacaaacagaattgctgcctgctgtttcatccgcatcaactcttgaatcagatacgccttgttttcctcgtccaaagcggaagtcggctcatctgcaaaaatgtactgtggggagaggccaattaaaatcgccattgttgcccgctgaagcatccctccggacaactggctggggtaggaatgataaacccgatccgtatccagaagattgaccttttgcagcgcctccatgctaagcttgcgggcagcatttttgtctaatcgaagccgtttccgaaatgtctctgacatctgtgtcccgactggcacatggagattgaaagcagtcatagggttttgcggaataaatcccaaagttgtcccgcagagatccctccgcactttttccggcttttttagcaggttctctccatccagcaatatttgtccagagttaatggatacatccccatccgatacccccatcagcgcctttaagagggtggttttgccggagccgctggcaccggtcaatccagtacagacaccgggtgtcaaagtaaactccacatgatccagcagaacgactccttttgatgtttgaacagacaggtttttgacctctatcatgccgcgtcacctccctccaactgttttgccaacaaattaaaggccaaggtacacaggaaaataaatagtatcggcaggaaaagcaacgatggatgggtcatcagcatactgcgcccctcggagagcatcgaaccccagtcaatcacatcatcgcccaaggttagcccgataaaggaaaacgccgagatattcataatcatttccgcgcaggataggcagaggaaatgtaccaagggtcggataatgttcggcaagatatggacaaataacaccctgctgcgggaggccccggaggacaccgcgcacaatacataagccttatccagttcaatctctgtctgtgttttgaccagtttaatcatcctcaaaatcagggaaacggtcagcgccaccagcatcgtagggatgctgtttccccatattccgacaaaaatgataaggtaagctaaaggcgggatcgctgtcacagcgtccagcaggctgctaaataccaaacttctggcagcatttgctctgcccagccataatccgatcagcgtaccaagaacaagcacaatgcctccgcccagcaacacaataccgagggtcacatatccgccatacaaaagccgggataattcgcagcgcccgaactggtcagttcccagagggaactctgcactgaatggcgcatacttgttggcaatatccatcgcctccgggttatggggcgcgataagaaatccaaggaaacaaaaaacaatgatgaggaccgggatgatccatttcaaatgtttcattacaggcccccctttcgtgtctggagcaggcgctggataatgtctgccagaatgttgaaaatcaccagtgcaaaagcaaggaacagcaccgttgcgtaaatcacgggcagatctcgattcgtcaggctgtttacaatccgataccccaaccccggcagggagaaaatattttccactatggcggaccctgccatacacattcccatcatctgcataaatgtgggaactgtggaaatgatggcctgtggcatagcgtaccgcactacaatataaggatcgcttaacccacggcaacgggcgtagagaacactgtcctcactcatggcctgctggatcgcctttgaaagcatttgcccgaaaaaggcaatcccacccactgccagacagagtgctgccggaaggtatctcattaaaccggtattgccggatacactaatcaggttccatcttacggacaccacatcaataaacgaagttgccagataaaacgctgggatggatattgccgcgatggatgcaaatgccaggattttgccaatcacattctttcgtgtcagatagagcagaccccccaatatcagtgccccaactgcttgaagaaccgcagatagtagcacaatacaggcagtttcctttagggctgatccaacgataaggaaaacatcacgattgtctacatacgaatttcccaagtcaaaatgaatcaggtcgttcagccagtccagatactgcacaacaatcggacgattcaatcccatctgctcacgcaccgcttcaatacgcgtctcatcgaccgtgaatatacggcgcgagtaggcttcggcggcatcgataggcgaaagctgcatcaggataaaagtaatcgccgttaccagaaataaggttaaaaaaagttgtaaaattttttggagtagaaatctttttgtactcacacctccgcctccctgcactatgcgttgattttccagtcaatcgcagctttacgattcaaaatgaaatcagcgtaaatgcccttttgctggatgagttggtcgtgggtgccgtgttgaacaattcttccgtgatccaccactaaaatctggtttgcatggcgcaccgttttcaggcgatgggcgatcataataatggtcttgcctccggttaatgcttcaatggccgcttgaagctccgcctcattctccgggtcaacatttgcggtagcttcatccaagatgacaacgggagcatccttcagcatggctctggctatggaaagccgctgacgttcaccgccagatattgtggctcctccttcaccaatcactgtgtcatagccatcaggcaacgccataataaaatcatggcagcgggcagcttttgccgcagccaccacttcttcatggctcgcctccggcttaccaaacttgatgttattttcaatactgtcgttgaacaaatacacattctgaaaaaccatactgaaattgctcatcaaactgtccagcgaatagtcttttacatcaatgccgcccaatttcacggagccttttttcacatcccagaaccgggccataaggctggtaagcgttgttttgccggaaccggagggccccacaatagcggtagtcgtgccttctggaatggtgaagctcacatcatcaatgattttccgatctccataggagaaatccacatggtcaaatgaaatatcatggcttttcggcacctgaaccgagccgctctcgtccatcctgggtgcccgatcaatttcctctacccggtcaatggaagcatcaatcatcggtagcataaagaacatctcaccagccgattccaattcgctgtataccaggaacgcagataccaccatcatcaaacaggtgaacagcgacatattcccttgcaggaaaagccagatggaaagcaggattgccaatacagaagtaacgcgcaaaacaacctgctccagcacgttgtaggggatgcgtttgcgctccaatttgaagttttgattttctgtttctttgatggtattgtttagagtttgttttgccgctttatccccgtggaaagcgcgcaccacactcataccctggatgtattccagcacagcatccaccaatttagtctgtgcagccaatcgtcctggggaaagctcacgggatttcttaagcagtcgagaattgacccaaaggaacagcagcgtcccaacaaagaacacaagaccgattctccagtcgaagcacatgatcgccagagaaaaaaccgcagtacgaatcatacccacaactgtccgggcaatcactgcgaaagacatactctccaaatcggacattgtggaggttgctgccgcagtaagactgcccaggctctgcgcgttgaaataacccatcggcatatatttcatgcgttcaccgatgtgaatacgcttttctccgcacattcggtagttagcgtgtccttcgctattgtgggccagataccagcagagcgcggcaccagccacactaaccaccataattcccaaagctgtccatgcggtggccccggttatattctgttccaccaacgcccgtagcacgatcaatagagcgacaaattgtaacgcttcaaagatgctccgcagcagttcaaaggccatacctttataccaggtacttttctctgtcccggaaaatcgaaagaaccgtttatatgcgtcaaacatacgccgcacctccttccatctgatcgttgtctcgcgcctgcgtgtgagccgcccacatttgctgatatagcggacaccgatccaacagttctccatgcgttccggagtccaaaatctttccgtgatctaccacagcaatttgttccgccccagtaatggtggacaggcgatgggcgatcacaatgagtgtctttccatgagttagccgccctatggcatcctgaatgaccgcctcattttccgggtctgtgtaagaagttgcctcgtctaagataacaatgggtgcatttttcatcatggcccgtgcaatagcgacccgctggcgctctccaccggagaggtgtccacctgcgccgcctactacagtttcatacccgtgatccagacccatgataaactcatgacagcccgcagcttttgccaccgcctcgacttcagcatccgttgcctctggcctgcccatgcggatattctcacggacggacaaattgaacagaaaattatcctgggatacataaccaatcaaatccattacctgctctggaggaagttcttttgcgtcaacacctccaatggtgatatgcccgtctccaacatcccaataagaggcgataagtttcgcaatcgtggatttaccagagccagaaggccctaccaatgccgttgtggttccttgcttgatgtccagggtgatgccgttcagaacttgcgtatccttataagcaaaagtcacatcccgcagagaaatatccaatcctttgagatttttccgctgggacggacgatccaggtcaggctcggacaatacggcagtaatttctccggtgatagtagcaattttagaaaaatcatccgtcaaaaaaatagctgcaaccagcggccccataatgccaagagacagaatggcaatggtaataaagtccggagcagacaaagagccgttcatatagaacaagcatccaacgggtaatacaccaatcaatacagccggccaaatcgtcatcatcagagcagaatagccctgggtggatttcatccagtccagcatgagatccacgctctggcggacagcctgtgtaaactttccataggaagcagcactttgattgaacgccttgatgacctcaatcccattgatgtactccacagtggtggcgctcatatacttacttgcctgaacaacagcaccatattttttagggtattccttcatctgggccatgtaacagagcattccgatgggtatcgtaatcagggataccagtgccattctccaatccaatacaaacaggtaaataatgatggcgatggggacaagcaggttagaagtcatttccgggatgatatgtgccagagggacttccatttgctctacacgctctaccattgttgttttcagccgccccgaaggtgtatccgttaaatatcccatagaaacacgcgttaatttatccgcaattgcctgtcgtatttctgaaagcacatggaatgtcgcttcgtgggaacatctggtagaaaacccatgaaaaacagacttcatcagataagctataagggcgacaattccccatgttaaataagcagaaaaattcgtttcacctccaatcagcagatttacgatccttgccacagcgaaatatggcacgataccacttgtgacgctgataacagcaagaataatagagagcaaaaagcctgattgatgcggtttaatgaatgttatcaaatttacagaatctttttgtcgctgcatacaattccctccttttagttagctgaacctaaccatagatcaaaagtaaaagccgaccatccacaggatttatcctgtaaatcatcggctctgcgtcttggcgtctggctctgttaatataatgttttgtccctgcacatccacgatgtgttcttttccgcatttagggcaaaatagcggaaagcgtttgagaacagtatctggatttacttttgtgcgggttttgttgccgcaggtaggacaatgaatccagccactgtggtcaatccaaccactcatacgacatcacctccatctgcggtaaagatggtctgccatccagcggtataaaagcgccgcattctatggatatgctccaatgcctgttcttttggcatatcgtgaatgataacctcaaacattcccgtatagaaagcactggaaagaagatgatttagttccggcgtgagtcgaccgcttgttattgcatcatttccagatgcctcaatatactttgcggtgcattctgtatccagctcaacaacacgatgaataaactcttgatagacactattctctccactggtaagcaacagcttaaattcatcgaaatgatcgtaaagataatccactactttaggaaagccgtcattggaatattgaagcatttgctgtgtctgctcattacctggcatcgcggcaaacccggataatacggtttgtaacaattcacaaaagccatccgctgccggttgaaccagggaacggtataggctttctttatcagggtagcgaatatagattgcgcctttactcgatccggccttttctgcaattatccggagagaagcattttcatatccatttgctaaaaactcctctttagcacattccatgagcttttcagtcactcccgccactctttttgccataattcgcctcccttcattcaagaccatcagtttcaatccatcggttttaatatagcacaaagcattttgacagtcaataggggaattgcttcgttttccactttggccaaaatctccatttcaaattgtagtattagtagagggtaaatacgagggtagggttacgatagcaagcacagccagcgagtacccactggcggattttcggtttagggggacccctgcccctaaacacgaaaattgcttgctgggatagtcccagacccttataagaaacggaggcgaagcggaatggtaaacagaaagcggaacatccagatgaagttctgggtgacggaggaggagaagcggctcatcgacgagaagatggcgcagctccccacaaagcggtatggggcatatctgcggaagatggcgattgacggatacatcattcaggtggacaccaccgacatcaaggagatgacaaaggccctgggctccatcggccggaacatcaatcaaatcgccaagcgggtgaactccggcggccccgcttatcaggccgacatggaagagatccgggagagattggaacagatatggcagttacaaagacgcatcctattaagtcaacgctgaaagcggccatcgattatatctgcaatccagataaaacggacgggaagctgctggtgtcctccttcggctgcactgcggagaccgcagacatcgaatttgcatggacccgccgccatgccatcgacaagggcacgaacctgggccgccatctcatccaggcatttgaacctggggaggtcacgccggaggaggcccatcggatcggcatggagctggcgcgggaggtcctggggggaaaatatgagtttgtcctcaccacccacatagacagggatcacgtccataaccacctgattttcaatgcggtcagtttccaggatcaccggcactaccactccaataagcggagctaccatgagatccgccgcaccagcgaccgaatctgcaaggagcatggcctgtccgtcatcgtcccaggccgggacaagggcaagagctacatcgaacaccaggcggaacagaacggcaccagctacaaggcgaagctgcgctccgccatcgaccggctcctgcccggctgcgccggcctggaggacctgctccgccgccttcagcgggaagggtacgaactgaaacggggcaagtacatctccgccagggcaccgggccaggagcggttcacccgattgaagaccctgggcgccgactacgcagaggaggccctggccgctcggatcgccggcagacccagcccctcccgccagccgaagcagcgcaccgggaagcccagcctgctcatcgacatccagaacaatatcaaagcccagcagagcgccggttacaagcattgggcgactatcgagaacttgaagcgggccgctgaaacactgaacttcctgacggagcatggcatcggaagtttggaggatctgtccgagcggtgcgacggggcggcggccgccaccgccagggtgaaggcagatctccgggcgacagagaaagaaatggagcggctgaccctcaccatgaagcacgccgccacctaccgccagctccgtcccctgtatgaggaataccgccagtccagggacaaggagaagttcctccgggggcatgagggcgaaatcatcctgtttgaggcggcggcaagggagctgaaacgcctgggcgctgtacccctgcccgccaccaagcggctccgggccgagagggacgagctcaccgccaggcggaccgccctgcaatcggaatatcggaaagcccagcgggagaagcgggagtacgacaccctccgccagaatgtggaggccctgctggaaaagccaagggaagccgaaccgcagaggcagcggaatcacgaactggaataggtaggattgtgcgctttgccggacttttcaaaggcccctgggcgcggtctgattttatctgtataatgggaggcaggaatggaggtgccgccaatgacgagaaccgaggccgttaaggaatttttcaagaaggcagttttgcccgtcgccatcgccgggctgctgtactgcattttcaaatccgcctgcatcaggaatggagagctggatcttctctggctctggatactctgcggcctgcccttcggcatccatcggatgtgcgtgtggatcgtgccgggcggcgactccctgggcggcggcgccgccctgtttgttctgaacttcgtgatcggcggcatcatcggcggcttcgtcctggtgtggcgcctgctggtggcggcatggtatgtgcccctcaccatctaccgcctgatcgtgggatattgagatggacaaatgatagagagccggctggcattgaccagccggctctcctcatggtgtccgctccagaataaattttgttaccagatccgcatactgttccagccgcaccatcagcgccaggtggccgccggtcaggtcggtgaccaccgtgggacttggcatcagggcgatcaggtcctcccggcaggccggggtgaaggtggtgtcgtcctcggacaaaatcagcagcacccgcccctcccacggggcaaaatcattgcgggtcatgccaaagtagtgtactgcgtcacagagaaagtcaatcatgtgctgttcatagggcttggtgagcagttccatcatagcgccgcacagttcctccatagcggccttttcctgggctgtaaagccatcggttttctttttcatcaccgcccatctcatcatccgcttgatgagcggaaacggcaggaaggcaagccattttttgaacttccgctggctttcgattatcttcatcagatcctgatacccggccttgctcatgttgccggacagcgagcaggtgttggagaggaccagcccctccaccacttccgggtggcgggaggcgatgacctgggccactacgccgcccagggactgtcccaccagccagaccttttccttcaggtggcggagtagttcagccacggcatcggcaaactcgccgttgtccccgaactggagctgatagtcaaaggtcagcaccgaaaaatccctggcgaaccgggcaaagtgcttataaaacaggtcggacagcccaatgccgcccgtgagcaggaccagcgtggctttggcctggggattttgatagtagcgataggtaaagagtttcccgctgctgaccgtgaaggcagcggttggataaacccggcgaaattctgcaagtgtcatggaactcctcctttcagatccaggtgagcagatacccgttgattaaagcaacagccaaaaacagaagaactccccgcaggaaagcgtaaaagtgtttgcgggggtccgcatataattccggactttcctcggtgccggaaaaccgcacccgttttgtgtgccgccaccaaagcaggtcgatcaccaaaaaatcaaacagattcagcgcctgtcctaaaagcagagtgttcaaaaagttgcctgcaaaatattcctgccgggtgagaagccccatcgcaaacaggagcgcagtaaacaaaagcagatttccagcgaagatggccgcaggacctcgctgccgaatatttcctgatagctccgggcgggctttcacaatcttctgtacctcgtccgggtaagtagaaaaattacggatgtttttctcgtcgctcccggtgcccagccagcaaaaagcccaaaacaaggaacacaggagcataccctctgccagcagcatttgaaccatcttccatctcccgatttctattttccctgccgttctttgtcccaacgggaaccctttttgcagatataaaagtcacaacagtctccgccggtagccagtgttttggtacggtagagccgcccacccatccagtcgacggacatcgtgtccagagcgcatagatagggaaccagatgaggaaggccctcctgtcggcccagggcacacagaccgcactggtggtaaaggatcgtatattcctctgcatcccggccgaagatgacctcggcattccactgaaaggggttcctatctgcatccgccaaagatgcagtcgctgctcgcttatattgagccttcaaagtaaatgcagtcttggctttgccccggaaggcagccacaaccagaggagaacgcatactggcacttaccatgccctcaaagcgcttttcactcattttttcttctgccgccttatagatagacagccatagaattccaccagtcaggcagacccgcaacgggttttccatcatggagccaatatccggggtacgggataccatttgccggtaaatctgcttagagagctgcttcaacgcagaaatatcccatcccaactcctgccttgccagataccgaaatgcggcaggagcgatggcagcccacatcagcctttcacaatatgtataggtcatgacaaacctccgtcttacttccgccccaccagcatccgggagtcgcccagcatcatcatgcccgcccgccggcgggagccgaagacctccgtggccgtgtcgatgaggcgcacgtcctcatagcccatgtcccgcagcttttggacaaaggcatccatgtccccgtacatttttggcttcatgtcatcgttgagcgcaaagacgccgccctttttcagcacccgcagggtctccaacagcagagcctgcttgtccgcacccattacattgtggtagacatagttgctcaccacggcgtcgaaactctcatcagggaaatccagcttgttggcatccccgtgccggaacgcacacctgaagccgacgccctcgctctcggcatttttctcgcacatggcctgaccatagccgtaggccacaccccaatagtccatgccggtgatttgggcgtccggccaggtgagagccgcccgtatgctcagtgcgccggagccgcatccaacctccagaagttgtccctgcccgtcaaaatccagatgggagaggacgacctgatggacccgctccatcattcctccgccgccaaaagcgtactgtttccgtatccatgcacaccagatcagcagggcaagcagcgccgctgcggcaacagagaacaggatgccgagcgcggcaatatgaaacatggaaaaggatagcgctgccagcaccgccgacagggtcaacagcccaccgatcatgtaaaaaaccgggttagacatccagcttccgtagtcctcgccgtgggtgccgagtcggattattttttgttgcttttgatgttgtttcatttgaaccatctcctatcctatcttttgcaataacagccccaatcccgcctgagccgccgccatgagcgggcacagcagcagcggccattggagcaggtgctctggcagcgcatagcccttcatccagtctgtgaactcatagccgggatgtccctctgtaccagggatcacaaaacggtctttcgcttttttctggatcagccacacatccagaaaaagaagatcgcctatgttgatcatcatccactggatgtatcccatcagggatagacgccagaatccggttgtcccgccctccacagcgctgaccgcaccataaagaaggagaggcagcagctctccaaagcagatccaaagccagtaaaaacggttttcctctctggtaggcggcctgttcgccgccttgatgatggcgggcggatagctgggaaacatcagccggggctgatacagcgccaccgtagcggcaaataggttaaagtaggccgccatggcaagcccgtccaggatggtgcgcgtccagttcatggaaattctcctgccctactgcgtttttcataaggaactctctgttatggatttgccccgtattctaccggatcgccagcgcacagagccagtgctttttggcgtctttatccatgatgaccttagaaaaaccagcctcggtgagaaaacgggcaagctggtctccattgtagattctcatcccatcaatgacagaaagccatttgttgtcctgggagttttccccgtccgactcattgacgattaaaaaaatgccgcccggttgcagggtgcggtacacctcccggaaactctccaccgggccaggccagaaatatacggtttcaaatgcggtcgccagatcaaacgaaccatccccaaaggggaggcgggatacatctccctgcaaaatctggcagcggcctgcttggagtccctcgcggttcacactcttggccttttccacggctatttctgaatagtccagagcagtaatagtcgcagccggatattttcgcaaaagcgcccgaatgttccgaccaccgccacagcccagctccgcaatcttggccggacctgtttccggcaaatgactaaggccccaatccgcgagggcggcatgggcatggttcatactgcccaccatacacttgcccagcaaaccttccggcttgcgggtattattgaaaaaagccttccatatccccataactgcctccagaagtcgaaatttaagttagcaaagactaactatactcattatacatcttcctacacggaaacgcaacagacaagggcgttctctgaccattttgcgctatggaaatgtggaaaacggctgctccgccgacggaaagcagatattcacggcccgatggaaaagccgccggctttcccacagcccgcaaacatcgtttcccacagctccgcaagcctgaccgtttacgcacattcccacagcgcctactacggcgaatatccttcctgtccgatcctaatggaaagagataaaagagaacaaaaaaagaagcgggagcgtcacccttggctcaaaccgaaggcggcgctcccgctctgtaatggaaaagtgttcaaaattgcggctttacacccctcaaatcagagggagaggcccgcatgagaaaccataaggacgactcccggaaaagccaccgcaggcgatttttcagcccattttcaacccttatctgcacactttttcgagcgtgcggactggtaatggggacaggcgatgaggactgcccggaagctctgcttgcatgggtggacacagcccttgcagatctcattgtacctgcggcggccgttctcccccaggaagaaggaccattccagccgccacttcttgctccggctcataggtcgtgctccgggggcttcttctgctgagtcttgtccgggggcttgcgctcgccgcactcccgcttggcctccgccagccgttcccggatggagggcttcttctccggcgtggtcctgcgcgcctcaccctgggccttctctaactcctcgcccttgcgaccgttgttcagcaccccgtcgatcatcccgtagtcgtcctccagggtcatctctgcggtgcggagcgggttctccggctccaccggcagggcgatgatctgcccgttcaggctgatgaactgttccggctgcttgaagtgctccgtgtatttctgcacctgctccggggtcagggaggtgaagctgtcctcactcagccccaccaccaggaaggtgccggccatgacgtcgtaaatctccccatgctcgtcccgcaggccccggttcagctccaggccgatgagcttgccctcatcgttgcagaccagtcccaccgggtcggagaagggataggaggcggcaatgtcgccgcccacttccgcctgtaacgagtggaggccggggtcgatctccttcacatagggctccttcatgggctccaccaccaggacggtcatcttctccggggcggcgtgctcctgagcctcctcgtttcggatagcgaaggaacgggaaccgttgcccatgatgagatacttcccatcgtcagactgatggtgcagaccgtacccggccgcctccatctgctcccggctcatatccgtcacataaaaggtgcccctgggggtccgtaccgtttcgccggtctcccggtcatccggggagggcgccggggtctgtccggccagctccgcctcatactcccggcccgcctgctccgcaaaggccagcatctcgtccacatgggacttgtccgggtcctccaatgccgctttgattacagccggatcaaagtcaagaaattcctcatagccggtggcgtctttgaatttctcaatctccgaagggagatagtcctcctgggtctgccccagggcggccagcttctcatccagggcggaaatgcggccggccatcagattttcgtagatctcctccttggccgcgtgctcctccgggtgctcggcggcatactgcgggtcgtgctggcggaagaactcgtccatatcgtaggcgatgtccatcgcccattcggatttttcctcctcggtcagctcctccgcgtcctggaaggtcatcacccggtattcctccgggatgctgccatgctccccatcgtaatactcatggaagctgctcccggtgtcccgcacataccccaggtcggtgaactcgccgccctcctccagggcgacatcccggccgtaggcctcatagtcgatgtagttccgcaggtgctccggcacctgcatggcgtccagctcctcgatgtaataccggcccaggtcgtcgtggtcgtggatgtcggggtaaatgtcgtagcagtccaggttctcggtcaggttgatgatctcctgcaagctgcccgaatggtcgccgatctccatcgccgcctggaactgttcgtactcgccctggctcatctcgtccagtttggaggccaggtagttgagctcgtccaggttctcatactcgcccagcttgtcgtagaggccgtccacatagcagtcatagtcagtgatgaaccactcctcatagggctggccgaagtcatccttctgcccaatgccgatccgttcaaacaccttctgcatctcctctggcgtggtggggaacttcacccattcgcccaccaggtcgccctcgttgtacttgcccaggttggtgatgaaggcggcaaagggataatccttgtcatattcataatggggcatatacgcacctccttacagctccggctcagacttccccttgcggggcgcctgggccttatttttgttcctgcactcctgtttgctctgttccagccgctccctgatggagggcttgcggtccgcctgcttcgcctgggggcggtcgtgctgccatgggtcatccgtggggaacagatacccccggctggtgaagcacccccggtcctcctccagggcgcaccggccgaagggggcggggtcaatggcggcccggaggtcgtccgtcaggccgatggtcagtttctcctccaggtactcccagcccaggtcctccagggtccgaacatggggctccagcacgaagcagtccacatttttctcaaattccaggaactgctccgccgtagtcagccgatagggggactcctggacggcggccagaagatcccggtcctccggggagagggcggcaacggctttcgccaccgccgccagctcctcccggctcatgttctgttccgcaccgccaaggggaatatccgatttactttttgccattcacgccctccttccgtttggggaactccagcttgaagcggacatacttcccgccagtatcatccagcaccaccaccgcgtcataggtggaacccttcttttcagaccacatccccttgacggaggtgcggcccttcttcaaaaggtcggcggccatcttctttgtcagctccttcttgcgggaggtccagaaacggtcgtccttccacagcacgaagcggcaggagcggtcggagcagtaaaaattcttcctgccctcatagaccggcttgccgcagcggggacagaggcccacggcctcccgctccggggcaaacagcttctggccctcctcggagatgtgggaataggttttcaccagctcccgcgccatgtcagagatccccgccatgaaagcggcgggatcgccctcacccctggcgatggcggtcagcttctgctcccactccgccgtgagcatgggagaggtcaaagtatccggcaggacggtgaccaggttgatccccgccttggtagggatgagacttttccctttgcgctccacaaacccggccgccaccagcttctccaggatcgccgccctggtggccggggtgcccaggcccttgcgctcggcgtcctccggcatctcctctttcccggcagtctccatcgccgccaggagggtgtcctccgtgtacgccttgggcggggcggtgaagtgttcggtgacagcggcctccacctggtcaaaaagttgaccctcggtgaagtccggcagagcggcgggttccgcctcgccctccggctgctccttcagggaagcgcggaaaatgtggtcgatctcacgccagccctcggagaggatgcgccgccccttggcggtgaaggtctgcccgccgcaggtaaaggtcgccgtcaccgcctcgtacacatagggctccgcaaccgcgcacagcagctcccggcacaccagcagaaggatattgcgctcacccacgggcagttcggacaggtccgccttctccagctccagcgtggggatgatggcgtggtggtcggacaccttcttgtcatttaccagcaaggacacatccgggaagaactccccgcacccgtcaaagggcggtaccttggccgccaggtggaggaccaccgaagcggtctccgccatgtcggcggtcaaaaaccggctgtccgtccggggataggtcagcagctttttctcatagagggattgtgcgtagtccagcgtctgtttcgccgtgtagccgaagatgcggttggcctcccgctggagggtggtcaggtcgtagagcctgggcggtgcctctttcttctgttcacgggtgacggaagcgcagactgcctccgcgccggcacaggccgccctcagggcctccgcctcctccggggcggcgatcttctccgacaccgcctcggccccgcccaggttcaggcgcacatgatggtatttctctttgcggaacattgtgattttgctgtcccggtccaccagcatggcaagggtgggggtctgcacccgccccacattcagggtgcggtggtagaggacagaaaaaagtcttgtggcgttgatcccaatgagccagtctgctttctggcggcagagggcggactggtacagcgggtcatactccgcgccggggcgcaggtcctggaagccctcccggatcgccgcgtcctccatggaagagatccacagacgggagaagggcttctggcatcccgccatctcatagaccagccggaagatgagctcgccctcccgcccggcgtcgcaggcgttgaccagctcggtgacgtcctctcgctccatgaggtgcttcaagttctggaaggcgtcctccttgcccttcgccagcacatagcggaagggctccggcaggatgggaaggtcatcatacttccatttcttataaccaaggtcgtacccggctgcgtccatcggggacaccaaatgccccacgcaccaggaaacgatgagcccatttccttcaaaacagccatcggccctggatgtgacacccagggccgacgcgacggcttttgcaacactcggtttctcacagatcaccagcttcatttcgtatcctccatttcttcctccggttccggttcgtcctcgttgatatactcctcctcatccgcaaaatcatagtcgtccgggtctgcgctgaccttggacgcctgcttgggacggataaacttgatataggcgaaggctccgccgccgcccagcaccaccagcgccaggaccagcgccagggcgcccatgcccccggacttctccgcctccggctccggttcgggttccggctccggctccgcgccggcgcactcggccatattcaccgcgcacacctcgcaggaggtgttcaccgccccggcctggcatttctccgtacaggtgcagaccgccggcgcctcctgggcctcgccatcctccatcagtgccaggaggtccgcctcgtccacctggttcaggaagtggacggtctgcgccccctcgtcatcccggtcgatgatgagatagaacacgttgccgccctttgtctccaccgtgatgaactgcttgccggaggatgtcccgcccaggtcgtcaatgagggacaggttcccatccggggtcagggctgcccctccgcccccggagaggccggaggcgaacagctccaacagggcggagaggtccgtcccgtccagggagagggagaagctgcccgtgtccgtgatggtcaggtagtcggaatgaacatagccctcccgctccggcagaagcaccttgacccattcgccctcggtgccgatgacttctacctgcgccccatcgggaagctgggtgaaggcgtcgttatccagcccagcgccggtgcggacattcaggttgccgccgcaggtggtcacggtgccggtctgctgggtttcccatttctccgtgtcaggggtgaacaggataccgtcctcggtgacagtcacagtccccaggccgcccagcagttcggtgatctggtccagggtgtccccgtctgcctccgtgttattgtccgcgctatcatcgccggcgggatcttcctcatcagtgatagtgacctccggggcctcggcgtcctccgcagggtccgcctccgtcccggcagtttcggtgtagtagggttcgccctccccaccgccggcgaaagcggggacagcaaaggccgtggcacagagcgccacggccagggccgccgtaaacaggcggatgatcttcttattcttcatactcggtatcctccatctcattctcgccggggtccgccgcggcctccgcctccatcatgccctccggcagggtgatgaggccgctggcgtaggccttgaggaaggccgtcagttcccggttgtccatcttcaccgccttgaccatgcggacgatctccaggttctcctcctcggtgagctgggcctccagggcgcggaggcgcttctgctgctcggagattttctccttggtcttttcaatgtcacggcggatcttctcaacagttgccatgtgtgcaaaactcctttccatatcgttctttccatgaatagttacggcccaggccctggaccgttttcaaattggggcgggcgttgtcctccagggcgatggcccttcggaacaggtccgggtggtggtcccgcaggtggatgatctcctccgccctcatgctggggcagaagaagcaggaggatttgcccggctggggcagacccgcattttcaatggcctgcatacacgctgcccggtcccatccccattccatcaggggataccacttgctgtacttggggtcggccaggtcgcccagcagcaccttgtcgctgcggtagccctcgccggcgtcgtagccgatgaatttcaccacccgcttgcccgctgcccataccttttggcagggcaaatagtgattgcagaacttttcctgcggcccgatcttgtgtttcagggaacaccgcttgaagccgtaggcgatggagggcagggtgccgctctgcaagcactcctgctccagggtcagccgctttccgtcccgcgtggtcttgtagactctggtgatgggcggcatcccgtggcccttcagccagcggtccataatgtccaggtaggcataggtgtggggatgctccgccccggtatccgcaaagaggatcaggtccaccgggatgcggtgctggtgcaggccgatcaaaagggcggtgctgttgacaccgcccccgtaggaaaccatattgatgtgtgtttcacctcccatcagttatacggcggccggccgtaggcataaaagtgagactgccagtaacttgtattcaaattggtgtaggaaatcggatctccacagtgcaacatcatattgtcgcccacatagatgcccacatgggagataccgctggtgtcataggtgcccacaaagaacaccaggtcgcccggctgggggtcggagaccggcgtggagatgttatagagcccctgggcgcccagccgcccggtgttgcacaggccggtattggtcagcacatagctaacgaagccggaacagtcaaaggaggtctccgggctgctcccgccccagacataagggtatcccaggtatttctccgcctcggtgatgagggtggcgaaccgctcatccgtcaggtactcggcgggaatgtcccaggccgtgggcgggttctcaatgtacttgcccacatacccggaggacgggaacaggtccggtcggttgcccagggtggacatatacacggcgtacatggagagctggtcctcgcccatgatatagaccggtacatgggagaggtcgaaattctccagcgtgacggtgcagatgtaccaggtgtagggaacctctacctcgtactcgttgccctcgctgtctgtccgggtttccgtccgataccttgtttcagtggtcacggtctcggtgaggatgtactgcttgtcaaagagcatttccagatccccttgcacctcgtccagggtgaacaccccctcgtgaagcgccgacaggatggacagcagcacataggggtcatgctcgatctcgtccaggtcaaagtggtactcgtcgtagtcgtgggtggcctcgtaggtgttcagatattcttgcagctccgcctccatctcgcagtaggcggcctcggccccggtcaggtccgcgtcctccgaaagataggaggaggccaccagaccggaagtcccgcccccgaacatggaggtgcaggactgcatcagccccatgatgagcatgaggatcaagccgatccctcccacaatgagaagggtgtgtttgttcttcgtcacaagtccgcccaacttctgggcgatggtcccgccgcctttcttcgctgcggaagcggcggtctgggatgcctttcccgcagcctgggccgcgccggtccctgcccggtgtgcggcggcatactgcttttgcagccgctttttctgccacaggcgggagatggggttactggacgcaagctggggattttccatgacggacttccgccagtagaaatcggcattggctttcaccgctgcctgctccgcctgcttcacatcccgccagggtttcagtttccggtccgcacgcgcctgatggaaatgccgattgccatagcccacggccttctcaatctgccgttctcccaggtggccggcctgaacaccggagttatcgccctccaccttgctcacttcgccgtggagggtggaccgtatttcctgcaccggccgggacaatgggctgccatgttccttaccgggaggcttcacggggacggcggcctttgccgcgtccagcttatccgccgccttgtccgacttgcggatggcctttttcagttccggtgccccctggtctgcctccgaaaactgcaaacgggaggaaggtcggtccctggccgcctcaccctcccggaaggtgtcgcgccgcttgcgccgcgcctttttcgcctggcggcgttccacatggcccgccgcctcgtccaccgcccggctcagcacaccggcggtctcatcagcagaggaatagtcctgctccgggggacggtccgaaacatgggtggcctcgccggtcaccaggttcaccgagatggccccatcacgagtcatcttctgcgcctccttttcggaggctttccattcctgcatttatccgtcacctcctccataggggcaaatgtccacacaagctccggtctcgatcagggaaatgtagtgaaaaatgggataggcctggggcgggcagactgcgttccccagggttttcagccgcagcgcccgatccttcgtgtcctcggtcatgcgagggatgtctgcgggctcctctcgccagaggatacggccgtccatccctgggggaagcccatgagccattccacccaatccgggttcagcgccgccttctccgacaggggctgctcctggtggatcacctgggccgaaaggttgctggacggggacttgccccggaaggccgtgggtttcagggtggagcggtagccctccgacgccgccggcgtcaggtagaacaccgccgccgaaaggctcaggctccagatcgtcccgtccctgttccgcttgcggaagatcccattgtccgacaggtacacatccaggtttgccgcgtccctgcaggtggatttgtcggaggcaaggggcgtgggaaacatcagccgcgacgataaaagttcgctggcgctcatgccacgcgccgacgccgcaagccggaaatacgaatgggagaacagcgtatcccgcttttgccaggtcaaaaatcgttttgtcgagccccatattgatgaagccagcaacattttccccaagcacccaacggggccgcagctcggtaataactctgcacatttccggccacaggtagcgttcatccgcaaagcccttccgctttcccgcggtggagaagggctggcaggggaagccgccggagatgatggtgactgtttcaagtcctgttttctcaaaaaacgcctccttcgtgaatgtggtgatgtcccggaacttcggcacgtccggccagtgccgctccaggacggaataggggtagtccgcccattcacactggcagacggtctcgaacccggccgcctccgccgccaggtccagaccgccgatgccggagaacaggctcacatgggtcagtcgctccatacctcgtccccttcaaggccgtcatcctggggatcgtcctccacttcctccagcggaatcaggttatgacgcttgatgatggcctcctccaggatgtcctgggcggcattgctgtcctccgggaggcccaggctgcggaagagctttttcagcaccttttcatagccgccggcctttttcttcagccggaggaagtccttctccgtttccgcctcggacaggcggcgggccagcgaatagtagaggacgatcaggtggtggatgtcgcccaccagcatacggaagccatagccggggatgatgtactcatccttatacttcttgggcttcggctcctccacgggcaccggggtggcctccgccagctcctttgccataaggtcctttaggtctttggggtcgccgaataccaggtagcggccggggatgccccagccctggaatttctcctcggcgatctcgccgtagcgcttcgccgcgtccagcacatggaacacgtcctcctcgtccttgatccggcccgccaggaaggcgagctggtggagaaggccgtacaggtggacctcatcgttgatgtggttgagataggtcttgccgtcgataatgtaaatcttgtttttcatattcacgcctcgctttcacaaaaatcaaattccatgctcatctgcccgccgcagagcatcatccgcaggaggtccttcccctggggcgtgataagggtctgctggcggaaatgcccgtacttccagaagtccttcacctggaacagccccttattggagggcttggcgtagggcagaaggtatccggccgggcagcggtagaggaagccctcctccatcaggaagcggcagaagtcgcgctcgcccacgcccagctccttggctgtggcccggatattggtgcagttgccggggcgcacaaaggcgtcgtaaaaatccgctttcggccgcagccgttccacctccccggtaaggcggcggttcttctcatgctccgccaggagctggtccgcaaaggagagaaggatctccgggtgcctggccgccgcctccagcagggagggcgtcatgtagcccccggtcctgcggatcgtgggaagcacctcatcgaacacccatttctcaaaccgctccgcgccgggcagccggctatgaacgatcaggcggtagacgtcgccctccgggaggaaggtcattgtctggtcaccgcttgcggtggggatggaacgtttcgttccacccctcgcatggtcacggacagcctttcggggattgctataccccagggcctttgccacatccgaaccgcagaacaggtatttcccgtcctcctggatcacgcggatactgccaaattcactgtttctgaatatctccatgttcatattcacgcctccgtttccgccgcgtgctccacttcgctgggcttggtggtgagcagcttgtaaagctccgtgtcctttgggaagtcgtccgcaaagggcaggattacattgttgaagaacagcagcccatggcccggctcggaattggtcacataggcaagttgctccgccgaaatgcccagccgctccgccaaaatcttgcggtcgccggcggcctggttgagcatatagatgaaatcgctgttttccaggatgttctcgatctccggggaggagagcaggtccttggggttctgggtcgccccggtgggcaccccgccccattttctaaaccgtttccagatctccgccgaataggccgccgtctgctcctccttcagcaggaggtggaactcgtccacgaaataccaggtggagcgcccaatggcccggttgatggtgacggtattccacaccgcgtcctggacgatgagcatccccggctttttcaggtttttgcccagacccttgatgtcaaagcagaccagccggttgcggatgtccacggtagtgcggtgattaaagaagttcagcgaaccgttcacatacagatccagcgcctgggccacccggtcggcctccgggatgccctgcgccagcagcgcctccatcaggtcgcccaagatgggcatattctccggccgggggtctgcgaagtagggctggtagatcttctgcaccgcccggtcgatgaccgttttctcgatggcctccagccccgtcttgctccccatgatgagctcgcagaaggacaggacaaaatcacttttcagcgccagggggttctcctcgtctgaatagttgaggttgatgtccagggggttcacatagtcggtgctggacggggacagccggatgatctgcccgcccagccggcgcaccaggggcgaatactcgtcctccgggtcgcagatgatgacattatcttttgtggtcaggatgatgaaagtgatctcccgcttgcagctcatggacttgccgctgcccggcgtgccgaacaccagcccgttggggcttctggactgtttgcggtccagaaggatcatgttgttactcaaagcgttgaggccgtagtacatggcgtccccgcccataaacagctcctgggtgacgaaggggacgaacaccgccagcgccgaagtggtgagactccgctcgattttgatacggttgaggcccaacggaaggctgctcatcagcccatcctcttgctggaagtccagccgggtgaggaggcagttgtaggtctgggcgacgctggccgcctgagatacggcgatctccagcttctgcttggttgccgccatgtgcatgaccaggaaggtcagattgaacattcgctcattcctgctttgcaggtcctggaggatggtctttgccgcgccgccgtaggtggcaaggtcgctggggaggatgtccatgtcgtagccgctgcgtaccgcccgcttctgctccgcaattttcatggcgtccaggtcggtgatcttccgcttgaccatcttgatggcctcgttctggttgatgccccggatgtgcatagttaccaggatgttgccctcggtctccataaactccgccaaaatgcggtcgtggatctccggggcggtgatctgcaaaaagctcaccgccccgtacatctcgccaatgcggaaggtgcgggtctccccgaagtggaaggaggacggggcgatgaagtccttgaccgaaaggccgctgggcgccagccagtc
